United States Patent Application Publication US 2021/0170017 A1 - sequence listing, part 9

SEQ ID NO: 12721 - RNA, 2069 nt, Artificial Sequence
  mRNA product Design g-1 comprising derived and/or modified sequence from HRSV(Memphis-37)__AIY60640.1__F0_DSCav1 (opt1)
gggagacuuucccauucuguagcagaauuugguguugccuguggucuuggucccgcggagaagcuuaccauggagcugcccauccucaagaccaacgccaucaccacgauccuggccgcggugacccugugcuucgccagcucccagaacaucaccgaggaguucuaccagagcacgugcuccgccgucagcaagggcuaccucuccgcccugcgcaccgggugguacaccagcgugaucaccaucgagcuguccaacaucaaggagaacaagugcaacggcaccgacgccaaggugaagcucaucaagcaggagcuggacaaguacaagaacgcggucacggagcugcagcuccugaugcagagcaccccggccgccaacaaccgggcccgccgggagcugccccgcuucaugaacuacacccucaacaacaccaagaacaacaacgugacgcuguccaagaagcggaagcgccgguuccugggguuccuccugggcguggggagcgcgaucgccuccggcaucgccgucugcaaggugcugcaccucgagggcgaggugaacaagaucaagaacgcccugcuguccaccaacaaggccgucgugagccucuccaacggggugagcguccugaccuucaaggugcuggaccucaagaacuacaucgacaagcagcugcugcccauccugaacaagcagagcugcuccaucagcaacaucgagaccgucaucgaguuccagcagaagaacaaccgccuccuggagaucacgcgggaguucagcgugaacgcgggcgugaccacccccgucuccaccuacaugcugacgaacagcgagcuccugucccugaucaacgacaugccgaucaccaacgaccagaagaagcucaugagcaacaacgugcagaucgugcgccagcaguccuacagcaucaugugcaucaucaaggaggagguccuggccuacguggugcagcugccccucuacggggucaucgacacccccugcuggaagcugcacaccagcccccugugcacgaccaacaccaaggagggcuccaacaucugccucacccggacggaccgcgggugguacugcgacaacgccggcagcguguccuucuucccgcaggccgagaccugcaagguccagagcaaccggguguucugcgacaccaugaacucccugacccugcccagcgaggugaaccucugcaacaucgacaucuucaaccccaaguacgacugcaagaucaugacguccaagaccgacgucagcuccagcgugaucaccucccugggcgccaucgugagcugcuacgggaagaccaagugcacggcgagcaacaagaaccgcggcaucaucaagaccuucuccaacgggugcgacuacgucagcaacaagggcguggacaccguguccgucggcaacacccuguacuacgugaacaagcaggagggcaagagccucuacgugaagggggagcccaucaucaacuucuacgacccgcuggucuuccccuccgacgaguucgacgccagcaucucccaggugaacgagaagaucaaccagagccuggccuucauccggaaguccgacgagcuccugcacaacgugaacgucggcaagagcaccacgaacaucaugaucaccaccaucaucaucgugaucaucgugauccugcugcuccugaucgccgucgggcuguuccucuacugcaaggcccgcuccacccccgugacgcugagcaaggaccagcuguccgggaucaacaacaucgcguucagcaacugaggacuaguggaagcauuuuccuggcugauuaaaagaaauuacucagcuauggucaucuguuccuguuagaaggcuaugcagcauauuauauacuaugcgcauguuaugaaaugcauaauaaaaaauuuuaaaaaaucuaaaagaucuaaaaaaaaaaaaaaaaaaaaaaaaaaaaaaaaaaaaaaaaaaaaaaaaaaaaaaaaaaaaaaaaugcaucccccccccccccccccccccccccccccccaaaggcucuuuucagagccaccagaauu

SEQ ID NO: 12722 - RNA, 2069 nt, Artificial Sequence
  mRNA product Design g-1 comprising derived and/or modified sequence from HRSV(Memphis-37)__AIY60640.1__F0_DSCav1 (opt1)
gggagacuuucccauucuguagcagaauuugguguugccuguggucuuggucccgcggagaagcuuaccauggagcugcccauccucaagaccaacgccaucaccacgauccuggccgcggugacccugugcuucgccagcucccagaacaucaccgaggaguucuaccagagcacgugcuccgccgucagcaagggcuaccucuccgcccugcgcaccgggugguacaccagcgugaucaccaucgagcuguccaacaucaaggagaacaagugcaacggcaccgacgccaaggugaagcucaucaagcaggagcuggacaaguacaagaacgcggucacggagcugcagcuccugaugcagagcaccccggccgccaacaaccgggcccgccgggagcugccccgcuucaugaacuacacccucaacaacaccaagaacaacaacgugacgcuguccaagaagcggaagcgccgguuccugggguuccuccugggcguggggagcgcgaucgccuccggcaucgccgucugcaaggugcugcaccucgagggcgaggugaacaagaucaagaacgcccugcugagcaccaacaaggccgucgugucccucagcaacgggguguccguccugaccuucaaggugcuggaccucaagaacuacaucgacaagcagcugcugcccauccucaacaagcagagcugcuccaucagcaacaucgagaccgugaucgaguuccagcagaagaacaaccgccugcuggagaucacgcgggaguucuccgucaacgcgggcgugaccacccccgugagcaccuacaugcucacgaacagcgagcugcugucccucaucaacgacaugccgaucaccaacgaccagaagaagcugaugagcaacaacguccagaucgugcgccagcaguccuacagcaucaugugcaucaucaaggaggaggugcuggccuacgucgugcagcucccccuguacggggugaucgacacccccugcuggaagcugcacaccagcccccucugcacgaccaacaccaaggagggcagcaacaucugccugacccggacggaccgcgggugguacugcgacaacgccggcuccgucagcuucuucccgcaggccgagaccugcaaggugcaguccaaccgggucuucugcgacaccaugaacagccugacccuccccuccgaggugaaccugugcaacaucgacaucuucaaccccaaguacgacugcaagaucaugacgagcaagaccgacguguccagcuccgucaucaccagccugggcgccaucguguccugcuacgggaagaccaagugcacggcgagcaacaagaaccgcggcaucaucaagaccuucuccaacgggugcgacuacgugagcaacaagggcgucgacaccgugagcgugggcaacacccucuacuacgucaacaagcaggaggggaagucccuguacgugaagggcgagcccaucaucaacuucuacgacccgcugguguuccccagcgacgaguucgacgccuccaucagccaggucaacgagaagaucaaccagucccucgccuucauccggaaguccgacgagcugcugcacaacgugaacguggggaaguccaccacgaacaucaugaucaccaccaucaucaucgucaucaucgugauccugcuccugcugaucgccgugggccucuuccuguacugcaaggcccgcagcacccccgucacgcuguccaaggaccagcucagcgggaucaacaacaucgcguucuccaacugaggacuaguggaagcauuuuccuggcugauuaaaagaaauuacucagcuauggucaucuguuccuguuagaaggcuaugcagcauauuauauacuaugcgcauguuaugaaaugcauaauaaaaaauuuuaaaaaaucuaaaagaucuaaaaaaaaaaaaaaaaaaaaaaaaaaaaaaaaaaaaaaaaaaaaaaaaaaaaaaaaaaaaaaaaugcaucccccccccccccccccccccccccccccccaaaggcucuuuucagagccaccagaauu

SEQ ID NO: 12723 - RNA, 2069 nt, Artificial Sequence
  mRNA product Design g-1 comprising derived and/or modified sequence from HRSV(Memphis-37)__AIY60640.1__F0_DSCav1 (opt2)
gggagacuuucccauucuguagcagaauuugguguugccuguggucuuggucccgcggagaagcuuaccauggagcuccccauccucaagaccaacgccaucaccaccauccucgccgccgucacccucugcuucgccuccucccagaacaucaccgaggaguucuaccaguccaccugcuccgccgucuccaagggcuaccucuccgcccuccgcaccggcugguacaccuccgucaucaccaucgagcucuccaacaucaaggagaacaagugcaacggcaccgacgccaaggucaagcucaucaagcaggagcucgacaaguacaagaacgccgucaccgagcuccagcuccucaugcaguccacccccgccgccaacaaccgcgcccgccgcgagcucccccgcuucaugaacuacacccucaacaacaccaagaacaacaacgucacccucuccaagaagcgcaagcgccgcuuccucggcuuccuccucggcgucggcuccgccaucgccuccggcaucgccgucugcaagguccuccaccucgagggcgaggucaacaagaucaagaacgcccuccucuccaccaacaaggccgucgucucccucuccaacggcgucuccguccucaccuucaagguccucgaccucaagaacuacaucgacaagcagcuccuccccauccucaacaagcaguccugcuccaucuccaacaucgagaccgucaucgaguuccagcagaagaacaaccgccuccucgagaucacccgcgaguucuccgucaacgccggcgucaccacccccgucuccaccuacaugcucaccaacuccgagcuccucucccucaucaacgacaugcccaucaccaacgaccagaagaagcucauguccaacaacguccagaucguccgccagcaguccuacuccaucaugugcaucaucaaggaggagguccucgccuacgucguccagcucccccucuacggcgucaucgacacccccugcuggaagcuccacaccuccccccucugcaccaccaacaccaaggagggcuccaacaucugccucacccgcaccgaccgcggcugguacugcgacaacgccggcuccgucuccuucuucccccaggccgagaccugcaagguccaguccaaccgcgucuucugcgacaccaugaacucccucacccuccccuccgaggucaaccucugcaacaucgacaucuucaaccccaaguacgacugcaagaucaugaccuccaagaccgacgucuccuccuccgucaucaccucccucggcgccaucgucuccugcuacggcaagaccaagugcaccgccuccaacaagaaccgcggcaucaucaagaccuucuccaacggcugcgacuacgucuccaacaagggcgucgacaccgucuccgucggcaacacccucuacuacgucaacaagcaggagggcaagucccucuacgucaagggcgagcccaucaucaacuucuacgacccccucgucuuccccuccgacgaguucgacgccuccaucucccaggucaacgagaagaucaaccagucccucgccuucauccgcaaguccgacgagcuccuccacaacgucaacgucggcaaguccaccaccaacaucaugaucaccaccaucaucaucgucaucaucgucauccuccuccuccucaucgccgucggccucuuccucuacugcaaggcccgcuccacccccgucacccucuccaaggaccagcucuccggcaucaacaacaucgccuucuccaacugaggacuaguggaagcauuuuccuggcugauuaaaagaaauuacucagcuauggucaucuguuccuguuagaaggcuaugcagcauauuauauacuaugcgcauguuaugaaaugcauaauaaaaaauuuuaaaaaaucuaaaagaucuaaaaaaaaaaaaaaaaaaaaaaaaaaaaaaaaaaaaaaaaaaaaaaaaaaaaaaaaaaaaaaaaugcaucccccccccccccccccccccccccccccccaaaggcucuuuucagagccaccagaauu

SEQ ID NO: 12724 - RNA, 2069 nt, Artificial Sequence
  mRNA product Design g-1 comprising derived and/or modified sequence from HRSV(Memphis-37)__AIY60640.1__F0_DSCav1 (opt3)
gggagacuuucccauucuguagcagaauuugguguugccuguggucuuggucccgcggagaagcuuaccauggagcugcccauccucaagaccaacgccauuacaacuauacuugcugcagugacgcugugcuucgccagcucccagaauaucaccgaagaguuuuaccaaucuacauguucagcggucaguaaaggcuauuugagcgcuuuaagaacugggugguacaccuccguuauuacaaucgaacugucuaacauuaaggagaauaaaugcaacggaaccgacgccaaggugaaacuaaucaagcaggaacucgauaaguauaaaaaugcaguaacugagcugcagcuucugaugcagucgaccccugccgcuaacaauagggcacggcgcgaguugccacgauucaugaacuacacacucaauaacacgaagaauaacaaugugacucugagcaaaaagcguaaaagaagguuucuggguuuccucuuaggcgucgggucagccauagcuaguggaaucgccguguguaagguucugcaccuugaaggcgaggugaacaagauuaaaaaugcguugcuguccaccaacaaggcagucgugucucuaagcaacgguguauccguucucacauuuaaagugcuggaccuuaagaauuauaucgauaaacaacuguugccgauucucaacaagcagucaugcaguaucagcaauauagaaacugucauugaguuccagcagaaaaacaaucggcuguuagagaucacccgcgaauuuucugugaacgccggggugacaacccccgucuccacguacaugcugacuaauucagagcuccuuagccugauuaacgacaugccuaucacaaaugaucaaaagaaguugaugaguaacaauguucagaucgugagacagcagucuuauuccauuauguguauaaucaaagaagagguacuagcuuacgugguccaacugccacucuacggagugauugacacccccugcuggaagcugcauacuagcccucuuuguacaaccaacacgaaagaaggcucgaauaucugccugaccaggacagaucggggcugguauugugacaacgccgggucuguuuccuucuuuccacaggcagagacuugcaaggugcagucaaaucgcgucuucugugauaccaugaacaguuugacacuccccagcgaggugaaccugugcaauauagacauuuuuaacccuaaauacgauugcaagaucaugacuuccaagaccgacguaucuagcucaguuaucacaaguuuaggagcuauuguguccuguuaugguaaaaccaagugcacugccagcaauaaaaaccgaggcaucauuaagacguucucuaaugggugugauuacgucucaaacaaaggaguggacacagucagugugggcaauacccuguauuacguuaacaagcaagaagguaagagccuauaugugaaaggggagccaauaaucaauuuuuacgacccgcucguauuccccuccgaugaguucgacgcgucuauuucgcaggucaacgaaaagaucaaucagagccuggccuuuaucagaaaauccgaugaacuuuugcacaacgugaauguuggaaagucaacuaccaacauuaugauaacaaccaucauuaucgugauuaucgucauacugcuccugcuuaucgcagugggccuguucuuguacugcaaagcuaggaguacuccuguaacacucucuaaggaccagcugagcggcauuaauaacaucgccuuuuccaacugaggacuaguggaagcauuuuccuggcugauuaaaagaaauuacucagcuauggucaucuguuccuguuagaaggcuaugcagcauauuauauacuaugcgcauguuaugaaaugcauaauaaaaaauuuuaaaaaaucuaaaagaucuaaaaaaaaaaaaaaaaaaaaaaaaaaaaaaaaaaaaaaaaaaaaaaaaaaaaaaaaaaaaaaaaugcaucccccccccccccccccccccccccccccccaaaggcucuuuucagagccaccagaauu

SEQ ID NO: 12725 - RNA, 2069 nt, Artificial Sequence
  mRNA product Design g-1 comprising derived and/or modified sequence from HRSV(Memphis-37)__AIY60640.1__F0_DSCav1 (opt4)
gggagacuuucccauucuguagcagaauuugguguugccuguggucuuggucccgcggagaagcuuaccauggagcugcccauccugaagaccaacgccaucaccaccauccuggccgccgugacccugugcuucgccagcagccagaacaucaccgaggaguucuaccagagcaccugcagcgccgugagcaagggcuaccugagcgcccugagaaccggcugguacaccagcgugaucaccaucgagcugagcaacaucaaggagaacaagugcaacggcaccgacgccaaggugaagcugaucaagcaggagcuggacaaguacaagaacgccgugaccgagcugcagcugcugaugcagagcacccccgccgccaacaacagagccagaagagagcugcccagauucaugaacuacacccugaacaacaccaagaacaacaacgugacccugagcaagaagagaaagagaagauuccugggcuuccugcugggcgugggcagcgccaucgccagcggcaucgccgugugcaaggugcugcaccuggagggcgaggugaacaagaucaagaacgcccugcugagcaccaacaaggccguggugagccugagcaacggcgugagcgugcugaccuucaaggugcuggaccugaagaacuacaucgacaagcagcugcugcccauccugaacaagcagagcugcagcaucagcaacaucgagaccgugaucgaguuccagcagaagaacaacagacugcuggagaucaccagagaguucagcgugaacgccggcgugaccacccccgugagcaccuacaugcugaccaacagcgagcugcugagccugaucaacgacaugcccaucaccaacgaccagaagaagcugaugagcaacaacgugcagaucgugagacagcagagcuacagcaucaugugcaucaucaaggaggaggugcuggccuacguggugcagcugccccuguacggcgugaucgacacccccugcuggaagcugcacaccagcccccugugcaccaccaacaccaaggagggcagcaacaucugccugaccagaaccgacagaggcugguacugcgacaacgccggcagcgugagcuucuucccccaggccgagaccugcaaggugcagagcaacagaguguucugcgacaccaugaacagccugacccugcccagcgaggugaaccugugcaacaucgacaucuucaaccccaaguacgacugcaagaucaugaccagcaagaccgacgugagcagcagcgugaucaccagccugggcgccaucgugagcugcuacggcaagaccaagugcaccgccagcaacaagaacagaggcaucaucaagaccuucagcaacggcugcgacuacgugagcaacaagggcguggacaccgugagcgugggcaacacccuguacuacgugaacaagcaggagggcaagagccuguacgugaagggcgagcccaucaucaacuucuacgacccccugguguuccccagcgacgaguucgacgccagcaucagccaggugaacgagaagaucaaccagagccuggccuucaucagaaagagcgacgagcugcugcacaacgugaacgugggcaagagcaccaccaacaucaugaucaccaccaucaucaucgugaucaucgugauccugcugcugcugaucgccgugggccuguuccuguacugcaaggccagaagcacccccgugacccugagcaaggaccagcugagcggcaucaacaacaucgccuucagcaacugaggacuaguggaagcauuuuccuggcugauuaaaagaaauuacucagcuauggucaucuguuccuguuagaaggcuaugcagcauauuauauacuaugcgcauguuaugaaaugcauaauaaaaaauuuuaaaaaaucuaaaagaucuaaaaaaaaaaaaaaaaaaaaaaaaaaaaaaaaaaaaaaaaaaaaaaaaaaaaaaaaaaaaaaaaugcaucccccccccccccccccccccccccccccccaaaggcucuuuucagagccaccagaauu

SEQ ID NO: 12726 - RNA, 2069 nt, Artificial Sequence
  mRNA product Design g-1 comprising derived and/or modified sequence from HRSV(Memphis-37)__AIY60640.1__F0_DSCav1 (opt5)
gggagacuuucccauucuguagcagaauuugguguugccuguggucuuggucccgcggagaagcuuaccauggagcugcccauccucaagaccaacgccauuacaacgauccuggcugccgugacccuuugcuucgcgagcucccagaauauuacagaagaguuuuaccaaucuaccuguagcgcugucuccaaaggcuaucugucugcccucagaacagggugguacaccagcguuaucacaauugaacuguccaacaucaaggagaauaaaugcaacggaaccgacgccaaggugaaacuuaucaagcaggaacuggauaaguauaaaaaugcugugacggagcuccagcugcugaugcagucuaccccugccgcuaacaaucgggcccgcagagagcucccgcgguucaugaacuacacacugaauaacaccaagaauaacaaugucacacuuagcaaaaagcgcaaaagacgguuucugggcuuccuccugggggugggauccgcgauugccagcggcaucgcuguuuguaaggugcuucaccuggaaggggaggucaacaagauuaaaaaugcccuccugucuaccaacaaggcugugguuucccugagcaacggagugucuguccucacguuuaaagugcuggaccuuaagaauuauaucgauaaacaacugcuccccauucugaacaagcaguccugcagcaucucuaauauugaaacagugaucgaguuccagcagaaaaacaaucgccuucuggagaucaccagagaauuuuccgucaacgccggcguuacaaccccugugagcaccuacaugcucacaaauuccgagcugcugucucucauuaacgacaugcccaucacgaaugaucaaaagaagcugaugagcaacaaugugcagauuguccggcagcaguccuauagcaucauguguauuaucaaagaagaggugcuugcguacguugugcaacugccucucuacggcgucaucgacacccccugcuggaagcugcauacaucuccucuuuguaccacaaacaccaaagaaggguccaauauuugccugacgcgcacagauagaggaugguauugugacaacgccggcagcgugucuuucuuuccgcaggcugagaccugcaagguucagagcaaucggguguucugugauaccaugaacucccucacacugcccucugaggucaaccugugcaauaucgacauuuuuaacccuaaauacgauugcaagaucaugaccagcaagacagacguguccagcucugucauuacgucccucggggccaucgugagcuguuauggaaaaaccaagugcacagcuucuaauaaaaaccgcggcaucauuaagaccuucuccaaugggugugauuacguuagcaacaaaggaguggacacagucuccgugggcaauacccuguauuacguuaacaagcaagaaggcaagucucuuuaugugaaaggggagcccaucauuaauuuuuacgacccucuggucuuccccagcgaugaguucgacgccuccaucucucaggugaacgaaaagauuaaucagagccucgccuuuaucagaaaauccgaugaacugcugcacaacgugaauguuggaaagagcacgaccaacauuaugaucacaaccaucauuaucgucauuaucgugauucuucuccugcugaucgcugugggccucuuccuguacugcaaagcgcggucuacaccggucacccuuuccaaggaccagcugagcgggaucaauaacauugccuuuucuaacugaggacuaguggaagcauuuuccuggcugauuaaaagaaauuacucagcuauggucaucuguuccuguuagaaggcuaugcagcauauuauauacuaugcgcauguuaugaaaugcauaauaaaaaauuuuaaaaaaucuaaaagaucuaaaaaaaaaaaaaaaaaaaaaaaaaaaaaaaaaaaaaaaaaaaaaaaaaaaaaaaaaaaaaaaaugcaucccccccccccccccccccccccccccccccaaaggcucuuuucagagccaccagaauu

SEQ ID NO: 12727 - RNA, 2069 nt, Artificial Sequence
  mRNA product Design g-1 comprising derived and/or modified sequence from HRSV(Memphis-37)__AIY60640.1__F0_DSCav1 (opt6)
gggagacuuucccauucuguagcagaauuugguguugccuguggucuuggucccgcggagaagcuuaccauggaacucccaauccucaaaaccaaugccauaacaaccauacucgcugcaguaaccuuauguuucgcaaguagccaaaacauaaccgaagaauuuuaucaauccacaugcuccgcaguuucuaaaggauaucuaucagcauuaagaacuggaugguacacaucuguaauaacuauagaacuaagcaauauaaaagaaaacaaauguaacggaacugacgcuaaaguaaaacuuauaaaacaagaacuagauaaauacaaaaacgccguuaccgaacuacaacuauuaaugcaaucaacaccagccgcaaauaacagagcaagacgcgaauuaccaagauucaugaauuacacacuaaacaauacaaaaaauaacaauguaacacuaucaaaaaaaagaaaacgacgauucuuaggcuuccuacuaggagucggcucagcaauagcuuccggaauagccgucuguaaaguccuacaccuugaaggcgaaguaaacaaaaucaaaaacgcacuauuaucaacaaacaaagcagucguaucuuuauccaacggagucucaguccuaacauucaaaguacucgauuuaaaaaacuacaucgauaaacaacuccuucccauucuaaacaaacaauccugcucaauauccaacaucgaaacagucauagaauuucaacaaaaaaacaaccgccugcuagaaauaacaagagaauuuuccguaaaugccggcgucaccacaccaguaucaacauacaugcuaacaaacuccgaacuacucucccuaauaaacgauaugccaaucaccaacgaccaaaaaaaacuaaugucaaauaacguucaaauagucagacaacaaucauacagcauaaugugcauaauaaaagaagaagucuuagccuacguuguacaacucccauuauacggaguuaucgauacaccaugcuggaaauuacacacaucacccuuaugcaccacaaacacaaaagaaggauccaauauuugucuaacacgaacagacagaggaugguacugugauaacgcaggaucagugucauucuuuccacaagcagaaacauguaaaguucaaucuaacagaguauucugcgacaccaugaacucccuaaccuuacccucagaaguaaaucuaugcaacauagauaucuuuaacccaaaauacgacugcaaaaucaugacaucaaaaacugacguuucuucauccguuauaacuucccucggcgcuauaguguccugcuacggaaaaacuaaaugcacagcauccaacaaaaauagaggaauaauaaaaacauuuuccaacggcugcgacuauguuucaaacaaaggaguagauaccguaucagucggcaauacauuauauuauguuaacaaacaagaaggaaaaucccuauacguaaaaggagaaccuauaaucaacuucuacgacccacucguauuccccucagacgaauuugacgcaucuauaucucaaguaaaugaaaaaauaaaccaaucacucgcauuuauccgcaaaucugacgaauuacuccauaacgucaacgucggcaaaucaaccaccaacauaaugauaacaacaauuauaauaguaauaauugucauacuacuacuccuaauagcaguaggucuauuccuauacugcaaagcaagauccacccccguaacccuuuccaaagaucaacucucaggaauaaauaacauagccuuuucaaacuaaggacuaguggaagcauuuuccuggcugauuaaaagaaauuacucagcuauggucaucuguuccuguuagaaggcuaugcagcauauuauauacuaugcgcauguuaugaaaugcauaauaaaaaauuuuaaaaaaucuaaaagaucuaaaaaaaaaaaaaaaaaaaaaaaaaaaaaaaaaaaaaaaaaaaaaaaaaaaaaaaaaaaaaaaaugcaucccccccccccccccccccccccccccccccaaaggcucuuuucagagccaccagaauu

SEQ ID NO: 12728 - RNA, 2069 nt, Artificial Sequence
  mRNA product Design g-1 comprising derived and/or modified sequence from HRSV(Memphis-37)__AIY60640.1__F0_DSCav1 (opt11)
gggagacuuucccauucuguagcagaauuugguguugccuguggucuuggucccgcggagaagcuuaccauggaacuccccauacucaagacuaaugccaucaccaccauccucgccgccgugacccucugcuucgcaucgucccaaaacauaacagaagaguucuaccaaagcacaugcuccgcagucuccaaaggauaccucuccgcacuacguaccggcugguacaccagcgucaucaccaucgaacuuuccaacaucaaagagaacaaaugcaacggcaccgacgccaaaguaaaacucauaaaacaagagcuagacaaauacaaaaacgccgucacagaacuccaacuacugaugcaauccacaccggccgccaacaaccgcgcucgacgugaacucccacgcuucaugaacuacacucuuaacaacaccaaaaauaacaacgucacccuauccaaaaagcgaaagcgcagauuccucggcuuccuacuuggcgucggcucggcgauagccucuggaaucgccguuugcaagguccuccaccuagaaggcgaaguaaacaaaaucaaaaacgcacuccuaagcaccaacaaagccgucgucucacuuuccaacggcgucucaguccucacauucaaaguucucgaccuaaagaacuacaucgacaagcaacuacuacccauacucaauaaacaauccugcuccaucagcaacaucgagacagucaucgaauuucaacaaaagaacaaccgccuccucgaaauuacacgcgaguucucagucaacgccggagucaccaccccagucucaacauacaugcucaccaacagcgaacuccugucucuaaucaacgacaugcccaucacuaacgaccagaagaaacucauguccaacaacguccaaaucgugcgacaacaaucauacucuaucaugugcaucaucaaagaagaaguccucgcauacgucguccagcucccacucuacggcguaaucgacacacccugcuggaaacuccacacaucaccccuaugcaccaccaacacaaaagaaggcuccaacaucugccuaacccgaaccgacagagguugguauugcgacaacgccggcucagucucauucuucccacaagccgaaaccuguaaaguccaaucaaaccgcgucuucugcgauaccaugaacucucucacacuccccuccgaagucaaucucugcaacauagacaucuucaauccaaaguacgacugcaaaauaaugaccucgaaaaccgacguaagcuccagcgucaucaccuccuuaggcgcaaucguauccugcuacggcaaaaccaaaugcaccgccucaaacaaaaacagaggcaucaucaaaacguucucgaacggaugcgacuacguuuccaauaaaggcguagauaccgucuccgucggcaacacacucuauuacgucaacaaacaagaaggcaaaucccucuacgucaaaggugaaccuaucaucaacuucuacgacccccucgucuuccccagcgacgaguucgaugccucaaucagccaagucaacgagaaaaucaaccaaucacuggcuuucauacgcaaauccgacgaacuccuccacaacgugaacgucggcaaauccacaaccaacaucaugauaaccacaauaaucaucgucauaaucguaauccuacuccuccuuauugccguaggacuauuccuauacugcaaagcccgauccacccccgucacccucucaaaagaccaacucuccggcaucaacaauauagccuucucuaacuaaggacuaguggaagcauuuuccuggcugauuaaaagaaauuacucagcuauggucaucuguuccuguuagaaggcuaugcagcauauuauauacuaugcgcauguuaugaaaugcauaauaaaaaauuuuaaaaaaucuaaaagaucuaaaaaaaaaaaaaaaaaaaaaaaaaaaaaaaaaaaaaaaaaaaaaaaaaaaaaaaaaaaaaaaaugcaucccccccccccccccccccccccccccccccaaaggcucuuuucagagccaccagaauu

SEQ ID NO: 12729 - RNA, 2084 nt, Artificial Sequence
  mRNA product Design g-2 comprising derived and/or modified sequence from HRSV(Memphis-37)__AIY60640.1__F0_DSCav1 (opt1)
gggagaguccgcucagccagguugcagaagcggcuuagcguguguccuaaucuucucucugcguguagguaggccugugccgcaaacaagcuuaccauggagcugcccauccucaagaccaacgccaucaccacgauccuggccgcggugacccugugcuucgccagcucccagaacaucaccgaggaguucuaccagagcacgugcuccgccgucagcaagggcuaccucuccgcccugcgcaccgggugguacaccagcgugaucaccaucgagcuguccaacaucaaggagaacaagugcaacggcaccgacgccaaggugaagcucaucaagcaggagcuggacaaguacaagaacgcggucacggagcugcagcuccugaugcagagcaccccggccgccaacaaccgggcccgccgggagcugccccgcuucaugaacuacacccucaacaacaccaagaacaacaacgugacgcuguccaagaagcggaagcgccgguuccugggguuccuccugggcguggggagcgcgaucgccuccggcaucgccgucugcaaggugcugcaccucgagggcgaggugaacaagaucaagaacgcccugcuguccaccaacaaggccgucgugagccucuccaacggggugagcguccugaccuucaaggugcuggaccucaagaacuacaucgacaagcagcugcugcccauccugaacaagcagagcugcuccaucagcaacaucgagaccgucaucgaguuccagcagaagaacaaccgccuccuggagaucacgcgggaguucagcgugaacgcgggcgugaccacccccgucuccaccuacaugcugacgaacagcgagcuccugucccugaucaacgacaugccgaucaccaacgaccagaagaagcucaugagcaacaacgugcagaucgugcgccagcaguccuacagcaucaugugcaucaucaaggaggagguccuggccuacguggugcagcugccccucuacggggucaucgacacccccugcuggaagcugcacaccagcccccugugcacgaccaacaccaaggagggcuccaacaucugccucacccggacggaccgcgggugguacugcgacaacgccggcagcguguccuucuucccgcaggccgagaccugcaagguccagagcaaccggguguucugcgacaccaugaacucccugacccugcccagcgaggugaaccucugcaacaucgacaucuucaaccccaaguacgacugcaagaucaugacguccaagaccgacgucagcuccagcgugaucaccucccugggcgccaucgugagcugcuacgggaagaccaagugcacggcgagcaacaagaaccgcggcaucaucaagaccuucuccaacgggugcgacuacgucagcaacaagggcguggacaccguguccgucggcaacacccuguacuacgugaacaagcaggagggcaagagccucuacgugaagggggagcccaucaucaacuucuacgacccgcuggucuuccccuccgacgaguucgacgccagcaucucccaggugaacgagaagaucaaccagagccuggccuucauccggaaguccgacgagcuccugcacaacgugaacgucggcaagagcaccacgaacaucaugaucaccaccaucaucaucgugaucaucgugauccugcugcuccugaucgccgucgggcuguuccucuacugcaaggcccgcuccacccccgugacgcugagcaaggaccagcuguccgggaucaacaacaucgcguucagcaacugaggacuaguaauaaggaaacuguaugaaugucugugggcaggaagugaagagauccuucuguaaagguuuuuggaauuaugucugcugaauaauaaacuuuuuugaaauaauaaaucugguagaaaaaugagaucuaaaaaaaaaaaaaaaaaaaaaaaaaaaaaaaaaaaaaaaaaaaaaaaaaaaaaaaaaaaaaaaaugcaucccccccccccccccccccccccccccccccaaaggcucuuuucagagccaccagaauu

SEQ ID NO: 12730 - RNA, 2084 nt, Artificial Sequence
  mRNA product Design g-2 comprising derived and/or modified sequence from HRSV(Memphis-37)__AIY60640.1__F0_DSCav1 (opt1)
gggagaguccgcucagccagguugcagaagcggcuuagcguguguccuaaucuucucucugcguguagguaggccugugccgcaaacaagcuuaccauggagcugcccauccucaagaccaacgccaucaccacgauccuggccgcggugacccugugcuucgccagcucccagaacaucaccgaggaguucuaccagagcacgugcuccgccgucagcaagggcuaccucuccgcccugcgcaccgggugguacaccagcgugaucaccaucgagcuguccaacaucaaggagaacaagugcaacggcaccgacgccaaggugaagcucaucaagcaggagcuggacaaguacaagaacgcggucacggagcugcagcuccugaugcagagcaccccggccgccaacaaccgggcccgccgggagcugccccgcuucaugaacuacacccucaacaacaccaagaacaacaacgugacgcuguccaagaagcggaagcgccgguuccugggguuccuccugggcguggggagcgcgaucgccuccggcaucgccgucugcaaggugcugcaccucgagggcgaggugaacaagaucaagaacgcccugcugagcaccaacaaggccgucgugucccucagcaacgggguguccguccugaccuucaaggugcuggaccucaagaacuacaucgacaagcagcugcugcccauccucaacaagcagagcugcuccaucagcaacaucgagaccgugaucgaguuccagcagaagaacaaccgccugcuggagaucacgcgggaguucuccgucaacgcgggcgugaccacccccgugagcaccuacaugcucacgaacagcgagcugcugucccucaucaacgacaugccgaucaccaacgaccagaagaagcugaugagcaacaacguccagaucgugcgccagcaguccuacagcaucaugugcaucaucaaggaggaggugcuggccuacgucgugcagcucccccuguacggggugaucgacacccccugcuggaagcugcacaccagcccccucugcacgaccaacaccaaggagggcagcaacaucugccugacccggacggaccgcgggugguacugcgacaacgccggcuccgucagcuucuucccgcaggccgagaccugcaaggugcaguccaaccgggucuucugcgacaccaugaacagccugacccuccccuccgaggugaaccugugcaacaucgacaucuucaaccccaaguacgacugcaagaucaugacgagcaagaccgacguguccagcuccgucaucaccagccugggcgccaucguguccugcuacgggaagaccaagugcacggcgagcaacaagaaccgcggcaucaucaagaccuucuccaacgggugcgacuacgugagcaacaagggcgucgacaccgugagcgugggcaacacccucuacuacgucaacaagcaggaggggaagucccuguacgugaagggcgagcccaucaucaacuucuacgacccgcugguguuccccagcgacgaguucgacgccuccaucagccaggucaacgagaagaucaaccagucccucgccuucauccggaaguccgacgagcugcugcacaacgugaacguggggaaguccaccacgaacaucaugaucaccaccaucaucaucgucaucaucgugauccugcuccugcugaucgccgugggccucuuccuguacugcaaggcccgcagcacccccgucacgcuguccaaggaccagcucagcgggaucaacaacaucgcguucuccaacugaggacuaguaauaaggaaacuguaugaaugucugugggcaggaagugaagagauccuucuguaaagguuuuuggaauuaugucugcugaauaauaaacuuuuuugaaauaauaaaucugguagaaaaaugagaucuaaaaaaaaaaaaaaaaaaaaaaaaaaaaaaaaaaaaaaaaaaaaaaaaaaaaaaaaaaaaaaaaugcaucccccccccccccccccccccccccccccccaaaggcucuuuucagagccaccagaauu

SEQ ID NO: 12731 - RNA, 2084 nt, Artificial Sequence
  mRNA product Design g-2 comprising derived and/or modified sequence from HRSV(Memphis-37)__AIY60640.1__F0_DSCav1 (opt2)
gggagaguccgcucagccagguugcagaagcggcuuagcguguguccuaaucuucucucugcguguagguaggccugugccgcaaacaagcuuaccauggagcuccccauccucaagaccaacgccaucaccaccauccucgccgccgucacccucugcuucgccuccucccagaacaucaccgaggaguucuaccaguccaccugcuccgccgucuccaagggcuaccucuccgcccuccgcaccggcugguacaccuccgucaucaccaucgagcucuccaacaucaaggagaacaagugcaacggcaccgacgccaaggucaagcucaucaagcaggagcucgacaaguacaagaacgccgucaccgagcuccagcuccucaugcaguccacccccgccgccaacaaccgcgcccgccgcgagcucccccgcuucaugaacuacacccucaacaacaccaagaacaacaacgucacccucuccaagaagcgcaagcgccgcuuccucggcuuccuccucggcgucggcuccgccaucgccuccggcaucgccgucugcaagguccuccaccucgagggcgaggucaacaagaucaagaacgcccuccucuccaccaacaaggccgucgucucccucuccaacggcgucuccguccucaccuucaagguccucgaccucaagaacuacaucgacaagcagcuccuccccauccucaacaagcaguccugcuccaucuccaacaucgagaccgucaucgaguuccagcagaagaacaaccgccuccucgagaucacccgcgaguucuccgucaacgccggcgucaccacccccgucuccaccuacaugcucaccaacuccgagcuccucucccucaucaacgacaugcccaucaccaacgaccagaagaagcucauguccaacaacguccagaucguccgccagcaguccuacuccaucaugugcaucaucaaggaggagguccucgccuacgucguccagcucccccucuacggcgucaucgacacccccugcuggaagcuccacaccuccccccucugcaccaccaacaccaaggagggcuccaacaucugccucacccgcaccgaccgcggcugguacugcgacaacgccggcuccgucuccuucuucccccaggccgagaccugcaagguccaguccaaccgcgucuucugcgacaccaugaacucccucacccuccccuccgaggucaaccucugcaacaucgacaucuucaaccccaaguacgacugcaagaucaugaccuccaagaccgacgucuccuccuccgucaucaccucccucggcgccaucgucuccugcuacggcaagaccaagugcaccgccuccaacaagaaccgcggcaucaucaagaccuucuccaacggcugcgacuacgucuccaacaagggcgucgacaccgucuccgucggcaacacccucuacuacgucaacaagcaggagggcaagucccucuacgucaagggcgagcccaucaucaacuucuacgacccccucgucuuccccuccgacgaguucgacgccuccaucucccaggucaacgagaagaucaaccagucccucgccuucauccgcaaguccgacgagcuccuccacaacgucaacgucggcaaguccaccaccaacaucaugaucaccaccaucaucaucgucaucaucgucauccuccuccuccucaucgccgucggccucuuccucuacugcaaggcccgcuccacccccgucacccucuccaaggaccagcucuccggcaucaacaacaucgccuucuccaacugaggacuaguaauaaggaaacuguaugaaugucugugggcaggaagugaagagauccuucuguaaagguuuuuggaauuaugucugcugaauaauaaacuuuuuugaaauaauaaaucugguagaaaaaugagaucuaaaaaaaaaaaaaaaaaaaaaaaaaaaaaaaaaaaaaaaaaaaaaaaaaaaaaaaaaaaaaaaaugcaucccccccccccccccccccccccccccccccaaaggcucuuuucagagccaccagaauu

SEQ ID NO: 12732 - RNA, 2084 nt, Artificial Sequence
  mRNA product Design g-2 comprising derived and/or modified sequence from HRSV(Memphis-37)__AIY60640.1__F0_DSCav1 (opt3)
gggagaguccgcucagccagguugcagaagcggcuuagcguguguccuaaucuucucucugcguguagguaggccugugccgcaaacaagcuuaccauggagcugcccauccucaagaccaacgccauuacaacuauacuugcugcagugacgcugugcuucgccagcucccagaauaucaccgaagaguuuuaccaaucuacauguucagcggucaguaaaggcuauuugagcgcuuuaagaacugggugguacaccuccguuauuacaaucgaacugucuaacauuaaggagaauaaaugcaacggaaccgacgccaaggugaaacuaaucaagcaggaacucgauaaguauaaaaaugcaguaacugagcugcagcuucugaugcagucgaccccugccgcuaacaauagggcacggcgcgaguugccacgauucaugaacuacacacucaauaacacgaagaauaacaaugugacucugagcaaaaagcguaaaagaagguuucuggguuuccucuuaggcgucgggucagccauagcuaguggaaucgccguguguaagguucugcaccuugaaggcgaggugaacaagauuaaaaaugcguugcuguccaccaacaaggcagucgugucucuaagcaacgguguauccguucucacauuuaaagugcuggaccuuaagaauuauaucgauaaacaacuguugccgauucucaacaagcagucaugcaguaucagcaauauagaaacugucauugaguuccagcagaaaaacaaucggcuguuagagaucacccgcgaauuuucugugaacgccggggugacaacccccgucuccacguacaugcugacuaauucagagcuccuuagccugauuaacgacaugccuaucacaaaugaucaaaagaaguugaugaguaacaauguucagaucgugagacagcagucuuauuccauuauguguauaaucaaagaagagguacuagcuuacgugguccaacugccacucuacggagugauugacacccccugcuggaagcugcauacuagcccucuuuguacaaccaacacgaaagaaggcucgaauaucugccugaccaggacagaucggggcugguauugugacaacgccgggucuguuuccuucuuuccacaggcagagacuugcaaggugcagucaaaucgcgucuucugugauaccaugaacaguuugacacuccccagcgaggugaaccugugcaauauagacauuuuuaacccuaaauacgauugcaagaucaugacuuccaagaccgacguaucuagcucaguuaucacaaguuuaggagcuauuguguccuguuaugguaaaaccaagugcacugccagcaauaaaaaccgaggcaucauuaagacguucucuaaugggugugauuacgucucaaacaaaggaguggacacagucagugugggcaauacccuguauuacguuaacaagcaagaagguaagagccuauaugugaaaggggagccaauaaucaauuuuuacgacccgcucguauuccccuccgaugaguucgacgcgucuauuucgcaggucaacgaaaagaucaaucagagccuggccuuuaucagaaaauccgaugaacuuuugcacaacgugaauguuggaaagucaacuaccaacauuaugauaacaaccaucauuaucgugauuaucgucauacugcuccugcuuaucgcagugggccuguucuuguacugcaaagcuaggaguacuccuguaacacucucuaaggaccagcugagcggcauuaauaacaucgccuuuuccaacugaggacuaguaauaaggaaacuguaugaaugucugugggcaggaagugaagagauccuucuguaaagguuuuuggaauuaugucugcugaauaauaaacuuuuuugaaauaauaaaucugguagaaaaaugagaucuaaaaaaaaaaaaaaaaaaaaaaaaaaaaaaaaaaaaaaaaaaaaaaaaaaaaaaaaaaaaaaaaugcaucccccccccccccccccccccccccccccccaaaggcucuuuucagagccaccagaauu

SEQ ID NO: 12733 - RNA, 2084 nt, Artificial Sequence
  mRNA product Design g-2 comprising derived and/or modified sequence from HRSV(Memphis-37)__AIY60640.1__F0_DSCav1 (opt4)
gggagaguccgcucagccagguugcagaagcggcuuagcguguguccuaaucuucucucugcguguagguaggccugugccgcaaacaagcuuaccauggagcugcccauccugaagaccaacgccaucaccaccauccuggccgccgugacccugugcuucgccagcagccagaacaucaccgaggaguucuaccagagcaccugcagcgccgugagcaagggcuaccugagcgcccugagaaccggcugguacaccagcgugaucaccaucgagcugagcaacaucaaggagaacaagugcaacggcaccgacgccaaggugaagcugaucaagcaggagcuggacaaguacaagaacgccgugaccgagcugcagcugcugaugcagagcacccccgccgccaacaacagagccagaagagagcugcccagauucaugaacuacacccugaacaacaccaagaacaacaacgugacccugagcaagaagagaaagagaagauuccugggcuuccugcugggcgugggcagcgccaucgccagcggcaucgccgugugcaaggugcugcaccuggagggcgaggugaacaagaucaagaacgcccugcugagcaccaacaaggccguggugagccugagcaacggcgugagcgugcugaccuucaaggugcuggaccugaagaacuacaucgacaagcagcugcugcccauccugaacaagcagagcugcagcaucagcaacaucgagaccgugaucgaguuccagcagaagaacaacagacugcuggagaucaccagagaguucagcgugaacgccggcgugaccacccccgugagcaccuacaugcugaccaacagcgagcugcugagccugaucaacgacaugcccaucaccaacgaccagaagaagcugaugagcaacaacgugcagaucgugagacagcagagcuacagcaucaugugcaucaucaaggaggaggugcuggccuacguggugcagcugccccuguacggcgugaucgacacccccugcuggaagcugcacaccagcccccugugcaccaccaacaccaaggagggcagcaacaucugccugaccagaaccgacagaggcugguacugcgacaacgccggcagcgugagcuucuucccccaggccgagaccugcaaggugcagagcaacagaguguucugcgacaccaugaacagccugacccugcccagcgaggugaaccugugcaacaucgacaucuucaaccccaaguacgacugcaagaucaugaccagcaagaccgacgugagcagcagcgugaucaccagccugggcgccaucgugagcugcuacggcaagaccaagugcaccgccagcaacaagaacagaggcaucaucaagaccuucagcaacggcugcgacuacgugagcaacaagggcguggacaccgugagcgugggcaacacccuguacuacgugaacaagcaggagggcaagagccuguacgugaagggcgagcccaucaucaacuucuacgacccccugguguuccccagcgacgaguucgacgccagcaucagccaggugaacgagaagaucaaccagagccuggccuucaucagaaagagcgacgagcugcugcacaacgugaacgugggcaagagcaccaccaacaucaugaucaccaccaucaucaucgugaucaucgugauccugcugcugcugaucgccgugggccuguuccuguacugcaaggccagaagcacccccgugacccugagcaaggaccagcugagcggcaucaacaacaucgccuucagcaacugaggacuaguaauaaggaaacuguaugaaugucugugggcaggaagugaagagauccuucuguaaagguuuuuggaauuaugucugcugaauaauaaacuuuuuugaaauaauaaaucugguagaaaaaugagaucuaaaaaaaaaaaaaaaaaaaaaaaaaaaaaaaaaaaaaaaaaaaaaaaaaaaaaaaaaaaaaaaaugcaucccccccccccccccccccccccccccccccaaaggcucuuuucagagccaccagaauu

SEQ ID NO: 12734 - RNA, 2084 nt, Artificial Sequence
  mRNA product Design g-2 comprising derived and/or modified sequence from HRSV(Memphis-37)__AIY60640.1__F0_DSCav1 (opt5)
gggagaguccgcucagccagguugcagaagcggcuuagcguguguccuaaucuucucucugcguguagguaggccugugccgcaaacaagcuuaccauggagcugcccauccucaagaccaacgccauuacaacgauccuggcugccgugacccuuugcuucgcgagcucccagaauauuacagaagaguuuuaccaaucuaccuguagcgcugucuccaaaggcuaucugucugcccucagaacagggugguacaccagcguuaucacaauugaacuguccaacaucaaggagaauaaaugcaacggaaccgacgccaaggugaaacuuaucaagcaggaacuggauaaguauaaaaaugcugugacggagcuccagcugcugaugcagucuaccccugccgcuaacaaucgggcccgcagagagcucccgcgguucaugaacuacacacugaauaacaccaagaauaacaaugucacacuuagcaaaaagcgcaaaagacgguuucugggcuuccuccugggggugggauccgcgauugccagcggcaucgcuguuuguaaggugcuucaccuggaaggggaggucaacaagauuaaaaaugcccuccugucuaccaacaaggcugugguuucccugagcaacggagugucuguccucacguuuaaagugcuggaccuuaagaauuauaucgauaaacaacugcuccccauucugaacaagcaguccugcagcaucucuaauauugaaacagugaucgaguuccagcagaaaaacaaucgccuucuggagaucaccagagaauuuuccgucaacgccggcguuacaaccccugugagcaccuacaugcucacaaauuccgagcugcugucucucauuaacgacaugcccaucacgaaugaucaaaagaagcugaugagcaacaaugugcagauuguccggcagcaguccuauagcaucauguguauuaucaaagaagaggugcuugcguacguugugcaacugccucucuacggcgucaucgacacccccugcuggaagcugcauacaucuccucuuuguaccacaaacaccaaagaaggguccaauauuugccugacgcgcacagauagaggaugguauugugacaacgccggcagcgugucuuucuuuccgcaggcugagaccugcaagguucagagcaaucggguguucugugauaccaugaacucccucacacugcccucugaggucaaccugugcaauaucgacauuuuuaacccuaaauacgauugcaagaucaugaccagcaagacagacguguccagcucugucauuacgucccucggggccaucgugagcuguuauggaaaaaccaagugcacagcuucuaauaaaaaccgcggcaucauuaagaccuucuccaaugggugugauuacguuagcaacaaaggaguggacacagucuccgugggcaauacccuguauuacguuaacaagcaagaaggcaagucucuuuaugugaaaggggagcccaucauuaauuuuuacgacccucuggucuuccccagcgaugaguucgacgccuccaucucucaggugaacgaaaagauuaaucagagccucgccuuuaucagaaaauccgaugaacugcugcacaacgugaauguuggaaagagcacgaccaacauuaugaucacaaccaucauuaucgucauuaucgugauucuucuccugcugaucgcugugggccucuuccuguacugcaaagcgcggucuacaccggucacccuuuccaaggaccagcugagcgggaucaauaacauugccuuuucuaacugaggacuaguaauaaggaaacuguaugaaugucugugggcaggaagugaagagauccuucuguaaagguuuuuggaauuaugucugcugaauaauaaacuuuuuugaaauaauaaaucugguagaaaaaugagaucuaaaaaaaaaaaaaaaaaaaaaaaaaaaaaaaaaaaaaaaaaaaaaaaaaaaaaaaaaaaaaaaaugcaucccccccccccccccccccccccccccccccaaaggcucuuuucagagccaccagaauu

SEQ ID NO: 12735 - RNA, 2084 nt, Artificial Sequence
  mRNA product Design g-2 comprising derived and/or modified sequence from HRSV(Memphis-37)__AIY60640.1__F0_DSCav1 (opt6)
gggagaguccgcucagccagguugcagaagcggcuuagcguguguccuaaucuucucucugcguguagguaggccugugccgcaaacaagcuuaccauggaacucccaauccucaaaaccaaugccauaacaaccauacucgcugcaguaaccuuauguuucgcaaguagccaaaacauaaccgaagaauuuuaucaauccacaugcuccgcaguuucuaaaggauaucuaucagcauuaagaacuggaugguacacaucuguaauaacuauagaacuaagcaauauaaaagaaaacaaauguaacggaacugacgcuaaaguaaaacuuauaaaacaagaacuagauaaauacaaaaacgccguuaccgaacuacaacuauuaaugcaaucaacaccagccgcaaauaacagagcaagacgcgaauuaccaagauucaugaauuacacacuaaacaauacaaaaaauaacaauguaacacuaucaaaaaaaagaaaacgacgauucuuaggcuuccuacuaggagucggcucagcaauagcuuccggaauagccgucuguaaaguccuacaccuugaaggcgaaguaaacaaaaucaaaaacgcacuauuaucaacaaacaaagcagucguaucuuuauccaacggagucucaguccuaacauucaaaguacucgauuuaaaaaacuacaucgauaaacaacuccuucccauucuaaacaaacaauccugcucaauauccaacaucgaaacagucauagaauuucaacaaaaaaacaaccgccugcuagaaauaacaagagaauuuuccguaaaugccggcgucaccacaccaguaucaacauacaugcuaacaaacuccgaacuacucucccuaauaaacgauaugccaaucaccaacgaccaaaaaaaacuaaugucaaauaacguucaaauagucagacaacaaucauacagcauaaugugcauaauaaaagaagaagucuuagccuacguuguacaacucccauuauacggaguuaucgauacaccaugcuggaaauuacacacaucacccuuaugcaccacaaacacaaaagaaggauccaauauuugucuaacacgaacagacagaggaugguacugugauaacgcaggaucagugucauucuuuccacaagcagaaacauguaaaguucaaucuaacagaguauucugcgacaccaugaacucccuaaccuuacccucagaaguaaaucuaugcaacauagauaucuuuaacccaaaauacgacugcaaaaucaugacaucaaaaacugacguuucuucauccguuauaacuucccucggcgcuauaguguccugcuacggaaaaacuaaaugcacagcauccaacaaaaauagaggaauaauaaaaacauuuuccaacggcugcgacuauguuucaaacaaaggaguagauaccguaucagucggcaauacauuauauuauguuaacaaacaagaaggaaaaucccuauacguaaaaggagaaccuauaaucaacuucuacgacccacucguauuccccucagacgaauuugacgcaucuauaucucaaguaaaugaaaaaauaaaccaaucacucgcauuuauccgcaaaucugacgaauuacuccauaacgucaacgucggcaaaucaaccaccaacauaaugauaacaacaauuauaauaguaauaauugucauacuacuacuccuaauagcaguaggucuauuccuauacugcaaagcaagauccacccccguaacccuuuccaaagaucaacucucaggaauaaauaacauagccuuuucaaacuaaggacuaguaauaaggaaacuguaugaaugucugugggcaggaagugaagagauccuucuguaaagguuuuuggaauuaugucugcugaauaauaaacuuuuuugaaauaauaaaucugguagaaaaaugagaucuaaaaaaaaaaaaaaaaaaaaaaaaaaaaaaaaaaaaaaaaaaaaaaaaaaaaaaaaaaaaaaaaugcaucccccccccccccccccccccccccccccccaaaggcucuuuucagagccaccagaauu

SEQ ID NO: 12736 - RNA, 2084 nt, Artificial Sequence
  mRNA product Design g-2 comprising derived and/or modified sequence from HRSV(Memphis-37)__AIY60640.1__F0_DSCav1 (opt11)
gggagaguccgcucagccagguugcagaagcggcuuagcguguguccuaaucuucucucugcguguagguaggccugugccgcaaacaagcuuaccauggaacuccccauacucaagacuaaugccaucaccaccauccucgccgccgugacccucugcuucgcaucgucccaaaacauaacagaagaguucuaccaaagcacaugcuccgcagucuccaaaggauaccucuccgcacuacguaccggcugguacaccagcgucaucaccaucgaacuuuccaacaucaaagagaacaaaugcaacggcaccgacgccaaaguaaaacucauaaaacaagagcuagacaaauacaaaaacgccgucacagaacuccaacuacugaugcaauccacaccggccgccaacaaccgcgcucgacgugaacucccacgcuucaugaacuacacucuuaacaacaccaaaaauaacaacgucacccuauccaaaaagcgaaagcgcagauuccucggcuuccuacuuggcgucggcucggcgauagccucuggaaucgccguuugcaagguccuccaccuagaaggcgaaguaaacaaaaucaaaaacgcacuccuaagcaccaacaaagccgucgucucacuuuccaacggcgucucaguccucacauucaaaguucucgaccuaaagaacuacaucgacaagcaacuacuacccauacucaauaaacaauccugcuccaucagcaacaucgagacagucaucgaauuucaacaaaagaacaaccgccuccucgaaauuacacgcgaguucucagucaacgccggagucaccaccccagucucaacauacaugcucaccaacagcgaacuccugucucuaaucaacgacaugcccaucacuaacgaccagaagaaacucauguccaacaacguccaaaucgugcgacaacaaucauacucuaucaugugcaucaucaaagaagaaguccucgcauacgucguccagcucccacucuacggcguaaucgacacacccugcuggaaacuccacacaucaccccuaugcaccaccaacacaaaagaaggcuccaacaucugccuaacccgaaccgacagagguugguauugcgacaacgccggcucagucucauucuucccacaagccgaaaccuguaaaguccaaucaaaccgcgucuucugcgauaccaugaacucucucacacuccccuccgaagucaaucucugcaacauagacaucuucaauccaaaguacgacugcaaaauaaugaccucgaaaaccgacguaagcuccagcgucaucaccuccuuaggcgcaaucguauccugcuacggcaaaaccaaaugcaccgccucaaacaaaaacagaggcaucaucaaaacguucucgaacggaugcgacuacguuuccaauaaaggcguagauaccgucuccgucggcaacacacucuauuacgucaacaaacaagaaggcaaaucccucuacgucaaaggugaaccuaucaucaacuucuacgacccccucgucuuccccagcgacgaguucgaugccucaaucagccaagucaacgagaaaaucaaccaaucacuggcuuucauacgcaaauccgacgaacuccuccacaacgugaacgucggcaaauccacaaccaacaucaugauaaccacaauaaucaucgucauaaucguaauccuacuccuccuuauugccguaggacuauuccuauacugcaaagcccgauccacccccgucacccucucaaaagaccaacucuccggcaucaacaauauagccuucucuaacuaaggacuaguaauaaggaaacuguaugaaugucugugggcaggaagugaagagauccuucuguaaagguuuuuggaauuaugucugcugaauaauaaacuuuuuugaaauaauaaaucugguagaaaaaugagaucuaaaaaaaaaaaaaaaaaaaaaaaaaaaaaaaaaaaaaaaaaaaaaaaaaaaaaaaaaaaaaaaaugcaucccccccccccccccccccccccccccccccaaaggcucuuuucagagccaccagaauu

SEQ ID NO: 12737 - RNA, 2316 nt, Artificial Sequence
  mRNA product Design g-3 comprising derived and/or modified sequence from HRSV(Memphis-37)__AIY60640.1__F0_DSCav1 (opt1)
gggagaguccgcucagccagguugcagaagcggcuuagcguguguccuaaucuucucucugcguguagguaggccugugccgcaaacaagcuuaccauggagcugcccauccucaagaccaacgccaucaccacgauccuggccgcggugacccugugcuucgccagcucccagaacaucaccgaggaguucuaccagagcacgugcuccgccgucagcaagggcuaccucuccgcccugcgcaccgggugguacaccagcgugaucaccaucgagcuguccaacaucaaggagaacaagugcaacggcaccgacgccaaggugaagcucaucaagcaggagcuggacaaguacaagaacgcggucacggagcugcagcuccugaugcagagcaccccggccgccaacaaccgggcccgccgggagcugccccgcuucaugaacuacacccucaacaacaccaagaacaacaacgugacgcuguccaagaagcggaagcgccgguuccugggguuccuccugggcguggggagcgcgaucgccuccggcaucgccgucugcaaggugcugcaccucgagggcgaggugaacaagaucaagaacgcccugcuguccaccaacaaggccgucgugagccucuccaacggggugagcguccugaccuucaaggugcuggaccucaagaacuacaucgacaagcagcugcugcccauccugaacaagcagagcugcuccaucagcaacaucgagaccgucaucgaguuccagcagaagaacaaccgccuccuggagaucacgcgggaguucagcgugaacgcgggcgugaccacccccgucuccaccuacaugcugacgaacagcgagcuccugucccugaucaacgacaugccgaucaccaacgaccagaagaagcucaugagcaacaacgugcagaucgugcgccagcaguccuacagcaucaugugcaucaucaaggaggagguccuggccuacguggugcagcugccccucuacggggucaucgacacccccugcuggaagcugcacaccagcccccugugcacgaccaacaccaaggagggcuccaacaucugccucacccggacggaccgcgggugguacugcgacaacgccggcagcguguccuucuucccgcaggccgagaccugcaagguccagagcaaccggguguucugcgacaccaugaacucccugacccugcccagcgaggugaaccucugcaacaucgacaucuucaaccccaaguacgacugcaagaucaugacguccaagaccgacgucagcuccagcgugaucaccucccugggcgccaucgugagcugcuacgggaagaccaagugcacggcgagcaacaagaaccgcggcaucaucaagaccuucuccaacgggugcgacuacgucagcaacaagggcguggacaccguguccgucggcaacacccuguacuacgugaacaagcaggagggcaagagccucuacgugaagggggagcccaucaucaacuucuacgacccgcuggucuuccccuccgacgaguucgacgccagcaucucccaggugaacgagaagaucaaccagagccuggccuucauccggaaguccgacgagcuccugcacaacgugaacgucggcaagagcaccacgaacaucaugaucaccaccaucaucaucgugaucaucgugauccugcugcuccugaucgccgucgggcuguuccucuacugcaaggcccgcuccacccccgugacgcugagcaaggaccagcuguccgggaucaacaacaucgcguucagcaacugaggacuagugaagggaacacccaaauuuaauucagccuuaagcacaauuaauuaagagugaaacguaauuguacaagcaguuggucacccaccauagggcaugaucaacaccgcaaccuuuccuuuuucccccagugauucugaaaaaccccucuucccuucagcuugcuuagauguuccaaauuuaguaagcuuaaggcggccuacagaagaaaaagaaaaaaaaggccacaaaaguucccucucacuuucaguaaauaaaauaaaagcagcaacagaaauaaagaaauaaaugaaauucaaaaugaaauaaauauuguguugugcagcauuaaaaaaucaauaaaaauuaaaaaugagcaagaucuaaaaaaaaaaaaaaaaaaaaaaaaaaaaaaaaaaaaaaaaaaaaaaaaaaaaaaaaaaaaaaaaugcaucccccccccccccccccccccccccccccccaaaggcucuuuucagagccaccagaauu

SEQ ID NO: 12738 - RNA, 2316 nt, Artificial Sequence
  mRNA product Design g-3 comprising derived and/or modified sequence from HRSV(Memphis-37)__AIY60640.1__F0_DSCav1 (opt1)
gggagaguccgcucagccagguugcagaagcggcuuagcguguguccuaaucuucucucugcguguagguaggccugugccgcaaacaagcuuaccauggagcugcccauccucaagaccaacgccaucaccacgauccuggccgcggugacccugugcuucgccagcucccagaacaucaccgaggaguucuaccagagcacgugcuccgccgucagcaagggcuaccucuccgcccugcgcaccgggugguacaccagcgugaucaccaucgagcuguccaacaucaaggagaacaagugcaacggcaccgacgccaaggugaagcucaucaagcaggagcuggacaaguacaagaacgcggucacggagcugcagcuccugaugcagagcaccccggccgccaacaaccgggcccgccgggagcugccccgcuucaugaacuacacccucaacaacaccaagaacaacaacgugacgcuguccaagaagcggaagcgccgguuccugggguuccuccugggcguggggagcgcgaucgccuccggcaucgccgucugcaaggugcugcaccucgagggcgaggugaacaagaucaagaacgcccugcugagcaccaacaaggccgucgugucccucagcaacgggguguccguccugaccuucaaggugcuggaccucaagaacuacaucgacaagcagcugcugcccauccucaacaagcagagcugcuccaucagcaacaucgagaccgugaucgaguuccagcagaagaacaaccgccugcuggagaucacgcgggaguucuccgucaacgcgggcgugaccacccccgugagcaccuacaugcucacgaacagcgagcugcugucccucaucaacgacaugccgaucaccaacgaccagaagaagcugaugagcaacaacguccagaucgugcgccagcaguccuacagcaucaugugcaucaucaaggaggaggugcuggccuacgucgugcagcucccccuguacggggugaucgacacccccugcuggaagcugcacaccagcccccucugcacgaccaacaccaaggagggcagcaacaucugccugacccggacggaccgcgggugguacugcgacaacgccggcuccgucagcuucuucccgcaggccgagaccugcaaggugcaguccaaccgggucuucugcgacaccaugaacagccugacccuccccuccgaggugaaccugugcaacaucgacaucuucaaccccaaguacgacugcaagaucaugacgagcaagaccgacguguccagcuccgucaucaccagccugggcgccaucguguccugcuacgggaagaccaagugcacggcgagcaacaagaaccgcggcaucaucaagaccuucuccaacgggugcgacuacgugagcaacaagggcgucgacaccgugagcgugggcaacacccucuacuacgucaacaagcaggaggggaagucccuguacgugaagggcgagcccaucaucaacuucuacgacccgcugguguuccccagcgacgaguucgacgccuccaucagccaggucaacgagaagaucaaccagucccucgccuucauccggaaguccgacgagcugcugcacaacgugaacguggggaaguccaccacgaacaucaugaucaccaccaucaucaucgucaucaucgugauccugcuccugcugaucgccgugggccucuuccuguacugcaaggcccgcagcacccccgucacgcuguccaaggaccagcucagcgggaucaacaacaucgcguucuccaacugaggacuagugaagggaacacccaaauuuaauucagccuuaagcacaauuaauuaagagugaaacguaauuguacaagcaguuggucacccaccauagggcaugaucaacaccgcaaccuuuccuuuuucccccagugauucugaaaaaccccucuucccuucagcuugcuuagauguuccaaauuuaguaagcuuaaggcggccuacagaagaaaaagaaaaaaaaggccacaaaaguucccucucacuuucaguaaauaaaauaaaagcagcaacagaaauaaagaaauaaaugaaauucaaaaugaaauaaauauuguguugugcagcauuaaaaaaucaauaaaaauuaaaaaugagcaagaucuaaaaaaaaaaaaaaaaaaaaaaaaaaaaaaaaaaaaaaaaaaaaaaaaaaaaaaaaaaaaaaaaugcaucccccccccccccccccccccccccccccccaaaggcucuuuucagagccaccagaauu

SEQ ID NO: 12739 - RNA, 2316 nt, Artificial Sequence
  mRNA product Design g-3 comprising derived and/or modified sequence from HRSV(Memphis-37)__AIY60640.1__F0_DSCav1 (opt2)
gggagaguccgcucagccagguugcagaagcggcuuagcguguguccuaaucuucucucugcguguagguaggccugugccgcaaacaagcuuaccauggagcuccccauccucaagaccaacgccaucaccaccauccucgccgccgucacccucugcuucgccuccucccagaacaucaccgaggaguucuaccaguccaccugcuccgccgucuccaagggcuaccucuccgcccuccgcaccggcugguacaccuccgucaucaccaucgagcucuccaacaucaaggagaacaagugcaacggcaccgacgccaaggucaagcucaucaagcaggagcucgacaaguacaagaacgccgucaccgagcuccagcuccucaugcaguccacccccgccgccaacaaccgcgcccgccgcgagcucccccgcuucaugaacuacacccucaacaacaccaagaacaacaacgucacccucuccaagaagcgcaagcgccgcuuccucggcuuccuccucggcgucggcuccgccaucgccuccggcaucgccgucugcaagguccuccaccucgagggcgaggucaacaagaucaagaacgcccuccucuccaccaacaaggccgucgucucccucuccaacggcgucuccguccucaccuucaagguccucgaccucaagaacuacaucgacaagcagcuccuccccauccucaacaagcaguccugcuccaucuccaacaucgagaccgucaucgaguuccagcagaagaacaaccgccuccucgagaucacccgcgaguucuccgucaacgccggcgucaccacccccgucuccaccuacaugcucaccaacuccgagcuccucucccucaucaacgacaugcccaucaccaacgaccagaagaagcucauguccaacaacguccagaucguccgccagcaguccuacuccaucaugugcaucaucaaggaggagguccucgccuacgucguccagcucccccucuacggcgucaucgacacccccugcuggaagcuccacaccuccccccucugcaccaccaacaccaaggagggcuccaacaucugccucacccgcaccgaccgcggcugguacugcgacaacgccggcuccgucuccuucuucccccaggccgagaccugcaagguccaguccaaccgcgucuucugcgacaccaugaacucccucacccuccccuccgaggucaaccucugcaacaucgacaucuucaaccccaaguacgacugcaagaucaugaccuccaagaccgacgucuccuccuccgucaucaccucccucggcgccaucgucuccugcuacggcaagaccaagugcaccgccuccaacaagaaccgcggcaucaucaagaccuucuccaacggcugcgacuacgucuccaacaagggcgucgacaccgucuccgucggcaacacccucuacuacgucaacaagcaggagggcaagucccucuacgucaagggcgagcccaucaucaacuucuacgacccccucgucuuccccuccgacgaguucgacgccuccaucucccaggucaacgagaagaucaaccagucccucgccuucauccgcaaguccgacgagcuccuccacaacgucaacgucggcaaguccaccaccaacaucaugaucaccaccaucaucaucgucaucaucgucauccuccuccuccucaucgccgucggccucuuccucuacugcaaggcccgcuccacccccgucacccucuccaaggaccagcucuccggcaucaacaacaucgccuucuccaacugaggacuagugaagggaacacccaaauuuaauucagccuuaagcacaauuaauuaagagugaaacguaauuguacaagcaguuggucacccaccauagggcaugaucaacaccgcaaccuuuccuuuuucccccagugauucugaaaaaccccucuucccuucagcuugcuuagauguuccaaauuuaguaagcuuaaggcggccuacagaagaaaaagaaaaaaaaggccacaaaaguucccucucacuuucaguaaauaaaauaaaagcagcaacagaaauaaagaaauaaaugaaauucaaaaugaaauaaauauuguguugugcagcauuaaaaaaucaauaaaaauuaaaaaugagcaagaucuaaaaaaaaaaaaaaaaaaaaaaaaaaaaaaaaaaaaaaaaaaaaaaaaaaaaaaaaaaaaaaaaugcaucccccccccccccccccccccccccccccccaaaggcucuuuucagagccaccagaauu

SEQ ID NO: 12740 - RNA, 2316 nt, Artificial Sequence
  mRNA product Design g-3 comprising derived and/or modified sequence from HRSV(Memphis-37)__AIY60640.1__F0_DSCav1 (opt3)
gggagaguccgcucagccagguugcagaagcggcuuagcguguguccuaaucuucucucugcguguagguaggccugugccgcaaacaagcuuaccauggagcugcccauccucaagaccaacgccauuacaacuauacuugcugcagugacgcugugcuucgccagcucccagaauaucaccgaagaguuuuaccaaucuacauguucagcggucaguaaaggcuauuugagcgcuuuaagaacugggugguacaccuccguuauuacaaucgaacugucuaacauuaaggagaauaaaugcaacggaaccgacgccaaggugaaacuaaucaagcaggaacucgauaaguauaaaaaugcaguaacugagcugcagcuucugaugcagucgaccccugccgcuaacaauagggcacggcgcgaguugccacgauucaugaacuacacacucaauaacacgaagaauaacaaugugacucugagcaaaaagcguaaaagaagguuucuggguuuccucuuaggcgucgggucagccauagcuaguggaaucgccguguguaagguucugcaccuugaaggcgaggugaacaagauuaaaaaugcguugcuguccaccaacaaggcagucgugucucuaagcaacgguguauccguucucacauuuaaagugcuggaccuuaagaauuauaucgauaaacaacuguugccgauucucaacaagcagucaugcaguaucagcaauauagaaacugucauugaguuccagcagaaaaacaaucggcuguuagagaucacccgcgaauuuucugugaacgccggggugacaacccccgucuccacguacaugcugacuaauucagagcuccuuagccugauuaacgacaugccuaucacaaaugaucaaaagaaguugaugaguaacaauguucagaucgugagacagcagucuuauuccauuauguguauaaucaaagaagagguacuagcuuacgugguccaacugccacucuacggagugauugacacccccugcuggaagcugcauacuagcccucuuuguacaaccaacacgaaagaaggcucgaauaucugccugaccaggacagaucggggcugguauugugacaacgccgggucuguuuccuucuuuccacaggcagagacuugcaaggugcagucaaaucgcgucuucugugauaccaugaacaguuugacacuccccagcgaggugaaccugugcaauauagacauuuuuaacccuaaauacgauugcaagaucaugacuuccaagaccgacguaucuagcucaguuaucacaaguuuaggagcuauuguguccuguuaugguaaaaccaagugcacugccagcaauaaaaaccgaggcaucauuaagacguucucuaaugggugugauuacgucucaaacaaaggaguggacacagucagugugggcaauacccuguauuacguuaacaagcaagaagguaagagccuauaugugaaaggggagccaauaaucaauuuuuacgacccgcucguauuccccuccgaugaguucgacgcgucuauuucgcaggucaacgaaaagaucaaucagagccuggccuuuaucagaaaauccgaugaacuuuugcacaacgugaauguuggaaagucaacuaccaacauuaugauaacaaccaucauuaucgugauuaucgucauacugcuccugcuuaucgcagugggccuguucuuguacugcaaagcuaggaguacuccuguaacacucucuaaggaccagcugagcggcauuaauaacaucgccuuuuccaacugaggacuagugaagggaacacccaaauuuaauucagccuuaagcacaauuaauuaagagugaaacguaauuguacaagcaguuggucacccaccauagggcaugaucaacaccgcaaccuuuccuuuuucccccagugauucugaaaaaccccucuucccuucagcuugcuuagauguuccaaauuuaguaagcuuaaggcggccuacagaagaaaaagaaaaaaaaggccacaaaaguucccucucacuuucaguaaauaaaauaaaagcagcaacagaaauaaagaaauaaaugaaauucaaaaugaaauaaauauuguguugugcagcauuaaaaaaucaauaaaaauuaaaaaugagcaagaucuaaaaaaaaaaaaaaaaaaaaaaaaaaaaaaaaaaaaaaaaaaaaaaaaaaaaaaaaaaaaaaaaugcaucccccccccccccccccccccccccccccccaaaggcucuuuucagagccaccagaauu

SEQ ID NO: 12741 - RNA, 2316 nt, Artificial Sequence
  mRNA product Design g-3 comprising derived and/or modified sequence from HRSV(Memphis-37)__AIY60640.1__F0_DSCav1 (opt4)
gggagaguccgcucagccagguugcagaagcggcuuagcguguguccuaaucuucucucugcguguagguaggccugugccgcaaacaagcuuaccauggagcugcccauccugaagaccaacgccaucaccaccauccuggccgccgugacccugugcuucgccagcagccagaacaucaccgaggaguucuaccagagcaccugcagcgccgugagcaagggcuaccugagcgcccugagaaccggcugguacaccagcgugaucaccaucgagcugagcaacaucaaggagaacaagugcaacggcaccgacgccaaggugaagcugaucaagcaggagcuggacaaguacaagaacgccgugaccgagcugcagcugcugaugcagagcacccccgccgccaacaacagagccagaagagagcugcccagauucaugaacuacacccugaacaacaccaagaacaacaacgugacccugagcaagaagagaaagagaagauuccugggcuuccugcugggcgugggcagcgccaucgccagcggcaucgccgugugcaaggugcugcaccuggagggcgaggugaacaagaucaagaacgcccugcugagcaccaacaaggccguggugagccugagcaacggcgugagcgugcugaccuucaaggugcuggaccugaagaacuacaucgacaagcagcugcugcccauccugaacaagcagagcugcagcaucagcaacaucgagaccgugaucgaguuccagcagaagaacaacagacugcuggagaucaccagagaguucagcgugaacgccggcgugaccacccccgugagcaccuacaugcugaccaacagcgagcugcugagccugaucaacgacaugcccaucaccaacgaccagaagaagcugaugagcaacaacgugcagaucgugagacagcagagcuacagcaucaugugcaucaucaaggaggaggugcuggccuacguggugcagcugccccuguacggcgugaucgacacccccugcuggaagcugcacaccagcccccugugcaccaccaacaccaaggagggcagcaacaucugccugaccagaaccgacagaggcugguacugcgacaacgccggcagcgugagcuucuucccccaggccgagaccugcaaggugcagagcaacagaguguucugcgacaccaugaacagccugacccugcccagcgaggugaaccugugcaacaucgacaucuucaaccccaaguacgacugcaagaucaugaccagcaagaccgacgugagcagcagcgugaucaccagccugggcgccaucgugagcugcuacggcaagaccaagugcaccgccagcaacaagaacagaggcaucaucaagaccuucagcaacggcugcgacuacgugagcaacaagggcguggacaccgugagcgugggcaacacccuguacuacgugaacaagcaggagggcaagagccuguacgugaagggcgagcccaucaucaacuucuacgacccccugguguuccccagcgacgaguucgacgccagcaucagccaggugaacgagaagaucaaccagagccuggccuucaucagaaagagcgacgagcugcugcacaacgugaacgugggcaagagcaccaccaacaucaugaucaccaccaucaucaucgugaucaucgugauccugcugcugcugaucgccgugggccuguuccuguacugcaaggccagaagcacccccgugacccugagcaaggaccagcugagcggcaucaacaacaucgccuucagcaacugaggacuagugaagggaacacccaaauuuaauucagccuuaagcacaauuaauuaagagugaaacguaauuguacaagcaguuggucacccaccauagggcaugaucaacaccgcaaccuuuccuuuuucccccagugauucugaaaaaccccucuucccuucagcuugcuuagauguuccaaauuuaguaagcuuaaggcggccuacagaagaaaaagaaaaaaaaggccacaaaaguucccucucacuuucaguaaauaaaauaaaagcagcaacagaaauaaagaaauaaaugaaauucaaaaugaaauaaauauuguguugugcagcauuaaaaaaucaauaaaaauuaaaaaugagcaagaucuaaaaaaaaaaaaaaaaaaaaaaaaaaaaaaaaaaaaaaaaaaaaaaaaaaaaaaaaaaaaaaaaugcaucccccccccccccccccccccccccccccccaaaggcucuuuucagagccaccagaauu

SEQ ID NO: 12742 - RNA, 2316 nt, Artificial Sequence
  mRNA product Design g-3 comprising derived and/or modified sequence from HRSV(Memphis-37)__AIY60640.1__F0_DSCav1 (opt5)
gggagaguccgcucagccagguugcagaagcggcuuagcguguguccuaaucuucucucugcguguagguaggccugugccgcaaacaagcuuaccauggagcugcccauccucaagaccaacgccauuacaacgauccuggcugccgugacccuuugcuucgcgagcucccagaauauuacagaagaguuuuaccaaucuaccuguagcgcugucuccaaaggcuaucugucugcccucagaacagggugguacaccagcguuaucacaauugaacuguccaacaucaaggagaauaaaugcaacggaaccgacgccaaggugaaacuuaucaagcaggaacuggauaaguauaaaaaugcugugacggagcuccagcugcugaugcagucuaccccugccgcuaacaaucgggcccgcagagagcucccgcgguucaugaacuacacacugaauaacaccaagaauaacaaugucacacuuagcaaaaagcgcaaaagacgguuucugggcuuccuccugggggugggauccgcgauugccagcggcaucgcuguuuguaaggugcuucaccuggaaggggaggucaacaagauuaaaaaugcccuccugucuaccaacaaggcugugguuucccugagcaacggagugucuguccucacguuuaaagugcuggaccuuaagaauuauaucgauaaacaacugcuccccauucugaacaagcaguccugcagcaucucuaauauugaaacagugaucgaguuccagcagaaaaacaaucgccuucuggagaucaccagagaauuuuccgucaacgccggcguuacaaccccugugagcaccuacaugcucacaaauuccgagcugcugucucucauuaacgacaugcccaucacgaaugaucaaaagaagcugaugagcaacaaugugcagauuguccggcagcaguccuauagcaucauguguauuaucaaagaagaggugcuugcguacguugugcaacugccucucuacggcgucaucgacacccccugcuggaagcugcauacaucuccucuuuguaccacaaacaccaaagaaggguccaauauuugccugacgcgcacagauagaggaugguauugugacaacgccggcagcgugucuuucuuuccgcaggcugagaccugcaagguucagagcaaucggguguucugugauaccaugaacucccucacacugcccucugaggucaaccugugcaauaucgacauuuuuaacccuaaauacgauugcaagaucaugaccagcaagacagacguguccagcucugucauuacgucccucggggccaucgugagcuguuauggaaaaaccaagugcacagcuucuaauaaaaaccgcggcaucauuaagaccuucuccaaugggugugauuacguuagcaacaaaggaguggacacagucuccgugggcaauacccuguauuacguuaacaagcaagaaggcaagucucuuuaugugaaaggggagcccaucauuaauuuuuacgacccucuggucuuccccagcgaugaguucgacgccuccaucucucaggugaacgaaaagauuaaucagagccucgccuuuaucagaaaauccgaugaacugcugcacaacgugaauguuggaaagagcacgaccaacauuaugaucacaaccaucauuaucgucauuaucgugauucuucuccugcugaucgcugugggccucuuccuguacugcaaagcgcggucuacaccggucacccuuuccaaggaccagcugagcgggaucaauaacauugccuuuucuaacugaggacuagugaagggaacacccaaauuuaauucagccuuaagcacaauuaauuaagagugaaacguaauuguacaagcaguuggucacccaccauagggcaugaucaacaccgcaaccuuuccuuuuucccccagugauucugaaaaaccccucuucccuucagcuugcuuagauguuccaaauuuaguaagcuuaaggcggccuacagaagaaaaagaaaaaaaaggccacaaaaguucccucucacuuucaguaaauaaaauaaaagcagcaacagaaauaaagaaauaaaugaaauucaaaaugaaauaaauauuguguugugcagcauuaaaaaaucaauaaaaauuaaaaaugagcaagaucuaaaaaaaaaaaaaaaaaaaaaaaaaaaaaaaaaaaaaaaaaaaaaaaaaaaaaaaaaaaaaaaaugcaucccccccccccccccccccccccccccccccaaaggcucuuuucagagccaccagaauu

SEQ ID NO: 12743 - RNA, 2316 nt, Artificial Sequence
  mRNA product Design g-3 comprising derived and/or modified sequence from HRSV(Memphis-37)__AIY60640.1__F0_DSCav1 (opt6)
gggagaguccgcucagccagguugcagaagcggcuuagcguguguccuaaucuucucucugcguguagguaggccugugccgcaaacaagcuuaccauggaacucccaauccucaaaaccaaugccauaacaaccauacucgcugcaguaaccuuauguuucgcaaguagccaaaacauaaccgaagaauuuuaucaauccacaugcuccgcaguuucuaaaggauaucuaucagcauuaagaacuggaugguacacaucuguaauaacuauagaacuaagcaauauaaaagaaaacaaauguaacggaacugacgcuaaaguaaaacuuauaaaacaagaacuagauaaauacaaaaacgccguuaccgaacuacaacuauuaaugcaaucaacaccagccgcaaauaacagagcaagacgcgaauuaccaagauucaugaauuacacacuaaacaauacaaaaaauaacaauguaacacuaucaaaaaaaagaaaacgacgauucuuaggcuuccuacuaggagucggcucagcaauagcuuccggaauagccgucuguaaaguccuacaccuugaaggcgaaguaaacaaaaucaaaaacgcacuauuaucaacaaacaaagcagucguaucuuuauccaacggagucucaguccuaacauucaaaguacucgauuuaaaaaacuacaucgauaaacaacuccuucccauucuaaacaaacaauccugcucaauauccaacaucgaaacagucauagaauuucaacaaaaaaacaaccgccugcuagaaauaacaagagaauuuuccguaaaugccggcgucaccacaccaguaucaacauacaugcuaacaaacuccgaacuacucucccuaauaaacgauaugccaaucaccaacgaccaaaaaaaacuaaugucaaauaacguucaaauagucagacaacaaucauacagcauaaugugcauaauaaaagaagaagucuuagccuacguuguacaacucccauuauacggaguuaucgauacaccaugcuggaaauuacacacaucacccuuaugcaccacaaacacaaaagaaggauccaauauuugucuaacacgaacagacagaggaugguacugugauaacgcaggaucagugucauucuuuccacaagcagaaacauguaaaguucaaucuaacagaguauucugcgacaccaugaacucccuaaccuuacccucagaaguaaaucuaugcaacauagauaucuuuaacccaaaauacgacugcaaaaucaugacaucaaaaacugacguuucuucauccguuauaacuucccucggcgcuauaguguccugcuacggaaaaacuaaaugcacagcauccaacaaaaauagaggaauaauaaaaacauuuuccaacggcugcgacuauguuucaaacaaaggaguagauaccguaucagucggcaauacauuauauuauguuaacaaacaagaaggaaaaucccuauacguaaaaggagaaccuauaaucaacuucuacgacccacucguauuccccucagacgaauuugacgcaucuauaucucaaguaaaugaaaaaauaaaccaaucacucgcauuuauccgcaaaucugacgaauuacuccauaacgucaacgucggcaaaucaaccaccaacauaaugauaacaacaauuauaauaguaauaauugucauacuacuacuccuaauagcaguaggucuauuccuauacugcaaagcaagauccacccccguaacccuuuccaaagaucaacucucaggaauaaauaacauagccuuuucaaacuaaggacuagugaagggaacacccaaauuuaauucagccuuaagcacaauuaauuaagagugaaacguaauuguacaagcaguuggucacccaccauagggcaugaucaacaccgcaaccuuuccuuuuucccccagugauucugaaaaaccccucuucccuucagcuugcuuagauguuccaaauuuaguaagcuuaaggcggccuacagaagaaaaagaaaaaaaaggccacaaaaguucccucucacuuucaguaaauaaaauaaaagcagcaacagaaauaaagaaauaaaugaaauucaaaaugaaauaaauauuguguugugcagcauuaaaaaaucaauaaaaauuaaaaaugagcaagaucuaaaaaaaaaaaaaaaaaaaaaaaaaaaaaaaaaaaaaaaaaaaaaaaaaaaaaaaaaaaaaaaaugcaucccccccccccccccccccccccccccccccaaaggcucuuuucagagccaccagaauu

SEQ ID NO: 12744 - RNA, 2316 nt, Artificial Sequence
  mRNA product Design g-3 comprising derived and/or modified sequence from HRSV(Memphis-37)__AIY60640.1__F0_DSCav1 (opt11)
gggagaguccgcucagccagguugcagaagcggcuuagcguguguccuaaucuucucucugcguguagguaggccugugccgcaaacaagcuuaccauggaacuccccauacucaagacuaaugccaucaccaccauccucgccgccgugacccucugcuucgcaucgucccaaaacauaacagaagaguucuaccaaagcacaugcuccgcagucuccaaaggauaccucuccgcacuacguaccggcugguacaccagcgucaucaccaucgaacuuuccaacaucaaagagaacaaaugcaacggcaccgacgccaaaguaaaacucauaaaacaagagcuagacaaauacaaaaacgccgucacagaacuccaacuacugaugcaauccacaccggccgccaacaaccgcgcucgacgugaacucccacgcuucaugaacuacacucuuaacaacaccaaaaauaacaacgucacccuauccaaaaagcgaaagcgcagauuccucggcuuccuacuuggcgucggcucggcgauagccucuggaaucgccguuugcaagguccuccaccuagaaggcgaaguaaacaaaaucaaaaacgcacuccuaagcaccaacaaagccgucgucucacuuuccaacggcgucucaguccucacauucaaaguucucgaccuaaagaacuacaucgacaagcaacuacuacccauacucaauaaacaauccugcuccaucagcaacaucgagacagucaucgaauuucaacaaaagaacaaccgccuccucgaaauuacacgcgaguucucagucaacgccggagucaccaccccagucucaacauacaugcucaccaacagcgaacuccugucucuaaucaacgacaugcccaucacuaacgaccagaagaaacucauguccaacaacguccaaaucgugcgacaacaaucauacucuaucaugugcaucaucaaagaagaaguccucgcauacgucguccagcucccacucuacggcguaaucgacacacccugcuggaaacuccacacaucaccccuaugcaccaccaacacaaaagaaggcuccaacaucugccuaacccgaaccgacagagguugguauugcgacaacgccggcucagucucauucuucccacaagccgaaaccuguaaaguccaaucaaaccgcgucuucugcgauaccaugaacucucucacacuccccuccgaagucaaucucugcaacauagacaucuucaauccaaaguacgacugcaaaauaaugaccucgaaaaccgacguaagcuccagcgucaucaccuccuuaggcgcaaucguauccugcuacggcaaaaccaaaugcaccgccucaaacaaaaacagaggcaucaucaaaacguucucgaacggaugcgacuacguuuccaauaaaggcguagauaccgucuccgucggcaacacacucuauuacgucaacaaacaagaaggcaaaucccucuacgucaaaggugaaccuaucaucaacuucuacgacccccucgucuuccccagcgacgaguucgaugccucaaucagccaagucaacgagaaaaucaaccaaucacuggcuuucauacgcaaauccgacgaacuccuccacaacgugaacgucggcaaauccacaaccaacaucaugauaaccacaauaaucaucgucauaaucguaauccuacuccuccuuauugccguaggacuauuccuauacugcaaagcccgauccacccccgucacccucucaaaagaccaacucuccggcaucaacaauauagccuucucuaacuaaggacuagugaagggaacacccaaauuuaauucagccuuaagcacaauuaauuaagagugaaacguaauuguacaagcaguuggucacccaccauagggcaugaucaacaccgcaaccuuuccuuuuucccccagugauucugaaaaaccccucuucccuucagcuugcuuagauguuccaaauuuaguaagcuuaaggcggccuacagaagaaaaagaaaaaaaaggccacaaaaguucccucucacuuucaguaaauaaaauaaaagcagcaacagaaauaaagaaauaaaugaaauucaaaaugaaauaaauauuguguugugcagcauuaaaaaaucaauaaaaauuaaaaaugagcaagaucuaaaaaaaaaaaaaaaaaaaaaaaaaaaaaaaaaaaaaaaaaaaaaaaaaaaaaaaaaaaaaaaaugcaucccccccccccccccccccccccccccccccaaaggcucuuuucagagccaccagaauu

SEQ ID NO: 12745 - RNA, 2111 nt, Artificial Sequence
  mRNA product Design g-4 comprising derived and/or modified sequence from HRSV(Memphis-37)__AIY60640.1__F0_DSCav1 (opt1)
gggagacuccugucgggcggaaguaggaggaguagaguuuaaaaacaguacucuuuuuccgguucgggacguaguugaagcaacgacaagccggauaaccgcucuugagacaggaagcuuaccauggagcugcccauccucaagaccaacgccaucaccacgauccuggccgcggugacccugugcuucgccagcucccagaacaucaccgaggaguucuaccagagcacgugcuccgccgucagcaagggcuaccucuccgcccugcgcaccgggugguacaccagcgugaucaccaucgagcuguccaacaucaaggagaacaagugcaacggcaccgacgccaaggugaagcucaucaagcaggagcuggacaaguacaagaacgcggucacggagcugcagcuccugaugcagagcaccccggccgccaacaaccgggcccgccgggagcugccccgcuucaugaacuacacccucaacaacaccaagaacaacaacgugacgcuguccaagaagcggaagcgccgguuccugggguuccuccugggcguggggagcgcgaucgccuccggcaucgccgucugcaaggugcugcaccucgagggcgaggugaacaagaucaagaacgcccugcuguccaccaacaaggccgucgugagccucuccaacggggugagcguccugaccuucaaggugcuggaccucaagaacuacaucgacaagcagcugcugcccauccugaacaagcagagcugcuccaucagcaacaucgagaccgucaucgaguuccagcagaagaacaaccgccuccuggagaucacgcgggaguucagcgugaacgcgggcgugaccacccccgucuccaccuacaugcugacgaacagcgagcuccugucccugaucaacgacaugccgaucaccaacgaccagaagaagcucaugagcaacaacgugcagaucgugcgccagcaguccuacagcaucaugugcaucaucaaggaggagguccuggccuacguggugcagcugccccucuacggggucaucgacacccccugcuggaagcugcacaccagcccccugugcacgaccaacaccaaggagggcuccaacaucugccucacccggacggaccgcgggugguacugcgacaacgccggcagcguguccuucuucccgcaggccgagaccugcaagguccagagcaaccggguguucugcgacaccaugaacucccugacccugcccagcgaggugaaccucugcaacaucgacaucuucaaccccaaguacgacugcaagaucaugacguccaagaccgacgucagcuccagcgugaucaccucccugggcgccaucgugagcugcuacgggaagaccaagugcacggcgagcaacaagaaccgcggcaucaucaagaccuucuccaacgggugcgacuacgucagcaacaagggcguggacaccguguccgucggcaacacccuguacuacgugaacaagcaggagggcaagagccucuacgugaagggggagcccaucaucaacuucuacgacccgcuggucuuccccuccgacgaguucgacgccagcaucucccaggugaacgagaagaucaaccagagccuggccuucauccggaaguccgacgagcuccugcacaacgugaacgucggcaagagcaccacgaacaucaugaucaccaccaucaucaucgugaucaucgugauccugcugcuccugaucgccgucgggcuguuccucuacugcaaggcccgcuccacccccgugacgcugagcaaggaccagcuguccgggaucaacaacaucgcguucagcaacugaggacuaguaauaaggaaacuguaugaaugucugugggcaggaagugaagagauccuucuguaaagguuuuuggaauuaugucugcugaauaauaaacuuuuuugaaauaauaaaucugguagaaaaaugagaucuaaaaaaaaaaaaaaaaaaaaaaaaaaaaaaaaaaaaaaaaaaaaaaaaaaaaaaaaaaaaaaaaugcaucccccccccccccccccccccccccccccccaaaggcucuuuucagagccaccagaauu

SEQ ID NO: 12746 - RNA, 2111 nt, Artificial Sequence
  mRNA product Design g-4 comprising derived and/or modified sequence from HRSV(Memphis-37)__AIY60640.1__F0_DSCav1 (opt1)
gggagacuccugucgggcggaaguaggaggaguagaguuuaaaaacaguacucuuuuuccgguucgggacguaguugaagcaacgacaagccggauaaccgcucuugagacaggaagcuuaccauggagcugcccauccucaagaccaacgccaucaccacgauccuggccgcggugacccugugcuucgccagcucccagaacaucaccgaggaguucuaccagagcacgugcuccgccgucagcaagggcuaccucuccgcccugcgcaccgggugguacaccagcgugaucaccaucgagcuguccaacaucaaggagaacaagugcaacggcaccgacgccaaggugaagcucaucaagcaggagcuggacaaguacaagaacgcggucacggagcugcagcuccugaugcagagcaccccggccgccaacaaccgggcccgccgggagcugccccgcuucaugaacuacacccucaacaacaccaagaacaacaacgugacgcuguccaagaagcggaagcgccgguuccugggguuccuccugggcguggggagcgcgaucgccuccggcaucgccgucugcaaggugcugcaccucgagggcgaggugaacaagaucaagaacgcccugcugagcaccaacaaggccgucgugucccucagcaacgggguguccguccugaccuucaaggugcuggaccucaagaacuacaucgacaagcagcugcugcccauccucaacaagcagagcugcuccaucagcaacaucgagaccgugaucgaguuccagcagaagaacaaccgccugcuggagaucacgcgggaguucuccgucaacgcgggcgugaccacccccgugagcaccuacaugcucacgaacagcgagcugcugucccucaucaacgacaugccgaucaccaacgaccagaagaagcugaugagcaacaacguccagaucgugcgccagcaguccuacagcaucaugugcaucaucaaggaggaggugcuggccuacgucgugcagcucccccuguacggggugaucgacacccccugcuggaagcugcacaccagcccccucugcacgaccaacaccaaggagggcagcaacaucugccugacccggacggaccgcgggugguacugcgacaacgccggcuccgucagcuucuucccgcaggccgagaccugcaaggugcaguccaaccgggucuucugcgacaccaugaacagccugacccuccccuccgaggugaaccugugcaacaucgacaucuucaaccccaaguacgacugcaagaucaugacgagcaagaccgacguguccagcuccgucaucaccagccugggcgccaucguguccugcuacgggaagaccaagugcacggcgagcaacaagaaccgcggcaucaucaagaccuucuccaacgggugcgacuacgugagcaacaagggcgucgacaccgugagcgugggcaacacccucuacuacgucaacaagcaggaggggaagucccuguacgugaagggcgagcccaucaucaacuucuacgacccgcugguguuccccagcgacgaguucgacgccuccaucagccaggucaacgagaagaucaaccagucccucgccuucauccggaaguccgacgagcugcugcacaacgugaacguggggaaguccaccacgaacaucaugaucaccaccaucaucaucgucaucaucgugauccugcuccugcugaucgccgugggccucuuccuguacugcaaggcccgcagcacccccgucacgcuguccaaggaccagcucagcgggaucaacaacaucgcguucuccaacugaggacuaguaauaaggaaacuguaugaaugucugugggcaggaagugaagagauccuucuguaaagguuuuuggaauuaugucugcugaauaauaaacuuuuuugaaauaauaaaucugguagaaaaaugagaucuaaaaaaaaaaaaaaaaaaaaaaaaaaaaaaaaaaaaaaaaaaaaaaaaaaaaaaaaaaaaaaaaugcaucccccccccccccccccccccccccccccccaaaggcucuuuucagagccaccagaauu

SEQ ID NO: 12747 - RNA, 2111 nt, Artificial Sequence
  mRNA product Design g-4 comprising derived and/or modified sequence from HRSV(Memphis-37)__AIY60640.1__F0_DSCav1 (opt2)
gggagacuccugucgggcggaaguaggaggaguagaguuuaaaaacaguacucuuuuuccgguucgggacguaguugaagcaacgacaagccggauaaccgcucuugagacaggaagcuuaccauggagcuccccauccucaagaccaacgccaucaccaccauccucgccgccgucacccucugcuucgccuccucccagaacaucaccgaggaguucuaccaguccaccugcuccgccgucuccaagggcuaccucuccgcccuccgcaccggcugguacaccuccgucaucaccaucgagcucuccaacaucaaggagaacaagugcaacggcaccgacgccaaggucaagcucaucaagcaggagcucgacaaguacaagaacgccgucaccgagcuccagcuccucaugcaguccacccccgccgccaacaaccgcgcccgccgcgagcucccccgcuucaugaacuacacccucaacaacaccaagaacaacaacgucacccucuccaagaagcgcaagcgccgcuuccucggcuuccuccucggcgucggcuccgccaucgccuccggcaucgccgucugcaagguccuccaccucgagggcgaggucaacaagaucaagaacgcccuccucuccaccaacaaggccgucgucucccucuccaacggcgucuccguccucaccuucaagguccucgaccucaagaacuacaucgacaagcagcuccuccccauccucaacaagcaguccugcuccaucuccaacaucgagaccgucaucgaguuccagcagaagaacaaccgccuccucgagaucacccgcgaguucuccgucaacgccggcgucaccacccccgucuccaccuacaugcucaccaacuccgagcuccucucccucaucaacgacaugcccaucaccaacgaccagaagaagcucauguccaacaacguccagaucguccgccagcaguccuacuccaucaugugcaucaucaaggaggagguccucgccuacgucguccagcucccccucuacggcgucaucgacacccccugcuggaagcuccacaccuccccccucugcaccaccaacaccaaggagggcuccaacaucugccucacccgcaccgaccgcggcugguacugcgacaacgccggcuccgucuccuucuucccccaggccgagaccugcaagguccaguccaaccgcgucuucugcgacaccaugaacucccucacccuccccuccgaggucaaccucugcaacaucgacaucuucaaccccaaguacgacugcaagaucaugaccuccaagaccgacgucuccuccuccgucaucaccucccucggcgccaucgucuccugcuacggcaagaccaagugcaccgccuccaacaagaaccgcggcaucaucaagaccuucuccaacggcugcgacuacgucuccaacaagggcgucgacaccgucuccgucggcaacacccucuacuacgucaacaagcaggagggcaagucccucuacgucaagggcgagcccaucaucaacuucuacgacccccucgucuuccccuccgacgaguucgacgccuccaucucccaggucaacgagaagaucaaccagucccucgccuucauccgcaaguccgacgagcuccuccacaacgucaacgucggcaaguccaccaccaacaucaugaucaccaccaucaucaucgucaucaucgucauccuccuccuccucaucgccgucggccucuuccucuacugcaaggcccgcuccacccccgucacccucuccaaggaccagcucuccggcaucaacaacaucgccuucuccaacugaggacuaguaauaaggaaacuguaugaaugucugugggcaggaagugaagagauccuucuguaaagguuuuuggaauuaugucugcugaauaauaaacuuuuuugaaauaauaaaucugguagaaaaaugagaucuaaaaaaaaaaaaaaaaaaaaaaaaaaaaaaaaaaaaaaaaaaaaaaaaaaaaaaaaaaaaaaaaugcaucccccccccccccccccccccccccccccccaaaggcucuuuucagagccaccagaauu

SEQ ID NO: 12748 - RNA, 2111 nt, Artificial Sequence
  mRNA product Design g-4 comprising derived and/or modified sequence from HRSV(Memphis-37)__AIY60640.1__F0_DSCav1 (opt3)
gggagacuccugucgggcggaaguaggaggaguagaguuuaaaaacaguacucuuuuuccgguucgggacguaguugaagcaacgacaagccggauaaccgcucuugagacaggaagcuuaccauggagcugcccauccucaagaccaacgccauuacaacuauacuugcugcagugacgcugugcuucgccagcucccagaauaucaccgaagaguuuuaccaaucuacauguucagcggucaguaaaggcuauuugagcgcuuuaagaacugggugguacaccuccguuauuacaaucgaacugucuaacauuaaggagaauaaaugcaacggaaccgacgccaaggugaaacuaaucaagcaggaacucgauaaguauaaaaaugcaguaacugagcugcagcuucugaugcagucgaccccugccgcuaacaauagggcacggcgcgaguugccacgauucaugaacuacacacucaauaacacgaagaauaacaaugugacucugagcaaaaagcguaaaagaagguuucuggguuuccucuuaggcgucgggucagccauagcuaguggaaucgccguguguaagguucugcaccuugaaggcgaggugaacaagauuaaaaaugcguugcuguccaccaacaaggcagucgugucucuaagcaacgguguauccguucucacauuuaaagugcuggaccuuaagaauuauaucgauaaacaacuguugccgauucucaacaagcagucaugcaguaucagcaauauagaaacugucauugaguuccagcagaaaaacaaucggcuguuagagaucacccgcgaauuuucugugaacgccggggugacaacccccgucuccacguacaugcugacuaauucagagcuccuuagccugauuaacgacaugccuaucacaaaugaucaaaagaaguugaugaguaacaauguucagaucgugagacagcagucuuauuccauuauguguauaaucaaagaagagguacuagcuuacgugguccaacugccacucuacggagugauugacacccccugcuggaagcugcauacuagcccucuuuguacaaccaacacgaaagaaggcucgaauaucugccugaccaggacagaucggggcugguauugugacaacgccgggucuguuuccuucuuuccacaggcagagacuugcaaggugcagucaaaucgcgucuucugugauaccaugaacaguuugacacuccccagcgaggugaaccugugcaauauagacauuuuuaacccuaaauacgauugcaagaucaugacuuccaagaccgacguaucuagcucaguuaucacaaguuuaggagcuauuguguccuguuaugguaaaaccaagugcacugccagcaauaaaaaccgaggcaucauuaagacguucucuaaugggugugauuacgucucaaacaaaggaguggacacagucagugugggcaauacccuguauuacguuaacaagcaagaagguaagagccuauaugugaaaggggagccaauaaucaauuuuuacgacccgcucguauuccccuccgaugaguucgacgcgucuauuucgcaggucaacgaaaagaucaaucagagccuggccuuuaucagaaaauccgaugaacuuuugcacaacgugaauguuggaaagucaacuaccaacauuaugauaacaaccaucauuaucgugauuaucgucauacugcuccugcuuaucgcagugggccuguucuuguacugcaaagcuaggaguacuccuguaacacucucuaaggaccagcugagcggcauuaauaacaucgccuuuuccaacugaggacuaguaauaaggaaacuguaugaaugucugugggcaggaagugaagagauccuucuguaaagguuuuuggaauuaugucugcugaauaauaaacuuuuuugaaauaauaaaucugguagaaaaaugagaucuaaaaaaaaaaaaaaaaaaaaaaaaaaaaaaaaaaaaaaaaaaaaaaaaaaaaaaaaaaaaaaaaugcaucccccccccccccccccccccccccccccccaaaggcucuuuucagagccaccagaauu

SEQ ID NO: 12749 - RNA, 2111 nt, Artificial Sequence
  mRNA product Design g-4 comprising derived and/or modified sequence from HRSV(Memphis-37)__AIY60640.1__F0_DSCav1 (opt4)
gggagacuccugucgggcggaaguaggaggaguagaguuuaaaaacaguacucuuuuuccgguucgggacguaguugaagcaacgacaagccggauaaccgcucuugagacaggaagcuuaccauggagcugcccauccugaagaccaacgccaucaccaccauccuggccgccgugacccugugcuucgccagcagccagaacaucaccgaggaguucuaccagagcaccugcagcgccgugagcaagggcuaccugagcgcccugagaaccggcugguacaccagcgugaucaccaucgagcugagcaacaucaaggagaacaagugcaacggcaccgacgccaaggugaagcugaucaagcaggagcuggacaaguacaagaacgccgugaccgagcugcagcugcugaugcagagcacccccgccgccaacaacagagccagaagagagcugcccagauucaugaacuacacccugaacaacaccaagaacaacaacgugacccugagcaagaagagaaagagaagauuccugggcuuccugcugggcgugggcagcgccaucgccagcggcaucgccgugugcaaggugcugcaccuggagggcgaggugaacaagaucaagaacgcccugcugagcaccaacaaggccguggugagccugagcaacggcgugagcgugcugaccuucaaggugcuggaccugaagaacuacaucgacaagcagcugcugcccauccugaacaagcagagcugcagcaucagcaacaucgagaccgugaucgaguuccagcagaagaacaacagacugcuggagaucaccagagaguucagcgugaacgccggcgugaccacccccgugagcaccuacaugcugaccaacagcgagcugcugagccugaucaacgacaugcccaucaccaacgaccagaagaagcugaugagcaacaacgugcagaucgugagacagcagagcuacagcaucaugugcaucaucaaggaggaggugcuggccuacguggugcagcugccccuguacggcgugaucgacacccccugcuggaagcugcacaccagcccccugugcaccaccaacaccaaggagggcagcaacaucugccugaccagaaccgacagaggcugguacugcgacaacgccggcagcgugagcuucuucccccaggccgagaccugcaaggugcagagcaacagaguguucugcgacaccaugaacagccugacccugcccagcgaggugaaccugugcaacaucgacaucuucaaccccaaguacgacugcaagaucaugaccagcaagaccgacgugagcagcagcgugaucaccagccugggcgccaucgugagcugcuacggcaagaccaagugcaccgccagcaacaagaacagaggcaucaucaagaccuucagcaacggcugcgacuacgugagcaacaagggcguggacaccgugagcgugggcaacacccuguacuacgugaacaagcaggagggcaagagccuguacgugaagggcgagcccaucaucaacuucuacgacccccugguguuccccagcgacgaguucgacgccagcaucagccaggugaacgagaagaucaaccagagccuggccuucaucagaaagagcgacgagcugcugcacaacgugaacgugggcaagagcaccaccaacaucaugaucaccaccaucaucaucgugaucaucgugauccugcugcugcugaucgccgugggccuguuccuguacugcaaggccagaagcacccccgugacccugagcaaggaccagcugagcggcaucaacaacaucgccuucagcaacugaggacuaguaauaaggaaacuguaugaaugucugugggcaggaagugaagagauccuucuguaaagguuuuuggaauuaugucugcugaauaauaaacuuuuuugaaauaauaaaucugguagaaaaaugagaucuaaaaaaaaaaaaaaaaaaaaaaaaaaaaaaaaaaaaaaaaaaaaaaaaaaaaaaaaaaaaaaaaugcaucccccccccccccccccccccccccccccccaaaggcucuuuucagagccaccagaauu

SEQ ID NO: 12750 - RNA, 2111 nt, Artificial Sequence
  mRNA product Design g-4 comprising derived and/or modified sequence from HRSV(Memphis-37)__AIY60640.1__F0_DSCav1 (opt5)
gggagacuccugucgggcggaaguaggaggaguagaguuuaaaaacaguacucuuuuuccgguucgggacguaguugaagcaacgacaagccggauaaccgcucuugagacaggaagcuuaccauggagcugcccauccucaagaccaacgccauuacaacgauccuggcugccgugacccuuugcuucgcgagcucccagaauauuacagaagaguuuuaccaaucuaccuguagcgcugucuccaaaggcuaucugucugcccucagaacagggugguacaccagcguuaucacaauugaacuguccaacaucaaggagaauaaaugcaacggaaccgacgccaaggugaaacuuaucaagcaggaacuggauaaguauaaaaaugcugugacggagcuccagcugcugaugcagucuaccccugccgcuaacaaucgggcccgcagagagcucccgcgguucaugaacuacacacugaauaacaccaagaauaacaaugucacacuuagcaaaaagcgcaaaagacgguuucugggcuuccuccugggggugggauccgcgauugccagcggcaucgcuguuuguaaggugcuucaccuggaaggggaggucaacaagauuaaaaaugcccuccugucuaccaacaaggcugugguuucccugagcaacggagugucuguccucacguuuaaagugcuggaccuuaagaauuauaucgauaaacaacugcuccccauucugaacaagcaguccugcagcaucucuaauauugaaacagugaucgaguuccagcagaaaaacaaucgccuucuggagaucaccagagaauuuuccgucaacgccggcguuacaaccccugugagcaccuacaugcucacaaauuccgagcugcugucucucauuaacgacaugcccaucacgaaugaucaaaagaagcugaugagcaacaaugugcagauuguccggcagcaguccuauagcaucauguguauuaucaaagaagaggugcuugcguacguugugcaacugccucucuacggcgucaucgacacccccugcuggaagcugcauacaucuccucuuuguaccacaaacaccaaagaaggguccaauauuugccugacgcgcacagauagaggaugguauugugacaacgccggcagcgugucuuucuuuccgcaggcugagaccugcaagguucagagcaaucggguguucugugauaccaugaacucccucacacugcccucugaggucaaccugugcaauaucgacauuuuuaacccuaaauacgauugcaagaucaugaccagcaagacagacguguccagcucugucauuacgucccucggggccaucgugagcuguuauggaaaaaccaagugcacagcuucuaauaaaaaccgcggcaucauuaagaccuucuccaaugggugugauuacguuagcaacaaaggaguggacacagucuccgugggcaauacccuguauuacguuaacaagcaagaaggcaagucucuuuaugugaaaggggagcccaucauuaauuuuuacgacccucuggucuuccccagcgaugaguucgacgccuccaucucucaggugaacgaaaagauuaaucagagccucgccuuuaucagaaaauccgaugaacugcugcacaacgugaauguuggaaagagcacgaccaacauuaugaucacaaccaucauuaucgucauuaucgugauucuucuccugcugaucgcugugggccucuuccuguacugcaaagcgcggucuacaccggucacccuuuccaaggaccagcugagcgggaucaauaacauugccuuuucuaacugaggacuaguaauaaggaaacuguaugaaugucugugggcaggaagugaagagauccuucuguaaagguuuuuggaauuaugucugcugaauaauaaacuuuuuugaaauaauaaaucugguagaaaaaugagaucuaaaaaaaaaaaaaaaaaaaaaaaaaaaaaaaaaaaaaaaaaaaaaaaaaaaaaaaaaaaaaaaaugcaucccccccccccccccccccccccccccccccaaaggcucuuuucagagccaccagaauu

SEQ ID NO: 12751 - RNA, 2111 nt, Artificial Sequence
  mRNA product Design g-4 comprising derived and/or modified sequence from HRSV(Memphis-37)__AIY60640.1__F0_DSCav1 (opt6)
gggagacuccugucgggcggaaguaggaggaguagaguuuaaaaacaguacucuuuuuccgguucgggacguaguugaagcaacgacaagccggauaaccgcucuugagacaggaagcuuaccauggaacucccaauccucaaaaccaaugccauaacaaccauacucgcugcaguaaccuuauguuucgcaaguagccaaaacauaaccgaagaauuuuaucaauccacaugcuccgcaguuucuaaaggauaucuaucagcauuaagaacuggaugguacacaucuguaauaacuauagaacuaagcaauauaaaagaaaacaaauguaacggaacugacgcuaaaguaaaacuuauaaaacaagaacuagauaaauacaaaaacgccguuaccgaacuacaacuauuaaugcaaucaacaccagccgcaaauaacagagcaagacgcgaauuaccaagauucaugaauuacacacuaaacaauacaaaaaauaacaauguaacacuaucaaaaaaaagaaaacgacgauucuuaggcuuccuacuaggagucggcucagcaauagcuuccggaauagccgucuguaaaguccuacaccuugaaggcgaaguaaacaaaaucaaaaacgcacuauuaucaacaaacaaagcagucguaucuuuauccaacggagucucaguccuaacauucaaaguacucgauuuaaaaaacuacaucgauaaacaacuccuucccauucuaaacaaacaauccugcucaauauccaacaucgaaacagucauagaauuucaacaaaaaaacaaccgccugcuagaaauaacaagagaauuuuccguaaaugccggcgucaccacaccaguaucaacauacaugcuaacaaacuccgaacuacucucccuaauaaacgauaugccaaucaccaacgaccaaaaaaaacuaaugucaaauaacguucaaauagucagacaacaaucauacagcauaaugugcauaauaaaagaagaagucuuagccuacguuguacaacucccauuauacggaguuaucgauacaccaugcuggaaauuacacacaucacccuuaugcaccacaaacacaaaagaaggauccaauauuugucuaacacgaacagacagaggaugguacugugauaacgcaggaucagugucauucuuuccacaagcagaaacauguaaaguucaaucuaacagaguauucugcgacaccaugaacucccuaaccuuacccucagaaguaaaucuaugcaacauagauaucuuuaacccaaaauacgacugcaaaaucaugacaucaaaaacugacguuucuucauccguuauaacuucccucggcgcuauaguguccugcuacggaaaaacuaaaugcacagcauccaacaaaaauagaggaauaauaaaaacauuuuccaacggcugcgacuauguuucaaacaaaggaguagauaccguaucagucggcaauacauuauauuauguuaacaaacaagaaggaaaaucccuauacguaaaaggagaaccuauaaucaacuucuacgacccacucguauuccccucagacgaauuugacgcaucuauaucucaaguaaaugaaaaaauaaaccaaucacucgcauuuauccgcaaaucugacgaauuacuccauaacgucaacgucggcaaaucaaccaccaacauaaugauaacaacaauuauaauaguaauaauugucauacuacuacuccuaauagcaguaggucuauuccuauacugcaaagcaagauccacccccguaacccuuuccaaagaucaacucucaggaauaaauaacauagccuuuucaaacuaaggacuaguaauaaggaaacuguaugaaugucugugggcaggaagugaagagauccuucuguaaagguuuuuggaauuaugucugcugaauaauaaacuuuuuugaaauaauaaaucugguagaaaaaugagaucuaaaaaaaaaaaaaaaaaaaaaaaaaaaaaaaaaaaaaaaaaaaaaaaaaaaaaaaaaaaaaaaaugcaucccccccccccccccccccccccccccccccaaaggcucuuuucagagccaccagaauu

SEQ ID NO: 12752 - RNA, 2111 nt, Artificial Sequence
  mRNA product Design g-4 comprising derived and/or modified sequence from HRSV(Memphis-37)__AIY60640.1__F0_DSCav1 (opt11)
gggagacuccugucgggcggaaguaggaggaguagaguuuaaaaacaguacucuuuuuccgguucgggacguaguugaagcaacgacaagccggauaaccgcucuugagacaggaagcuuaccauggaacuccccauacucaagacuaaugccaucaccaccauccucgccgccgugacccucugcuucgcaucgucccaaaacauaacagaagaguucuaccaaagcacaugcuccgcagucuccaaaggauaccucuccgcacuacguaccggcugguacaccagcgucaucaccaucgaacuuuccaacaucaaagagaacaaaugcaacggcaccgacgccaaaguaaaacucauaaaacaagagcuagacaaauacaaaaacgccgucacagaacuccaacuacugaugcaauccacaccggccgccaacaaccgcgcucgacgugaacucccacgcuucaugaacuacacucuuaacaacaccaaaaauaacaacgucacccuauccaaaaagcgaaagcgcagauuccucggcuuccuacuuggcgucggcucggcgauagccucuggaaucgccguuugcaagguccuccaccuagaaggcgaaguaaacaaaaucaaaaacgcacuccuaagcaccaacaaagccgucgucucacuuuccaacggcgucucaguccucacauucaaaguucucgaccuaaagaacuacaucgacaagcaacuacuacccauacucaauaaacaauccugcuccaucagcaacaucgagacagucaucgaauuucaacaaaagaacaaccgccuccucgaaauuacacgcgaguucucagucaacgccggagucaccaccccagucucaacauacaugcucaccaacagcgaacuccugucucuaaucaacgacaugcccaucacuaacgaccagaagaaacucauguccaacaacguccaaaucgugcgacaacaaucauacucuaucaugugcaucaucaaagaagaaguccucgcauacgucguccagcucccacucuacggcguaaucgacacacccugcuggaaacuccacacaucaccccuaugcaccaccaacacaaaagaaggcuccaacaucugccuaacccgaaccgacagagguugguauugcgacaacgccggcucagucucauucuucccacaagccgaaaccuguaaaguccaaucaaaccgcgucuucugcgauaccaugaacucucucacacuccccuccgaagucaaucucugcaacauagacaucuucaauccaaaguacgacugcaaaauaaugaccucgaaaaccgacguaagcuccagcgucaucaccuccuuaggcgcaaucguauccugcuacggcaaaaccaaaugcaccgccucaaacaaaaacagaggcaucaucaaaacguucucgaacggaugcgacuacguuuccaauaaaggcguagauaccgucuccgucggcaacacacucuauuacgucaacaaacaagaaggcaaaucccucuacgucaaaggugaaccuaucaucaacuucuacgacccccucgucuuccccagcgacgaguucgaugccucaaucagccaagucaacgagaaaaucaaccaaucacuggcuuucauacgcaaauccgacgaacuccuccacaacgugaacgucggcaaauccacaaccaacaucaugauaaccacaauaaucaucgucauaaucguaauccuacuccuccuuauugccguaggacuauuccuauacugcaaagcccgauccacccccgucacccucucaaaagaccaacucuccggcaucaacaauauagccuucucuaacuaaggacuaguaauaaggaaacuguaugaaugucugugggcaggaagugaagagauccuucuguaaagguuuuuggaauuaugucugcugaauaauaaacuuuuuugaaauaauaaaucugguagaaaaaugagaucuaaaaaaaaaaaaaaaaaaaaaaaaaaaaaaaaaaaaaaaaaaaaaaaaaaaaaaaaaaaaaaaaugcaucccccccccccccccccccccccccccccccaaaggcucuuuucagagccaccagaauu

SEQ ID NO: 12753 - RNA, 2087 nt, Artificial Sequence
  mRNA product Design g-5 comprising derived and/or modified sequence from HRSV(Memphis-37)__AIY60640.1__F0_DSCav1 (opt1)
gggagacccgugacccggaaguuguacggcuacgcgacuuucccucccacaaacccucgcgcccuuccuuuccuacuugggcccggcagaaagcuuaccauggagcugcccauccucaagaccaacgccaucaccacgauccuggccgcggugacccugugcuucgccagcucccagaacaucaccgaggaguucuaccagagcacgugcuccgccgucagcaagggcuaccucuccgcccugcgcaccgggugguacaccagcgugaucaccaucgagcuguccaacaucaaggagaacaagugcaacggcaccgacgccaaggugaagcucaucaagcaggagcuggacaaguacaagaacgcggucacggagcugcagcuccugaugcagagcaccccggccgccaacaaccgggcccgccgggagcugccccgcuucaugaacuacacccucaacaacaccaagaacaacaacgugacgcuguccaagaagcggaagcgccgguuccugggguuccuccugggcguggggagcgcgaucgccuccggcaucgccgucugcaaggugcugcaccucgagggcgaggugaacaagaucaagaacgcccugcuguccaccaacaaggccgucgugagccucuccaacggggugagcguccugaccuucaaggugcuggaccucaagaacuacaucgacaagcagcugcugcccauccugaacaagcagagcugcuccaucagcaacaucgagaccgucaucgaguuccagcagaagaacaaccgccuccuggagaucacgcgggaguucagcgugaacgcgggcgugaccacccccgucuccaccuacaugcugacgaacagcgagcuccugucccugaucaacgacaugccgaucaccaacgaccagaagaagcucaugagcaacaacgugcagaucgugcgccagcaguccuacagcaucaugugcaucaucaaggaggagguccuggccuacguggugcagcugccccucuacggggucaucgacacccccugcuggaagcugcacaccagcccccugugcacgaccaacaccaaggagggcuccaacaucugccucacccggacggaccgcgggugguacugcgacaacgccggcagcguguccuucuucccgcaggccgagaccugcaagguccagagcaaccggguguucugcgacaccaugaacucccugacccugcccagcgaggugaaccucugcaacaucgacaucuucaaccccaaguacgacugcaagaucaugacguccaagaccgacgucagcuccagcgugaucaccucccugggcgccaucgugagcugcuacgggaagaccaagugcacggcgagcaacaagaaccgcggcaucaucaagaccuucuccaacgggugcgacuacgucagcaacaagggcguggacaccguguccgucggcaacacccuguacuacgugaacaagcaggagggcaagagccucuacgugaagggggagcccaucaucaacuucuacgacccgcuggucuuccccuccgacgaguucgacgccagcaucucccaggugaacgagaagaucaaccagagccuggccuucauccggaaguccgacgagcuccugcacaacgugaacgucggcaagagcaccacgaacaucaugaucaccaccaucaucaucgugaucaucgugauccugcugcuccugaucgccgucgggcuguuccucuacugcaaggcccgcuccacccccgugacgcugagcaaggaccagcuguccgggaucaacaacaucgcguucagcaacugaggacuaguaauaaggaaacuguaugaaugucugugggcaggaagugaagagauccuucuguaaagguuuuuggaauuaugucugcugaauaauaaacuuuuuugaaauaauaaaucugguagaaaaaugagaucuaaaaaaaaaaaaaaaaaaaaaaaaaaaaaaaaaaaaaaaaaaaaaaaaaaaaaaaaaaaaaaaaugcaucccccccccccccccccccccccccccccccaaaggcucuuuucagagccaccagaauu

SEQ ID NO: 12754 - RNA, 2087 nt, Artificial Sequence
  mRNA product Design g-5 comprising derived and/or modified sequence from HRSV(Memphis-37)__AIY60640.1__F0_DSCav1 (opt1)
gggagacccgugacccggaaguuguacggcuacgcgacuuucccucccacaaacccucgcgcccuuccuuuccuacuugggcccggcagaaagcuuaccauggagcugcccauccucaagaccaacgccaucaccacgauccuggccgcggugacccugugcuucgccagcucccagaacaucaccgaggaguucuaccagagcacgugcuccgccgucagcaagggcuaccucuccgcccugcgcaccgggugguacaccagcgugaucaccaucgagcuguccaacaucaaggagaacaagugcaacggcaccgacgccaaggugaagcucaucaagcaggagcuggacaaguacaagaacgcggucacggagcugcagcuccugaugcagagcaccccggccgccaacaaccgggcccgccgggagcugccccgcuucaugaacuacacccucaacaacaccaagaacaacaacgugacgcuguccaagaagcggaagcgccgguuccugggguuccuccugggcguggggagcgcgaucgccuccggcaucgccgucugcaaggugcugcaccucgagggcgaggugaacaagaucaagaacgcccugcugagcaccaacaaggccgucgugucccucagcaacgggguguccguccugaccuucaaggugcuggaccucaagaacuacaucgacaagcagcugcugcccauccucaacaagcagagcugcuccaucagcaacaucgagaccgugaucgaguuccagcagaagaacaaccgccugcuggagaucacgcgggaguucuccgucaacgcgggcgugaccacccccgugagcaccuacaugcucacgaacagcgagcugcugucccucaucaacgacaugccgaucaccaacgaccagaagaagcugaugagcaacaacguccagaucgugcgccagcaguccuacagcaucaugugcaucaucaaggaggaggugcuggccuacgucgugcagcucccccuguacggggugaucgacacccccugcuggaagcugcacaccagcccccucugcacgaccaacaccaaggagggcagcaacaucugccugacccggacggaccgcgggugguacugcgacaacgccggcuccgucagcuucuucccgcaggccgagaccugcaaggugcaguccaaccgggucuucugcgacaccaugaacagccugacccuccccuccgaggugaaccugugcaacaucgacaucuucaaccccaaguacgacugcaagaucaugacgagcaagaccgacguguccagcuccgucaucaccagccugggcgccaucguguccugcuacgggaagaccaagugcacggcgagcaacaagaaccgcggcaucaucaagaccuucuccaacgggugcgacuacgugagcaacaagggcgucgacaccgugagcgugggcaacacccucuacuacgucaacaagcaggaggggaagucccuguacgugaagggcgagcccaucaucaacuucuacgacccgcugguguuccccagcgacgaguucgacgccuccaucagccaggucaacgagaagaucaaccagucccucgccuucauccggaaguccgacgagcugcugcacaacgugaacguggggaaguccaccacgaacaucaugaucaccaccaucaucaucgucaucaucgugauccugcuccugcugaucgccgugggccucuuccuguacugcaaggcccgcagcacccccgucacgcuguccaaggaccagcucagcgggaucaacaacaucgcguucuccaacugaggacuaguaauaaggaaacuguaugaaugucugugggcaggaagugaagagauccuucuguaaagguuuuuggaauuaugucugcugaauaauaaacuuuuuugaaauaauaaaucugguagaaaaaugagaucuaaaaaaaaaaaaaaaaaaaaaaaaaaaaaaaaaaaaaaaaaaaaaaaaaaaaaaaaaaaaaaaaugcaucccccccccccccccccccccccccccccccaaaggcucuuuucagagccaccagaauu

SEQ ID NO: 12755 - RNA, 2087 nt, Artificial Sequence
  mRNA product Design g-5 comprising derived and/or modified sequence from HRSV(Memphis-37)__AIY60640.1__F0_DSCav1 (opt2)
gggagacccgugacccggaaguuguacggcuacgcgacuuucccucccacaaacccucgcgcccuuccuuuccuacuugggcccggcagaaagcuuaccauggagcuccccauccucaagaccaacgccaucaccaccauccucgccgccgucacccucugcuucgccuccucccagaacaucaccgaggaguucuaccaguccaccugcuccgccgucuccaagggcuaccucuccgcccuccgcaccggcugguacaccuccgucaucaccaucgagcucuccaacaucaaggagaacaagugcaacggcaccgacgccaaggucaagcucaucaagcaggagcucgacaaguacaagaacgccgucaccgagcuccagcuccucaugcaguccacccccgccgccaacaaccgcgcccgccgcgagcucccccgcuucaugaacuacacccucaacaacaccaagaacaacaacgucacccucuccaagaagcgcaagcgccgcuuccucggcuuccuccucggcgucggcuccgccaucgccuccggcaucgccgucugcaagguccuccaccucgagggcgaggucaacaagaucaagaacgcccuccucuccaccaacaaggccgucgucucccucuccaacggcgucuccguccucaccuucaagguccucgaccucaagaacuacaucgacaagcagcuccuccccauccucaacaagcaguccugcuccaucuccaacaucgagaccgucaucgaguuccagcagaagaacaaccgccuccucgagaucacccgcgaguucuccgucaacgccggcgucaccacccccgucuccaccuacaugcucaccaacuccgagcuccucucccucaucaacgacaugcccaucaccaacgaccagaagaagcucauguccaacaacguccagaucguccgccagcaguccuacuccaucaugugcaucaucaaggaggagguccucgccuacgucguccagcucccccucuacggcgucaucgacacccccugcuggaagcuccacaccuccccccucugcaccaccaacaccaaggagggcuccaacaucugccucacccgcaccgaccgcggcugguacugcgacaacgccggcuccgucuccuucuucccccaggccgagaccugcaagguccaguccaaccgcgucuucugcgacaccaugaacucccucacccuccccuccgaggucaaccucugcaacaucgacaucuucaaccccaaguacgacugcaagaucaugaccuccaagaccgacgucuccuccuccgucaucaccucccucggcgccaucgucuccugcuacggcaagaccaagugcaccgccuccaacaagaaccgcggcaucaucaagaccuucuccaacggcugcgacuacgucuccaacaagggcgucgacaccgucuccgucggcaacacccucuacuacgucaacaagcaggagggcaagucccucuacgucaagggcgagcccaucaucaacuucuacgacccccucgucuuccccuccgacgaguucgacgccuccaucucccaggucaacgagaagaucaaccagucccucgccuucauccgcaaguccgacgagcuccuccacaacgucaacgucggcaaguccaccaccaacaucaugaucaccaccaucaucaucgucaucaucgucauccuccuccuccucaucgccgucggccucuuccucuacugcaaggcccgcuccacccccgucacccucuccaaggaccagcucuccggcaucaacaacaucgccuucuccaacugaggacuaguaauaaggaaacuguaugaaugucugugggcaggaagugaagagauccuucuguaaagguuuuuggaauuaugucugcugaauaauaaacuuuuuugaaauaauaaaucugguagaaaaaugagaucuaaaaaaaaaaaaaaaaaaaaaaaaaaaaaaaaaaaaaaaaaaaaaaaaaaaaaaaaaaaaaaaaugcaucccccccccccccccccccccccccccccccaaaggcucuuuucagagccaccagaauu

SEQ ID NO: 12756 - RNA, 2087 nt, Artificial Sequence
  mRNA product Design g-5 comprising derived and/or modified sequence from HRSV(Memphis-37)__AIY60640.1__F0_DSCav1 (opt3)
gggagacccgugacccggaaguuguacggcuacgcgacuuucccucccacaaacccucgcgcccuuccuuuccuacuugggcccggcagaaagcuuaccauggagcugcccauccucaagaccaacgccauuacaacuauacuugcugcagugacgcugugcuucgccagcucccagaauaucaccgaagaguuuuaccaaucuacauguucagcggucaguaaaggcuauuugagcgcuuuaagaacugggugguacaccuccguuauuacaaucgaacugucuaacauuaaggagaauaaaugcaacggaaccgacgccaaggugaaacuaaucaagcaggaacucgauaaguauaaaaaugcaguaacugagcugcagcuucugaugcagucgaccccugccgcuaacaauagggcacggcgcgaguugccacgauucaugaacuacacacucaauaacacgaagaauaacaaugugacucugagcaaaaagcguaaaagaagguuucuggguuuccucuuaggcgucgggucagccauagcuaguggaaucgccguguguaagguucugcaccuugaaggcgaggugaacaagauuaaaaaugcguugcuguccaccaacaaggcagucgugucucuaagcaacgguguauccguucucacauuuaaagugcuggaccuuaagaauuauaucgauaaacaacuguugccgauucucaacaagcagucaugcaguaucagcaauauagaaacugucauugaguuccagcagaaaaacaaucggcuguuagagaucacccgcgaauuuucugugaacgccggggugacaacccccgucuccacguacaugcugacuaauucagagcuccuuagccugauuaacgacaugccuaucacaaaugaucaaaagaaguugaugaguaacaauguucagaucgugagacagcagucuuauuccauuauguguauaaucaaagaagagguacuagcuuacgugguccaacugccacucuacggagugauugacacccccugcuggaagcugcauacuagcccucuuuguacaaccaacacgaaagaaggcucgaauaucugccugaccaggacagaucggggcugguauugugacaacgccgggucuguuuccuucuuuccacaggcagagacuugcaaggugcagucaaaucgcgucuucugugauaccaugaacaguuugacacuccccagcgaggugaaccugugcaauauagacauuuuuaacccuaaauacgauugcaagaucaugacuuccaagaccgacguaucuagcucaguuaucacaaguuuaggagcuauuguguccuguuaugguaaaaccaagugcacugccagcaauaaaaaccgaggcaucauuaagacguucucuaaugggugugauuacgucucaaacaaaggaguggacacagucagugugggcaauacccuguauuacguuaacaagcaagaagguaagagccuauaugugaaaggggagccaauaaucaauuuuuacgacccgcucguauuccccuccgaugaguucgacgcgucuauuucgcaggucaacgaaaagaucaaucagagccuggccuuuaucagaaaauccgaugaacuuuugcacaacgugaauguuggaaagucaacuaccaacauuaugauaacaaccaucauuaucgugauuaucgucauacugcuccugcuuaucgcagugggccuguucuuguacugcaaagcuaggaguacuccuguaacacucucuaaggaccagcugagcggcauuaauaacaucgccuuuuccaacugaggacuaguaauaaggaaacuguaugaaugucugugggcaggaagugaagagauccuucuguaaagguuuuuggaauuaugucugcugaauaauaaacuuuuuugaaauaauaaaucugguagaaaaaugagaucuaaaaaaaaaaaaaaaaaaaaaaaaaaaaaaaaaaaaaaaaaaaaaaaaaaaaaaaaaaaaaaaaugcaucccccccccccccccccccccccccccccccaaaggcucuuuucagagccaccagaauu

SEQ ID NO: 12757 - RNA, 2087 nt, Artificial Sequence
  mRNA product Design g-5 comprising derived and/or modified sequence from HRSV(Memphis-37)__AIY60640.1__F0_DSCav1 (opt4)
gggagacccgugacccggaaguuguacggcuacgcgacuuucccucccacaaacccucgcgcccuuccuuuccuacuugggcccggcagaaagcuuaccauggagcugcccauccugaagaccaacgccaucaccaccauccuggccgccgugacccugugcuucgccagcagccagaacaucaccgaggaguucuaccagagcaccugcagcgccgugagcaagggcuaccugagcgcccugagaaccggcugguacaccagcgugaucaccaucgagcugagcaacaucaaggagaacaagugcaacggcaccgacgccaaggugaagcugaucaagcaggagcuggacaaguacaagaacgccgugaccgagcugcagcugcugaugcagagcacccccgccgccaacaacagagccagaagagagcugcccagauucaugaacuacacccugaacaacaccaagaacaacaacgugacccugagcaagaagagaaagagaagauuccugggcuuccugcugggcgugggcagcgccaucgccagcggcaucgccgugugcaaggugcugcaccuggagggcgaggugaacaagaucaagaacgcccugcugagcaccaacaaggccguggugagccugagcaacggcgugagcgugcugaccuucaaggugcuggaccugaagaacuacaucgacaagcagcugcugcccauccugaacaagcagagcugcagcaucagcaacaucgagaccgugaucgaguuccagcagaagaacaacagacugcuggagaucaccagagaguucagcgugaacgccggcgugaccacccccgugagcaccuacaugcugaccaacagcgagcugcugagccugaucaacgacaugcccaucaccaacgaccagaagaagcugaugagcaacaacgugcagaucgugagacagcagagcuacagcaucaugugcaucaucaaggaggaggugcuggccuacguggugcagcugccccuguacggcgugaucgacacccccugcuggaagcugcacaccagcccccugugcaccaccaacaccaaggagggcagcaacaucugccugaccagaaccgacagaggcugguacugcgacaacgccggcagcgugagcuucuucccccaggccgagaccugcaaggugcagagcaacagaguguucugcgacaccaugaacagccugacccugcccagcgaggugaaccugugcaacaucgacaucuucaaccccaaguacgacugcaagaucaugaccagcaagaccgacgugagcagcagcgugaucaccagccugggcgccaucgugagcugcuacggcaagaccaagugcaccgccagcaacaagaacagaggcaucaucaagaccuucagcaacggcugcgacuacgugagcaacaagggcguggacaccgugagcgugggcaacacccuguacuacgugaacaagcaggagggcaagagccuguacgugaagggcgagcccaucaucaacuucuacgacccccugguguuccccagcgacgaguucgacgccagcaucagccaggugaacgagaagaucaaccagagccuggccuucaucagaaagagcgacgagcugcugcacaacgugaacgugggcaagagcaccaccaacaucaugaucaccaccaucaucaucgugaucaucgugauccugcugcugcugaucgccgugggccuguuccuguacugcaaggccagaagcacccccgugacccugagcaaggaccagcugagcggcaucaacaacaucgccuucagcaacugaggacuaguaauaaggaaacuguaugaaugucugugggcaggaagugaagagauccuucuguaaagguuuuuggaauuaugucugcugaauaauaaacuuuuuugaaauaauaaaucugguagaaaaaugagaucuaaaaaaaaaaaaaaaaaaaaaaaaaaaaaaaaaaaaaaaaaaaaaaaaaaaaaaaaaaaaaaaaugcaucccccccccccccccccccccccccccccccaaaggcucuuuucagagccaccagaauu

SEQ ID NO: 12758 - RNA, 2087 nt, Artificial Sequence
  mRNA product Design g-5 comprising derived and/or modified sequence from HRSV(Memphis-37)__AIY60640.1__F0_DSCav1 (opt5)
gggagacccgugacccggaaguuguacggcuacgcgacuuucccucccacaaacccucgcgcccuuccuuuccuacuugggcccggcagaaagcuuaccauggagcugcccauccucaagaccaacgccauuacaacgauccuggcugccgugacccuuugcuucgcgagcucccagaauauuacagaagaguuuuaccaaucuaccuguagcgcugucuccaaaggcuaucugucugcccucagaacagggugguacaccagcguuaucacaauugaacuguccaacaucaaggagaauaaaugcaacggaaccgacgccaaggugaaacuuaucaagcaggaacuggauaaguauaaaaaugcugugacggagcuccagcugcugaugcagucuaccccugccgcuaacaaucgggcccgcagagagcucccgcgguucaugaacuacacacugaauaacaccaagaauaacaaugucacacuuagcaaaaagcgcaaaagacgguuucugggcuuccuccugggggugggauccgcgauugccagcggcaucgcuguuuguaaggugcuucaccuggaaggggaggucaacaagauuaaaaaugcccuccugucuaccaacaaggcugugguuucccugagcaacggagugucuguccucacguuuaaagugcuggaccuuaagaauuauaucgauaaacaacugcuccccauucugaacaagcaguccugcagcaucucuaauauugaaacagugaucgaguuccagcagaaaaacaaucgccuucuggagaucaccagagaauuuuccgucaacgccggcguuacaaccccugugagcaccuacaugcucacaaauuccgagcugcugucucucauuaacgacaugcccaucacgaaugaucaaaagaagcugaugagcaacaaugugcagauuguccggcagcaguccuauagcaucauguguauuaucaaagaagaggugcuugcguacguugugcaacugccucucuacggcgucaucgacacccccugcuggaagcugcauacaucuccucuuuguaccacaaacaccaaagaaggguccaauauuugccugacgcgcacagauagaggaugguauugugacaacgccggcagcgugucuuucuuuccgcaggcugagaccugcaagguucagagcaaucggguguucugugauaccaugaacucccucacacugcccucugaggucaaccugugcaauaucgacauuuuuaacccuaaauacgauugcaagaucaugaccagcaagacagacguguccagcucugucauuacgucccucggggccaucgugagcuguuauggaaaaaccaagugcacagcuucuaauaaaaaccgcggcaucauuaagaccuucuccaaugggugugauuacguuagcaacaaaggaguggacacagucuccgugggcaauacccuguauuacguuaacaagcaagaaggcaagucucuuuaugugaaaggggagcccaucauuaauuuuuacgacccucuggucuuccccagcgaugaguucgacgccuccaucucucaggugaacgaaaagauuaaucagagccucgccuuuaucagaaaauccgaugaacugcugcacaacgugaauguuggaaagagcacgaccaacauuaugaucacaaccaucauuaucgucauuaucgugauucuucuccugcugaucgcugugggccucuuccuguacugcaaagcgcggucuacaccggucacccuuuccaaggaccagcugagcgggaucaauaacauugccuuuucuaacugaggacuaguaauaaggaaacuguaugaaugucugugggcaggaagugaagagauccuucuguaaagguuuuuggaauuaugucugcugaauaauaaacuuuuuugaaauaauaaaucugguagaaaaaugagaucuaaaaaaaaaaaaaaaaaaaaaaaaaaaaaaaaaaaaaaaaaaaaaaaaaaaaaaaaaaaaaaaaugcaucccccccccccccccccccccccccccccccaaaggcucuuuucagagccaccagaauu

SEQ ID NO: 12759 - RNA, 2087 nt, Artificial Sequence
  mRNA product Design g-5 comprising derived and/or modified sequence from HRSV(Memphis-37)__AIY60640.1__F0_DSCav1 (opt6)
gggagacccgugacccggaaguuguacggcuacgcgacuuucccucccacaaacccucgcgcccuuccuuuccuacuugggcccggcagaaagcuuaccauggaacucccaauccucaaaaccaaugccauaacaaccauacucgcugcaguaaccuuauguuucgcaaguagccaaaacauaaccgaagaauuuuaucaauccacaugcuccgcaguuucuaaaggauaucuaucagcauuaagaacuggaugguacacaucuguaauaacuauagaacuaagcaauauaaaagaaaacaaauguaacggaacugacgcuaaaguaaaacuuauaaaacaagaacuagauaaauacaaaaacgccguuaccgaacuacaacuauuaaugcaaucaacaccagccgcaaauaacagagcaagacgcgaauuaccaagauucaugaauuacacacuaaacaauacaaaaaauaacaauguaacacuaucaaaaaaaagaaaacgacgauucuuaggcuuccuacuaggagucggcucagcaauagcuuccggaauagccgucuguaaaguccuacaccuugaaggcgaaguaaacaaaaucaaaaacgcacuauuaucaacaaacaaagcagucguaucuuuauccaacggagucucaguccuaacauucaaaguacucgauuuaaaaaacuacaucgauaaacaacuccuucccauucuaaacaaacaauccugcucaauauccaacaucgaaacagucauagaauuucaacaaaaaaacaaccgccugcuagaaauaacaagagaauuuuccguaaaugccggcgucaccacaccaguaucaacauacaugcuaacaaacuccgaacuacucucccuaauaaacgauaugccaaucaccaacgaccaaaaaaaacuaaugucaaauaacguucaaauagucagacaacaaucauacagcauaaugugcauaauaaaagaagaagucuuagccuacguuguacaacucccauuauacggaguuaucgauacaccaugcuggaaauuacacacaucacccuuaugcaccacaaacacaaaagaaggauccaauauuugucuaacacgaacagacagaggaugguacugugauaacgcaggaucagugucauucuuuccacaagcagaaacauguaaaguucaaucuaacagaguauucugcgacaccaugaacucccuaaccuuacccucagaaguaaaucuaugcaacauagauaucuuuaacccaaaauacgacugcaaaaucaugacaucaaaaacugacguuucuucauccguuauaacuucccucggcgcuauaguguccugcuacggaaaaacuaaaugcacagcauccaacaaaaauagaggaauaauaaaaacauuuuccaacggcugcgacuauguuucaaacaaaggaguagauaccguaucagucggcaauacauuauauuauguuaacaaacaagaaggaaaaucccuauacguaaaaggagaaccuauaaucaacuucuacgacccacucguauuccccucagacgaauuugacgcaucuauaucucaaguaaaugaaaaaauaaaccaaucacucgcauuuauccgcaaaucugacgaauuacuccauaacgucaacgucggcaaaucaaccaccaacauaaugauaacaacaauuauaauaguaauaauugucauacuacuacuccuaauagcaguaggucuauuccuauacugcaaagcaagauccacccccguaacccuuuccaaagaucaacucucaggaauaaauaacauagccuuuucaaacuaaggacuaguaauaaggaaacuguaugaaugucugugggcaggaagugaagagauccuucuguaaagguuuuuggaauuaugucugcugaauaauaaacuuuuuugaaauaauaaaucugguagaaaaaugagaucuaaaaaaaaaaaaaaaaaaaaaaaaaaaaaaaaaaaaaaaaaaaaaaaaaaaaaaaaaaaaaaaaugcaucccccccccccccccccccccccccccccccaaaggcucuuuucagagccaccagaauu

SEQ ID NO: 12760 - RNA, 2087 nt, Artificial Sequence
  mRNA product Design g-5 comprising derived and/or modified sequence from HRSV(Memphis-37)__AIY60640.1__F0_DSCav1 (opt11)
gggagacccgugacccggaaguuguacggcuacgcgacuuucccucccacaaacccucgcgcccuuccuuuccuacuugggcccggcagaaagcuuaccauggaacuccccauacucaagacuaaugccaucaccaccauccucgccgccgugacccucugcuucgcaucgucccaaaacauaacagaagaguucuaccaaagcacaugcuccgcagucuccaaaggauaccucuccgcacuacguaccggcugguacaccagcgucaucaccaucgaacuuuccaacaucaaagagaacaaaugcaacggcaccgacgccaaaguaaaacucauaaaacaagagcuagacaaauacaaaaacgccgucacagaacuccaacuacugaugcaauccacaccggccgccaacaaccgcgcucgacgugaacucccacgcuucaugaacuacacucuuaacaacaccaaaaauaacaacgucacccuauccaaaaagcgaaagcgcagauuccucggcuuccuacuuggcgucggcucggcgauagccucuggaaucgccguuugcaagguccuccaccuagaaggcgaaguaaacaaaaucaaaaacgcacuccuaagcaccaacaaagccgucgucucacuuuccaacggcgucucaguccucacauucaaaguucucgaccuaaagaacuacaucgacaagcaacuacuacccauacucaauaaacaauccugcuccaucagcaacaucgagacagucaucgaauuucaacaaaagaacaaccgccuccucgaaauuacacgcgaguucucagucaacgccggagucaccaccccagucucaacauacaugcucaccaacagcgaacuccugucucuaaucaacgacaugcccaucacuaacgaccagaagaaacucauguccaacaacguccaaaucgugcgacaacaaucauacucuaucaugugcaucaucaaagaagaaguccucgcauacgucguccagcucccacucuacggcguaaucgacacacccugcuggaaacuccacacaucaccccuaugcaccaccaacacaaaagaaggcuccaacaucugccuaacccgaaccgacagagguugguauugcgacaacgccggcucagucucauucuucccacaagccgaaaccuguaaaguccaaucaaaccgcgucuucugcgauaccaugaacucucucacacuccccuccgaagucaaucucugcaacauagacaucuucaauccaaaguacgacugcaaaauaaugaccucgaaaaccgacguaagcuccagcgucaucaccuccuuaggcgcaaucguauccugcuacggcaaaaccaaaugcaccgccucaaacaaaaacagaggcaucaucaaaacguucucgaacggaugcgacuacguuuccaauaaaggcguagauaccgucuccgucggcaacacacucuauuacgucaacaaacaagaaggcaaaucccucuacgucaaaggugaaccuaucaucaacuucuacgacccccucgucuuccccagcgacgaguucgaugccucaaucagccaagucaacgagaaaaucaaccaaucacuggcuuucauacgcaaauccgacgaacuccuccacaacgugaacgucggcaaauccacaaccaacaucaugauaaccacaauaaucaucgucauaaucguaauccuacuccuccuuauugccguaggacuauuccuauacugcaaagcccgauccacccccgucacccucucaaaagaccaacucuccggcaucaacaauauagccuucucuaacuaaggacuaguaauaaggaaacuguaugaaugucugugggcaggaagugaagagauccuucuguaaagguuuuuggaauuaugucugcugaauaauaaacuuuuuugaaauaauaaaucugguagaaaaaugagaucuaaaaaaaaaaaaaaaaaaaaaaaaaaaaaaaaaaaaaaaaaaaaaaaaaaaaaaaaaaaaaaaaugcaucccccccccccccccccccccccccccccccaaaggcucuuuucagagccaccagaauu

SEQ ID NO: 12761 - RNA, 2103 nt, Artificial Sequence
  mRNA product Design h-1 comprising derived and/or modified sequence from HRSV(Memphis-37)__AIY60640.1__F0_DSCav1 (opt1)
gggagacccgugacccggaaguuguacggcuacgcgacuuucccucccacaaacccucgcgcccuuccuuuccuacuugggcccggcagaaagcuuaccauggagcugcccauccucaagaccaacgccaucaccacgauccuggccgcggugacccugugcuucgccagcucccagaacaucaccgaggaguucuaccagagcacgugcuccgccgucagcaagggcuaccucuccgcccugcgcaccgggugguacaccagcgugaucaccaucgagcuguccaacaucaaggagaacaagugcaacggcaccgacgccaaggugaagcucaucaagcaggagcuggacaaguacaagaacgcggucacggagcugcagcuccugaugcagagcaccccggccgccaacaaccgggcccgccgggagcugccccgcuucaugaacuacacccucaacaacaccaagaacaacaacgugacgcuguccaagaagcggaagcgccgguuccugggguuccuccugggcguggggagcgcgaucgccuccggcaucgccgucugcaaggugcugcaccucgagggcgaggugaacaagaucaagaacgcccugcuguccaccaacaaggccgucgugagccucuccaacggggugagcguccugaccuucaaggugcuggaccucaagaacuacaucgacaagcagcugcugcccauccugaacaagcagagcugcuccaucagcaacaucgagaccgucaucgaguuccagcagaagaacaaccgccuccuggagaucacgcgggaguucagcgugaacgcgggcgugaccacccccgucuccaccuacaugcugacgaacagcgagcuccugucccugaucaacgacaugccgaucaccaacgaccagaagaagcucaugagcaacaacgugcagaucgugcgccagcaguccuacagcaucaugugcaucaucaaggaggagguccuggccuacguggugcagcugccccucuacggggucaucgacacccccugcuggaagcugcacaccagcccccugugcacgaccaacaccaaggagggcuccaacaucugccucacccggacggaccgcgggugguacugcgacaacgccggcagcguguccuucuucccgcaggccgagaccugcaagguccagagcaaccggguguucugcgacaccaugaacucccugacccugcccagcgaggugaaccucugcaacaucgacaucuucaaccccaaguacgacugcaagaucaugacguccaagaccgacgucagcuccagcgugaucaccucccugggcgccaucgugagcugcuacgggaagaccaagugcacggcgagcaacaagaaccgcggcaucaucaagaccuucuccaacgggugcgacuacgucagcaacaagggcguggacaccguguccgucggcaacacccuguacuacgugaacaagcaggagggcaagagccucuacgugaagggggagcccaucaucaacuucuacgacccgcuggucuuccccuccgacgaguucgacgccagcaucucccaggugaacgagaagaucaaccagagccuggccuucauccggaaguccgacgagcuccugcacaacgugaacgucggcaagagcaccacgaacaucaugaucaccaccaucaucaucgugaucaucgugauccugcugcuccugaucgccgucgggcuguuccucuacugcaaggcccgcuccacccccgugacgcugagcaaggaccagcuguccgggaucaacaacaucgcguucagcaacugaggacuaguacuggcugcaucucccuuuccucuguccuccauccuucucccaggauggugaagggggaccugguacccagugauccccaccccaggauccuaaaucaugacuuaccugcuaauaaaaacucauuggaaaagugagaagaucuaaaaaaaaaaaaaaaaaaaaaaaaaaaaaaaaaaaaaaaaaaaaaaaaaaaaaaaaaaaaaaaaugcaucccccccccccccccccccccccccccccccaaaggcucuuuucagagccaccagaauu

SEQ ID NO: 12762 - RNA, 2103 nt, Artificial Sequence
  mRNA product Design h-1 comprising derived and/or modified sequence from HRSV(Memphis-37)__AIY60640.1__F0_DSCav1 (opt1)
gggagacccgugacccggaaguuguacggcuacgcgacuuucccucccacaaacccucgcgcccuuccuuuccuacuugggcccggcagaaagcuuaccauggagcugcccauccucaagaccaacgccaucaccacgauccuggccgcggugacccugugcuucgccagcucccagaacaucaccgaggaguucuaccagagcacgugcuccgccgucagcaagggcuaccucuccgcccugcgcaccgggugguacaccagcgugaucaccaucgagcuguccaacaucaaggagaacaagugcaacggcaccgacgccaaggugaagcucaucaagcaggagcuggacaaguacaagaacgcggucacggagcugcagcuccugaugcagagcaccccggccgccaacaaccgggcccgccgggagcugccccgcuucaugaacuacacccucaacaacaccaagaacaacaacgugacgcuguccaagaagcggaagcgccgguuccugggguuccuccugggcguggggagcgcgaucgccuccggcaucgccgucugcaaggugcugcaccucgagggcgaggugaacaagaucaagaacgcccugcugagcaccaacaaggccgucgugucccucagcaacgggguguccguccugaccuucaaggugcuggaccucaagaacuacaucgacaagcagcugcugcccauccucaacaagcagagcugcuccaucagcaacaucgagaccgugaucgaguuccagcagaagaacaaccgccugcuggagaucacgcgggaguucuccgucaacgcgggcgugaccacccccgugagcaccuacaugcucacgaacagcgagcugcugucccucaucaacgacaugccgaucaccaacgaccagaagaagcugaugagcaacaacguccagaucgugcgccagcaguccuacagcaucaugugcaucaucaaggaggaggugcuggccuacgucgugcagcucccccuguacggggugaucgacacccccugcuggaagcugcacaccagcccccucugcacgaccaacaccaaggagggcagcaacaucugccugacccggacggaccgcgggugguacugcgacaacgccggcuccgucagcuucuucccgcaggccgagaccugcaaggugcaguccaaccgggucuucugcgacaccaugaacagccugacccuccccuccgaggugaaccugugcaacaucgacaucuucaaccccaaguacgacugcaagaucaugacgagcaagaccgacguguccagcuccgucaucaccagccugggcgccaucguguccugcuacgggaagaccaagugcacggcgagcaacaagaaccgcggcaucaucaagaccuucuccaacgggugcgacuacgugagcaacaagggcgucgacaccgugagcgugggcaacacccucuacuacgucaacaagcaggaggggaagucccuguacgugaagggcgagcccaucaucaacuucuacgacccgcugguguuccccagcgacgaguucgacgccuccaucagccaggucaacgagaagaucaaccagucccucgccuucauccggaaguccgacgagcugcugcacaacgugaacguggggaaguccaccacgaacaucaugaucaccaccaucaucaucgucaucaucgugauccugcuccugcugaucgccgugggccucuuccuguacugcaaggcccgcagcacccccgucacgcuguccaaggaccagcucagcgggaucaacaacaucgcguucuccaacugaggacuaguacuggcugcaucucccuuuccucuguccuccauccuucucccaggauggugaagggggaccugguacccagugauccccaccccaggauccuaaaucaugacuuaccugcuaauaaaaacucauuggaaaagugagaagaucuaaaaaaaaaaaaaaaaaaaaaaaaaaaaaaaaaaaaaaaaaaaaaaaaaaaaaaaaaaaaaaaaugcaucccccccccccccccccccccccccccccccaaaggcucuuuucagagccaccagaauu

SEQ ID NO: 12763 - RNA, 2103 nt, Artificial Sequence
  mRNA product Design h-1 comprising derived and/or modified sequence from HRSV(Memphis-37)__AIY60640.1__F0_DSCav1 (opt2)
gggagacccgugacccggaaguuguacggcuacgcgacuuucccucccacaaacccucgcgcccuuccuuuccuacuugggcccggcagaaagcuuaccauggagcuccccauccucaagaccaacgccaucaccaccauccucgccgccgucacccucugcuucgccuccucccagaacaucaccgaggaguucuaccaguccaccugcuccgccgucuccaagggcuaccucuccgcccuccgcaccggcugguacaccuccgucaucaccaucgagcucuccaacaucaaggagaacaagugcaacggcaccgacgccaaggucaagcucaucaagcaggagcucgacaaguacaagaacgccgucaccgagcuccagcuccucaugcaguccacccccgccgccaacaaccgcgcccgccgcgagcucccccgcuucaugaacuacacccucaacaacaccaagaacaacaacgucacccucuccaagaagcgcaagcgccgcuuccucggcuuccuccucggcgucggcuccgccaucgccuccggcaucgccgucugcaagguccuccaccucgagggcgaggucaacaagaucaagaacgcccuccucuccaccaacaaggccgucgucucccucuccaacggcgucuccguccucaccuucaagguccucgaccucaagaacuacaucgacaagcagcuccuccccauccucaacaagcaguccugcuccaucuccaacaucgagaccgucaucgaguuccagcagaagaacaaccgccuccucgagaucacccgcgaguucuccgucaacgccggcgucaccacccccgucuccaccuacaugcucaccaacuccgagcuccucucccucaucaacgacaugcccaucaccaacgaccagaagaagcucauguccaacaacguccagaucguccgccagcaguccuacuccaucaugugcaucaucaaggaggagguccucgccuacgucguccagcucccccucuacggcgucaucgacacccccugcuggaagcuccacaccuccccccucugcaccaccaacaccaaggagggcuccaacaucugccucacccgcaccgaccgcggcugguacugcgacaacgccggcuccgucuccuucuucccccaggccgagaccugcaagguccaguccaaccgcgucuucugcgacaccaugaacucccucacccuccccuccgaggucaaccucugcaacaucgacaucuucaaccccaaguacgacugcaagaucaugaccuccaagaccgacgucuccuccuccgucaucaccucccucggcgccaucgucuccugcuacggcaagaccaagugcaccgccuccaacaagaaccgcggcaucaucaagaccuucuccaacggcugcgacuacgucuccaacaagggcgucgacaccgucuccgucggcaacacccucuacuacgucaacaagcaggagggcaagucccucuacgucaagggcgagcccaucaucaacuucuacgacccccucgucuuccccuccgacgaguucgacgccuccaucucccaggucaacgagaagaucaaccagucccucgccuucauccgcaaguccgacgagcuccuccacaacgucaacgucggcaaguccaccaccaacaucaugaucaccaccaucaucaucgucaucaucgucauccuccuccuccucaucgccgucggccucuuccucuacugcaaggcccgcuccacccccgucacccucuccaaggaccagcucuccggcaucaacaacaucgccuucuccaacugaggacuaguacuggcugcaucucccuuuccucuguccuccauccuucucccaggauggugaagggggaccugguacccagugauccccaccccaggauccuaaaucaugacuuaccugcuaauaaaaacucauuggaaaagugagaagaucuaaaaaaaaaaaaaaaaaaaaaaaaaaaaaaaaaaaaaaaaaaaaaaaaaaaaaaaaaaaaaaaaugcaucccccccccccccccccccccccccccccccaaaggcucuuuucagagccaccagaauu

SEQ ID NO: 12764 - RNA, 2103 nt, Artificial Sequence
  mRNA product Design h-1 comprising derived and/or modified sequence from HRSV(Memphis-37)__AIY60640.1__F0_DSCav1 (opt3)
gggagacccgugacccggaaguuguacggcuacgcgacuuucccucccacaaacccucgcgcccuuccuuuccuacuugggcccggcagaaagcuuaccauggagcugcccauccucaagaccaacgccauuacaacuauacuugcugcagugacgcugugcuucgccagcucccagaauaucaccgaagaguuuuaccaaucuacauguucagcggucaguaaaggcuauuugagcgcuuuaagaacugggugguacaccuccguuauuacaaucgaacugucuaacauuaaggagaauaaaugcaacggaaccgacgccaaggugaaacuaaucaagcaggaacucgauaaguauaaaaaugcaguaacugagcugcagcuucugaugcagucgaccccugccgcuaacaauagggcacggcgcgaguugccacgauucaugaacuacacacucaauaacacgaagaauaacaaugugacucugagcaaaaagcguaaaagaagguuucuggguuuccucuuaggcgucgggucagccauagcuaguggaaucgccguguguaagguucugcaccuugaaggcgaggugaacaagauuaaaaaugcguugcuguccaccaacaaggcagucgugucucuaagcaacgguguauccguucucacauuuaaagugcuggaccuuaagaauuauaucgauaaacaacuguugccgauucucaacaagcagucaugcaguaucagcaauauagaaacugucauugaguuccagcagaaaaacaaucggcuguuagagaucacccgcgaauuuucugugaacgccggggugacaacccccgucuccacguacaugcugacuaauucagagcuccuuagccugauuaacgacaugccuaucacaaaugaucaaaagaaguugaugaguaacaauguucagaucgugagacagcagucuuauuccauuauguguauaaucaaagaagagguacuagcuuacgugguccaacugccacucuacggagugauugacacccccugcuggaagcugcauacuagcccucuuuguacaaccaacacgaaagaaggcucgaauaucugccugaccaggacagaucggggcugguauugugacaacgccgggucuguuuccuucuuuccacaggcagagacuugcaaggugcagucaaaucgcgucuucugugauaccaugaacaguuugacacuccccagcgaggugaaccugugcaauauagacauuuuuaacccuaaauacgauugcaagaucaugacuuccaagaccgacguaucuagcucaguuaucacaaguuuaggagcuauuguguccuguuaugguaaaaccaagugcacugccagcaauaaaaaccgaggcaucauuaagacguucucuaaugggugugauuacgucucaaacaaaggaguggacacagucagugugggcaauacccuguauuacguuaacaagcaagaagguaagagccuauaugugaaaggggagccaauaaucaauuuuuacgacccgcucguauuccccuccgaugaguucgacgcgucuauuucgcaggucaacgaaaagaucaaucagagccuggccuuuaucagaaaauccgaugaacuuuugcacaacgugaauguuggaaagucaacuaccaacauuaugauaacaaccaucauuaucgugauuaucgucauacugcuccugcuuaucgcagugggccuguucuuguacugcaaagcuaggaguacuccuguaacacucucuaaggaccagcugagcggcauuaauaacaucgccuuuuccaacugaggacuaguacuggcugcaucucccuuuccucuguccuccauccuucucccaggauggugaagggggaccugguacccagugauccccaccccaggauccuaaaucaugacuuaccugcuaauaaaaacucauuggaaaagugagaagaucuaaaaaaaaaaaaaaaaaaaaaaaaaaaaaaaaaaaaaaaaaaaaaaaaaaaaaaaaaaaaaaaaugcaucccccccccccccccccccccccccccccccaaaggcucuuuucagagccaccagaauu

SEQ ID NO: 12765 - RNA, 2103 nt, Artificial Sequence
  mRNA product Design h-1 comprising derived and/or modified sequence from HRSV(Memphis-37)__AIY60640.1__F0_DSCav1 (opt4)
gggagacccgugacccggaaguuguacggcuacgcgacuuucccucccacaaacccucgcgcccuuccuuuccuacuugggcccggcagaaagcuuaccauggagcugcccauccugaagaccaacgccaucaccaccauccuggccgccgugacccugugcuucgccagcagccagaacaucaccgaggaguucuaccagagcaccugcagcgccgugagcaagggcuaccugagcgcccugagaaccggcugguacaccagcgugaucaccaucgagcugagcaacaucaaggagaacaagugcaacggcaccgacgccaaggugaagcugaucaagcaggagcuggacaaguacaagaacgccgugaccgagcugcagcugcugaugcagagcacccccgccgccaacaacagagccagaagagagcugcccagauucaugaacuacacccugaacaacaccaagaacaacaacgugacccugagcaagaagagaaagagaagauuccugggcuuccugcugggcgugggcagcgccaucgccagcggcaucgccgugugcaaggugcugcaccuggagggcgaggugaacaagaucaagaacgcccugcugagcaccaacaaggccguggugagccugagcaacggcgugagcgugcugaccuucaaggugcuggaccugaagaacuacaucgacaagcagcugcugcccauccugaacaagcagagcugcagcaucagcaacaucgagaccgugaucgaguuccagcagaagaacaacagacugcuggagaucaccagagaguucagcgugaacgccggcgugaccacccccgugagcaccuacaugcugaccaacagcgagcugcugagccugaucaacgacaugcccaucaccaacgaccagaagaagcugaugagcaacaacgugcagaucgugagacagcagagcuacagcaucaugugcaucaucaaggaggaggugcuggccuacguggugcagcugccccuguacggcgugaucgacacccccugcuggaagcugcacaccagcccccugugcaccaccaacaccaaggagggcagcaacaucugccugaccagaaccgacagaggcugguacugcgacaacgccggcagcgugagcuucuucccccaggccgagaccugcaaggugcagagcaacagaguguucugcgacaccaugaacagccugacccugcccagcgaggugaaccugugcaacaucgacaucuucaaccccaaguacgacugcaagaucaugaccagcaagaccgacgugagcagcagcgugaucaccagccugggcgccaucgugagcugcuacggcaagaccaagugcaccgccagcaacaagaacagaggcaucaucaagaccuucagcaacggcugcgacuacgugagcaacaagggcguggacaccgugagcgugggcaacacccuguacuacgugaacaagcaggagggcaagagccuguacgugaagggcgagcccaucaucaacuucuacgacccccugguguuccccagcgacgaguucgacgccagcaucagccaggugaacgagaagaucaaccagagccuggccuucaucagaaagagcgacgagcugcugcacaacgugaacgugggcaagagcaccaccaacaucaugaucaccaccaucaucaucgugaucaucgugauccugcugcugcugaucgccgugggccuguuccuguacugcaaggccagaagcacccccgugacccugagcaaggaccagcugagcggcaucaacaacaucgccuucagcaacugaggacuaguacuggcugcaucucccuuuccucuguccuccauccuucucccaggauggugaagggggaccugguacccagugauccccaccccaggauccuaaaucaugacuuaccugcuaauaaaaacucauuggaaaagugagaagaucuaaaaaaaaaaaaaaaaaaaaaaaaaaaaaaaaaaaaaaaaaaaaaaaaaaaaaaaaaaaaaaaaugcaucccccccccccccccccccccccccccccccaaaggcucuuuucagagccaccagaauu

SEQ ID NO: 12766 - RNA, 2103 nt, Artificial Sequence
  mRNA product Design h-1 comprising derived and/or modified sequence from HRSV(Memphis-37)__AIY60640.1__F0_DSCav1 (opt5)
gggagacccgugacccggaaguuguacggcuacgcgacuuucccucccacaaacccucgcgcccuuccuuuccuacuugggcccggcagaaagcuuaccauggagcugcccauccucaagaccaacgccauuacaacgauccuggcugccgugacccuuugcuucgcgagcucccagaauauuacagaagaguuuuaccaaucuaccuguagcgcugucuccaaaggcuaucugucugcccucagaacagggugguacaccagcguuaucacaauugaacuguccaacaucaaggagaauaaaugcaacggaaccgacgccaaggugaaacuuaucaagcaggaacuggauaaguauaaaaaugcugugacggagcuccagcugcugaugcagucuaccccugccgcuaacaaucgggcccgcagagagcucccgcgguucaugaacuacacacugaauaacaccaagaauaacaaugucacacuuagcaaaaagcgcaaaagacgguuucugggcuuccuccugggggugggauccgcgauugccagcggcaucgcuguuuguaaggugcuucaccuggaaggggaggucaacaagauuaaaaaugcccuccugucuaccaacaaggcugugguuucccugagcaacggagugucuguccucacguuuaaagugcuggaccuuaagaauuauaucgauaaacaacugcuccccauucugaacaagcaguccugcagcaucucuaauauugaaacagugaucgaguuccagcagaaaaacaaucgccuucuggagaucaccagagaauuuuccgucaacgccggcguuacaaccccugugagcaccuacaugcucacaaauuccgagcugcugucucucauuaacgacaugcccaucacgaaugaucaaaagaagcugaugagcaacaaugugcagauuguccggcagcaguccuauagcaucauguguauuaucaaagaagaggugcuugcguacguugugcaacugccucucuacggcgucaucgacacccccugcuggaagcugcauacaucuccucuuuguaccacaaacaccaaagaaggguccaauauuugccugacgcgcacagauagaggaugguauugugacaacgccggcagcgugucuuucuuuccgcaggcugagaccugcaagguucagagcaaucggguguucugugauaccaugaacucccucacacugcccucugaggucaaccugugcaauaucgacauuuuuaacccuaaauacgauugcaagaucaugaccagcaagacagacguguccagcucugucauuacgucccucggggccaucgugagcuguuauggaaaaaccaagugcacagcuucuaauaaaaaccgcggcaucauuaagaccuucuccaaugggugugauuacguuagcaacaaaggaguggacacagucuccgugggcaauacccuguauuacguuaacaagcaagaaggcaagucucuuuaugugaaaggggagcccaucauuaauuuuuacgacccucuggucuuccccagcgaugaguucgacgccuccaucucucaggugaacgaaaagauuaaucagagccucgccuuuaucagaaaauccgaugaacugcugcacaacgugaauguuggaaagagcacgaccaacauuaugaucacaaccaucauuaucgucauuaucgugauucuucuccugcugaucgcugugggccucuuccuguacugcaaagcgcggucuacaccggucacccuuuccaaggaccagcugagcgggaucaauaacauugccuuuucuaacugaggacuaguacuggcugcaucucccuuuccucuguccuccauccuucucccaggauggugaagggggaccugguacccagugauccccaccccaggauccuaaaucaugacuuaccugcuaauaaaaacucauuggaaaagugagaagaucuaaaaaaaaaaaaaaaaaaaaaaaaaaaaaaaaaaaaaaaaaaaaaaaaaaaaaaaaaaaaaaaaugcaucccccccccccccccccccccccccccccccaaaggcucuuuucagagccaccagaauu

SEQ ID NO: 12767 - RNA, 2103 nt, Artificial Sequence
  mRNA product Design h-1 comprising derived and/or modified sequence from HRSV(Memphis-37)__AIY60640.1__F0_DSCav1 (opt6)
gggagacccgugacccggaaguuguacggcuacgcgacuuucccucccacaaacccucgcgcccuuccuuuccuacuugggcccggcagaaagcuuaccauggaacucccaauccucaaaaccaaugccauaacaaccauacucgcugcaguaaccuuauguuucgcaaguagccaaaacauaaccgaagaauuuuaucaauccacaugcuccgcaguuucuaaaggauaucuaucagcauuaagaacuggaugguacacaucuguaauaacuauagaacuaagcaauauaaaagaaaacaaauguaacggaacugacgcuaaaguaaaacuuauaaaacaagaacuagauaaauacaaaaacgccguuaccgaacuacaacuauuaaugcaaucaacaccagccgcaaauaacagagcaagacgcgaauuaccaagauucaugaauuacacacuaaacaauacaaaaaauaacaauguaacacuaucaaaaaaaagaaaacgacgauucuuaggcuuccuacuaggagucggcucagcaauagcuuccggaauagccgucuguaaaguccuacaccuugaaggcgaaguaaacaaaaucaaaaacgcacuauuaucaacaaacaaagcagucguaucuuuauccaacggagucucaguccuaacauucaaaguacucgauuuaaaaaacuacaucgauaaacaacuccuucccauucuaaacaaacaauccugcucaauauccaacaucgaaacagucauagaauuucaacaaaaaaacaaccgccugcuagaaauaacaagagaauuuuccguaaaugccggcgucaccacaccaguaucaacauacaugcuaacaaacuccgaacuacucucccuaauaaacgauaugccaaucaccaacgaccaaaaaaaacuaaugucaaauaacguucaaauagucagacaacaaucauacagcauaaugugcauaauaaaagaagaagucuuagccuacguuguacaacucccauuauacggaguuaucgauacaccaugcuggaaauuacacacaucacccuuaugcaccacaaacacaaaagaaggauccaauauuugucuaacacgaacagacagaggaugguacugugauaacgcaggaucagugucauucuuuccacaagcagaaacauguaaaguucaaucuaacagaguauucugcgacaccaugaacucccuaaccuuacccucagaaguaaaucuaugcaacauagauaucuuuaacccaaaauacgacugcaaaaucaugacaucaaaaacugacguuucuucauccguuauaacuucccucggcgcuauaguguccugcuacggaaaaacuaaaugcacagcauccaacaaaaauagaggaauaauaaaaacauuuuccaacggcugcgacuauguuucaaacaaaggaguagauaccguaucagucggcaauacauuauauuauguuaacaaacaagaaggaaaaucccuauacguaaaaggagaaccuauaaucaacuucuacgacccacucguauuccccucagacgaauuugacgcaucuauaucucaaguaaaugaaaaaauaaaccaaucacucgcauuuauccgcaaaucugacgaauuacuccauaacgucaacgucggcaaaucaaccaccaacauaaugauaacaacaauuauaauaguaauaauugucauacuacuacuccuaauagcaguaggucuauuccuauacugcaaagcaagauccacccccguaacccuuuccaaagaucaacucucaggaauaaauaacauagccuuuucaaacuaaggacuaguacuggcugcaucucccuuuccucuguccuccauccuucucccaggauggugaagggggaccugguacccagugauccccaccccaggauccuaaaucaugacuuaccugcuaauaaaaacucauuggaaaagugagaagaucuaaaaaaaaaaaaaaaaaaaaaaaaaaaaaaaaaaaaaaaaaaaaaaaaaaaaaaaaaaaaaaaaugcaucccccccccccccccccccccccccccccccaaaggcucuuuucagagccaccagaauu

SEQ ID NO: 12768 - RNA, 2103 nt, Artificial Sequence
  mRNA product Design h-1 comprising derived and/or modified sequence from HRSV(Memphis-37)__AIY60640.1__F0_DSCav1 (opt11)
gggagacccgugacccggaaguuguacggcuacgcgacuuucccucccacaaacccucgcgcccuuccuuuccuacuugggcccggcagaaagcuuaccauggaacuccccauacucaagacuaaugccaucaccaccauccucgccgccgugacccucugcuucgcaucgucccaaaacauaacagaagaguucuaccaaagcacaugcuccgcagucuccaaaggauaccucuccgcacuacguaccggcugguacaccagcgucaucaccaucgaacuuuccaacaucaaagagaacaaaugcaacggcaccgacgccaaaguaaaacucauaaaacaagagcuagacaaauacaaaaacgccgucacagaacuccaacuacugaugcaauccacaccggccgccaacaaccgcgcucgacgugaacucccacgcuucaugaacuacacucuuaacaacaccaaaaauaacaacgucacccuauccaaaaagcgaaagcgcagauuccucggcuuccuacuuggcgucggcucggcgauagccucuggaaucgccguuugcaagguccuccaccuagaaggcgaaguaaacaaaaucaaaaacgcacuccuaagcaccaacaaagccgucgucucacuuuccaacggcgucucaguccucacauucaaaguucucgaccuaaagaacuacaucgacaagcaacuacuacccauacucaauaaacaauccugcuccaucagcaacaucgagacagucaucgaauuucaacaaaagaacaaccgccuccucgaaauuacacgcgaguucucagucaacgccggagucaccaccccagucucaacauacaugcucaccaacagcgaacuccugucucuaaucaacgacaugcccaucacuaacgaccagaagaaacucauguccaacaacguccaaaucgugcgacaacaaucauacucuaucaugugcaucaucaaagaagaaguccucgcauacgucguccagcucccacucuacggcguaaucgacacacccugcuggaaacuccacacaucaccccuaugcaccaccaacacaaaagaaggcuccaacaucugccuaacccgaaccgacagagguugguauugcgacaacgccggcucagucucauucuucccacaagccgaaaccuguaaaguccaaucaaaccgcgucuucugcgauaccaugaacucucucacacuccccuccgaagucaaucucugcaacauagacaucuucaauccaaaguacgacugcaaaauaaugaccucgaaaaccgacguaagcuccagcgucaucaccuccuuaggcgcaaucguauccugcuacggcaaaaccaaaugcaccgccucaaacaaaaacagaggcaucaucaaaacguucucgaacggaugcgacuacguuuccaauaaaggcguagauaccgucuccgucggcaacacacucuauuacgucaacaaacaagaaggcaaaucccucuacgucaaaggugaaccuaucaucaacuucuacgacccccucgucuuccccagcgacgaguucgaugccucaaucagccaagucaacgagaaaaucaaccaaucacuggcuuucauacgcaaauccgacgaacuccuccacaacgugaacgucggcaaauccacaaccaacaucaugauaaccacaauaaucaucgucauaaucguaauccuacuccuccuuauugccguaggacuauuccuauacugcaaagcccgauccacccccgucacccucucaaaagaccaacucuccggcaucaacaauauagccuucucuaacuaaggacuaguacuggcugcaucucccuuuccucuguccuccauccuucucccaggauggugaagggggaccugguacccagugauccccaccccaggauccuaaaucaugacuuaccugcuaauaaaaacucauuggaaaagugagaagaucuaaaaaaaaaaaaaaaaaaaaaaaaaaaaaaaaaaaaaaaaaaaaaaaaaaaaaaaaaaaaaaaaugcaucccccccccccccccccccccccccccccccaaaggcucuuuucagagccaccagaauu

SEQ ID NO: 12769 - RNA, 2319 nt, Artificial Sequence
  mRNA product Design h-2 comprising derived and/or modified sequence from HRSV(Memphis-37)__AIY60640.1__F0_DSCav1 (opt1)
gggagacccgugacccggaaguuguacggcuacgcgacuuucccucccacaaacccucgcgcccuuccuuuccuacuugggcccggcagaaagcuuaccauggagcugcccauccucaagaccaacgccaucaccacgauccuggccgcggugacccugugcuucgccagcucccagaacaucaccgaggaguucuaccagagcacgugcuccgccgucagcaagggcuaccucuccgcccugcgcaccgggugguacaccagcgugaucaccaucgagcuguccaacaucaaggagaacaagugcaacggcaccgacgccaaggugaagcucaucaagcaggagcuggacaaguacaagaacgcggucacggagcugcagcuccugaugcagagcaccccggccgccaacaaccgggcccgccgggagcugccccgcuucaugaacuacacccucaacaacaccaagaacaacaacgugacgcuguccaagaagcggaagcgccgguuccugggguuccuccugggcguggggagcgcgaucgccuccggcaucgccgucugcaaggugcugcaccucgagggcgaggugaacaagaucaagaacgcccugcuguccaccaacaaggccgucgugagccucuccaacggggugagcguccugaccuucaaggugcuggaccucaagaacuacaucgacaagcagcugcugcccauccugaacaagcagagcugcuccaucagcaacaucgagaccgucaucgaguuccagcagaagaacaaccgccuccuggagaucacgcgggaguucagcgugaacgcgggcgugaccacccccgucuccaccuacaugcugacgaacagcgagcuccugucccugaucaacgacaugccgaucaccaacgaccagaagaagcucaugagcaacaacgugcagaucgugcgccagcaguccuacagcaucaugugcaucaucaaggaggagguccuggccuacguggugcagcugccccucuacggggucaucgacacccccugcuggaagcugcacaccagcccccugugcacgaccaacaccaaggagggcuccaacaucugccucacccggacggaccgcgggugguacugcgacaacgccggcagcguguccuucuucccgcaggccgagaccugcaagguccagagcaaccggguguucugcgacaccaugaacucccugacccugcccagcgaggugaaccucugcaacaucgacaucuucaaccccaaguacgacugcaagaucaugacguccaagaccgacgucagcuccagcgugaucaccucccugggcgccaucgugagcugcuacgggaagaccaagugcacggcgagcaacaagaaccgcggcaucaucaagaccuucuccaacgggugcgacuacgucagcaacaagggcguggacaccguguccgucggcaacacccuguacuacgugaacaagcaggagggcaagagccucuacgugaagggggagcccaucaucaacuucuacgacccgcuggucuuccccuccgacgaguucgacgccagcaucucccaggugaacgagaagaucaaccagagccuggccuucauccggaaguccgacgagcuccugcacaacgugaacgucggcaagagcaccacgaacaucaugaucaccaccaucaucaucgugaucaucgugauccugcugcuccugaucgccgucgggcuguuccucuacugcaaggcccgcuccacccccgugacgcugagcaaggaccagcuguccgggaucaacaacaucgcguucagcaacugaggacuagugaagggaacacccaaauuuaauucagccuuaagcacaauuaauuaagagugaaacguaauuguacaagcaguuggucacccaccauagggcaugaucaacaccgcaaccuuuccuuuuucccccagugauucugaaaaaccccucuucccuucagcuugcuuagauguuccaaauuuaguaagcuuaaggcggccuacagaagaaaaagaaaaaaaaggccacaaaaguucccucucacuuucaguaaauaaaauaaaagcagcaacagaaauaaagaaauaaaugaaauucaaaaugaaauaaauauuguguugugcagcauuaaaaaaucaauaaaaauuaaaaaugagcaagaucuaaaaaaaaaaaaaaaaaaaaaaaaaaaaaaaaaaaaaaaaaaaaaaaaaaaaaaaaaaaaaaaaugcaucccccccccccccccccccccccccccccccaaaggcucuuuucagagccaccagaauu

SEQ ID NO: 12770 - RNA, 2319 nt, Artificial Sequence
  mRNA product Design h-2 comprising derived and/or modified sequence from HRSV(Memphis-37)__AIY60640.1__F0_DSCav1 (opt1)
gggagacccgugacccggaaguuguacggcuacgcgacuuucccucccacaaacccucgcgcccuuccuuuccuacuugggcccggcagaaagcuuaccauggagcugcccauccucaagaccaacgccaucaccacgauccuggccgcggugacccugugcuucgccagcucccagaacaucaccgaggaguucuaccagagcacgugcuccgccgucagcaagggcuaccucuccgcccugcgcaccgggugguacaccagcgugaucaccaucgagcuguccaacaucaaggagaacaagugcaacggcaccgacgccaaggugaagcucaucaagcaggagcuggacaaguacaagaacgcggucacggagcugcagcuccugaugcagagcaccccggccgccaacaaccgggcccgccgggagcugccccgcuucaugaacuacacccucaacaacaccaagaacaacaacgugacgcuguccaagaagcggaagcgccgguuccugggguuccuccugggcguggggagcgcgaucgccuccggcaucgccgucugcaaggugcugcaccucgagggcgaggugaacaagaucaagaacgcccugcugagcaccaacaaggccgucgugucccucagcaacgggguguccguccugaccuucaaggugcuggaccucaagaacuacaucgacaagcagcugcugcccauccucaacaagcagagcugcuccaucagcaacaucgagaccgugaucgaguuccagcagaagaacaaccgccugcuggagaucacgcgggaguucuccgucaacgcgggcgugaccacccccgugagcaccuacaugcucacgaacagcgagcugcugucccucaucaacgacaugccgaucaccaacgaccagaagaagcugaugagcaacaacguccagaucgugcgccagcaguccuacagcaucaugugcaucaucaaggaggaggugcuggccuacgucgugcagcucccccuguacggggugaucgacacccccugcuggaagcugcacaccagcccccucugcacgaccaacaccaaggagggcagcaacaucugccugacccggacggaccgcgggugguacugcgacaacgccggcuccgucagcuucuucccgcaggccgagaccugcaaggugcaguccaaccgggucuucugcgacaccaugaacagccugacccuccccuccgaggugaaccugugcaacaucgacaucuucaaccccaaguacgacugcaagaucaugacgagcaagaccgacguguccagcuccgucaucaccagccugggcgccaucguguccugcuacgggaagaccaagugcacggcgagcaacaagaaccgcggcaucaucaagaccuucuccaacgggugcgacuacgugagcaacaagggcgucgacaccgugagcgugggcaacacccucuacuacgucaacaagcaggaggggaagucccuguacgugaagggcgagcccaucaucaacuucuacgacccgcugguguuccccagcgacgaguucgacgccuccaucagccaggucaacgagaagaucaaccagucccucgccuucauccggaaguccgacgagcugcugcacaacgugaacguggggaaguccaccacgaacaucaugaucaccaccaucaucaucgucaucaucgugauccugcuccugcugaucgccgugggccucuuccuguacugcaaggcccgcagcacccccgucacgcuguccaaggaccagcucagcgggaucaacaacaucgcguucuccaacugaggacuagugaagggaacacccaaauuuaauucagccuuaagcacaauuaauuaagagugaaacguaauuguacaagcaguuggucacccaccauagggcaugaucaacaccgcaaccuuuccuuuuucccccagugauucugaaaaaccccucuucccuucagcuugcuuagauguuccaaauuuaguaagcuuaaggcggccuacagaagaaaaagaaaaaaaaggccacaaaaguucccucucacuuucaguaaauaaaauaaaagcagcaacagaaauaaagaaauaaaugaaauucaaaaugaaauaaauauuguguugugcagcauuaaaaaaucaauaaaaauuaaaaaugagcaagaucuaaaaaaaaaaaaaaaaaaaaaaaaaaaaaaaaaaaaaaaaaaaaaaaaaaaaaaaaaaaaaaaaugcaucccccccccccccccccccccccccccccccaaaggcucuuuucagagccaccagaauu

SEQ ID NO: 12771 - RNA, 2319 nt, Artificial Sequence
  mRNA product Design h-2 comprising derived and/or modified sequence from HRSV(Memphis-37)__AIY60640.1__F0_DSCav1 (opt2)
gggagacccgugacccggaaguuguacggcuacgcgacuuucccucccacaaacccucgcgcccuuccuuuccuacuugggcccggcagaaagcuuaccauggagcuccccauccucaagaccaacgccaucaccaccauccucgccgccgucacccucugcuucgccuccucccagaacaucaccgaggaguucuaccaguccaccugcuccgccgucuccaagggcuaccucuccgcccuccgcaccggcugguacaccuccgucaucaccaucgagcucuccaacaucaaggagaacaagugcaacggcaccgacgccaaggucaagcucaucaagcaggagcucgacaaguacaagaacgccgucaccgagcuccagcuccucaugcaguccacccccgccgccaacaaccgcgcccgccgcgagcucccccgcuucaugaacuacacccucaacaacaccaagaacaacaacgucacccucuccaagaagcgcaagcgccgcuuccucggcuuccuccucggcgucggcuccgccaucgccuccggcaucgccgucugcaagguccuccaccucgagggcgaggucaacaagaucaagaacgcccuccucuccaccaacaaggccgucgucucccucuccaacggcgucuccguccucaccuucaagguccucgaccucaagaacuacaucgacaagcagcuccuccccauccucaacaagcaguccugcuccaucuccaacaucgagaccgucaucgaguuccagcagaagaacaaccgccuccucgagaucacccgcgaguucuccgucaacgccggcgucaccacccccgucuccaccuacaugcucaccaacuccgagcuccucucccucaucaacgacaugcccaucaccaacgaccagaagaagcucauguccaacaacguccagaucguccgccagcaguccuacuccaucaugugcaucaucaaggaggagguccucgccuacgucguccagcucccccucuacggcgucaucgacacccccugcuggaagcuccacaccuccccccucugcaccaccaacaccaaggagggcuccaacaucugccucacccgcaccgaccgcggcugguacugcgacaacgccggcuccgucuccuucuucccccaggccgagaccugcaagguccaguccaaccgcgucuucugcgacaccaugaacucccucacccuccccuccgaggucaaccucugcaacaucgacaucuucaaccccaaguacgacugcaagaucaugaccuccaagaccgacgucuccuccuccgucaucaccucccucggcgccaucgucuccugcuacggcaagaccaagugcaccgccuccaacaagaaccgcggcaucaucaagaccuucuccaacggcugcgacuacgucuccaacaagggcgucgacaccgucuccgucggcaacacccucuacuacgucaacaagcaggagggcaagucccucuacgucaagggcgagcccaucaucaacuucuacgacccccucgucuuccccuccgacgaguucgacgccuccaucucccaggucaacgagaagaucaaccagucccucgccuucauccgcaaguccgacgagcuccuccacaacgucaacgucggcaaguccaccaccaacaucaugaucaccaccaucaucaucgucaucaucgucauccuccuccuccucaucgccgucggccucuuccucuacugcaaggcccgcuccacccccgucacccucuccaaggaccagcucuccggcaucaacaacaucgccuucuccaacugaggacuagugaagggaacacccaaauuuaauucagccuuaagcacaauuaauuaagagugaaacguaauuguacaagcaguuggucacccaccauagggcaugaucaacaccgcaaccuuuccuuuuucccccagugauucugaaaaaccccucuucccuucagcuugcuuagauguuccaaauuuaguaagcuuaaggcggccuacagaagaaaaagaaaaaaaaggccacaaaaguucccucucacuuucaguaaauaaaauaaaagcagcaacagaaauaaagaaauaaaugaaauucaaaaugaaauaaauauuguguugugcagcauuaaaaaaucaauaaaaauuaaaaaugagcaagaucuaaaaaaaaaaaaaaaaaaaaaaaaaaaaaaaaaaaaaaaaaaaaaaaaaaaaaaaaaaaaaaaaugcaucccccccccccccccccccccccccccccccaaaggcucuuuucagagccaccagaauu

SEQ ID NO: 12772 - RNA, 2319 nt, Artificial Sequence
  mRNA product Design h-2 comprising derived and/or modified sequence from HRSV(Memphis-37)__AIY60640.1__F0_DSCav1 (opt3)
gggagacccgugacccggaaguuguacggcuacgcgacuuucccucccacaaacccucgcgcccuuccuuuccuacuugggcccggcagaaagcuuaccauggagcugcccauccucaagaccaacgccauuacaacuauacuugcugcagugacgcugugcuucgccagcucccagaauaucaccgaagaguuuuaccaaucuacauguucagcggucaguaaaggcuauuugagcgcuuuaagaacugggugguacaccuccguuauuacaaucgaacugucuaacauuaaggagaauaaaugcaacggaaccgacgccaaggugaaacuaaucaagcaggaacucgauaaguauaaaaaugcaguaacugagcugcagcuucugaugcagucgaccccugccgcuaacaauagggcacggcgcgaguugccacgauucaugaacuacacacucaauaacacgaagaauaacaaugugacucugagcaaaaagcguaaaagaagguuucuggguuuccucuuaggcgucgggucagccauagcuaguggaaucgccguguguaagguucugcaccuugaaggcgaggugaacaagauuaaaaaugcguugcuguccaccaacaaggcagucgugucucuaagcaacgguguauccguucucacauuuaaagugcuggaccuuaagaauuauaucgauaaacaacuguugccgauucucaacaagcagucaugcaguaucagcaauauagaaacugucauugaguuccagcagaaaaacaaucggcuguuagagaucacccgcgaauuuucugugaacgccggggugacaacccccgucuccacguacaugcugacuaauucagagcuccuuagccugauuaacgacaugccuaucacaaaugaucaaaagaaguugaugaguaacaauguucagaucgugagacagcagucuuauuccauuauguguauaaucaaagaagagguacuagcuuacgugguccaacugccacucuacggagugauugacacccccugcuggaagcugcauacuagcccucuuuguacaaccaacacgaaagaaggcucgaauaucugccugaccaggacagaucggggcugguauugugacaacgccgggucuguuuccuucuuuccacaggcagagacuugcaaggugcagucaaaucgcgucuucugugauaccaugaacaguuugacacuccccagcgaggugaaccugugcaauauagacauuuuuaacccuaaauacgauugcaagaucaugacuuccaagaccgacguaucuagcucaguuaucacaaguuuaggagcuauuguguccuguuaugguaaaaccaagugcacugccagcaauaaaaaccgaggcaucauuaagacguucucuaaugggugugauuacgucucaaacaaaggaguggacacagucagugugggcaauacccuguauuacguuaacaagcaagaagguaagagccuauaugugaaaggggagccaauaaucaauuuuuacgacccgcucguauuccccuccgaugaguucgacgcgucuauuucgcaggucaacgaaaagaucaaucagagccuggccuuuaucagaaaauccgaugaacuuuugcacaacgugaauguuggaaagucaacuaccaacauuaugauaacaaccaucauuaucgugauuaucgucauacugcuccugcuuaucgcagugggccuguucuuguacugcaaagcuaggaguacuccuguaacacucucuaaggaccagcugagcggcauuaauaacaucgccuuuuccaacugaggacuagugaagggaacacccaaauuuaauucagccuuaagcacaauuaauuaagagugaaacguaauuguacaagcaguuggucacccaccauagggcaugaucaacaccgcaaccuuuccuuuuucccccagugauucugaaaaaccccucuucccuucagcuugcuuagauguuccaaauuuaguaagcuuaaggcggccuacagaagaaaaagaaaaaaaaggccacaaaaguucccucucacuuucaguaaauaaaauaaaagcagcaacagaaauaaagaaauaaaugaaauucaaaaugaaauaaauauuguguugugcagcauuaaaaaaucaauaaaaauuaaaaaugagcaagaucuaaaaaaaaaaaaaaaaaaaaaaaaaaaaaaaaaaaaaaaaaaaaaaaaaaaaaaaaaaaaaaaaugcaucccccccccccccccccccccccccccccccaaaggcucuuuucagagccaccagaauu

SEQ ID NO: 12773 - RNA, 2319 nt, Artificial Sequence
  mRNA product Design h-2 comprising derived and/or modified sequence from HRSV(Memphis-37)__AIY60640.1__F0_DSCav1 (opt4)
gggagacccgugacccggaaguuguacggcuacgcgacuuucccucccacaaacccucgcgcccuuccuuuccuacuugggcccggcagaaagcuuaccauggagcugcccauccugaagaccaacgccaucaccaccauccuggccgccgugacccugugcuucgccagcagccagaacaucaccgaggaguucuaccagagcaccugcagcgccgugagcaagggcuaccugagcgcccugagaaccggcugguacaccagcgugaucaccaucgagcugagcaacaucaaggagaacaagugcaacggcaccgacgccaaggugaagcugaucaagcaggagcuggacaaguacaagaacgccgugaccgagcugcagcugcugaugcagagcacccccgccgccaacaacagagccagaagagagcugcccagauucaugaacuacacccugaacaacaccaagaacaacaacgugacccugagcaagaagagaaagagaagauuccugggcuuccugcugggcgugggcagcgccaucgccagcggcaucgccgugugcaaggugcugcaccuggagggcgaggugaacaagaucaagaacgcccugcugagcaccaacaaggccguggugagccugagcaacggcgugagcgugcugaccuucaaggugcuggaccugaagaacuacaucgacaagcagcugcugcccauccugaacaagcagagcugcagcaucagcaacaucgagaccgugaucgaguuccagcagaagaacaacagacugcuggagaucaccagagaguucagcgugaacgccggcgugaccacccccgugagcaccuacaugcugaccaacagcgagcugcugagccugaucaacgacaugcccaucaccaacgaccagaagaagcugaugagcaacaacgugcagaucgugagacagcagagcuacagcaucaugugcaucaucaaggaggaggugcuggccuacguggugcagcugccccuguacggcgugaucgacacccccugcuggaagcugcacaccagcccccugugcaccaccaacaccaaggagggcagcaacaucugccugaccagaaccgacagaggcugguacugcgacaacgccggcagcgugagcuucuucccccaggccgagaccugcaaggugcagagcaacagaguguucugcgacaccaugaacagccugacccugcccagcgaggugaaccugugcaacaucgacaucuucaaccccaaguacgacugcaagaucaugaccagcaagaccgacgugagcagcagcgugaucaccagccugggcgccaucgugagcugcuacggcaagaccaagugcaccgccagcaacaagaacagaggcaucaucaagaccuucagcaacggcugcgacuacgugagcaacaagggcguggacaccgugagcgugggcaacacccuguacuacgugaacaagcaggagggcaagagccuguacgugaagggcgagcccaucaucaacuucuacgacccccugguguuccccagcgacgaguucgacgccagcaucagccaggugaacgagaagaucaaccagagccuggccuucaucagaaagagcgacgagcugcugcacaacgugaacgugggcaagagcaccaccaacaucaugaucaccaccaucaucaucgugaucaucgugauccugcugcugcugaucgccgugggccuguuccuguacugcaaggccagaagcacccccgugacccugagcaaggaccagcugagcggcaucaacaacaucgccuucagcaacugaggacuagugaagggaacacccaaauuuaauucagccuuaagcacaauuaauuaagagugaaacguaauuguacaagcaguuggucacccaccauagggcaugaucaacaccgcaaccuuuccuuuuucccccagugauucugaaaaaccccucuucccuucagcuugcuuagauguuccaaauuuaguaagcuuaaggcggccuacagaagaaaaagaaaaaaaaggccacaaaaguucccucucacuuucaguaaauaaaauaaaagcagcaacagaaauaaagaaauaaaugaaauucaaaaugaaauaaauauuguguugugcagcauuaaaaaaucaauaaaaauuaaaaaugagcaagaucuaaaaaaaaaaaaaaaaaaaaaaaaaaaaaaaaaaaaaaaaaaaaaaaaaaaaaaaaaaaaaaaaugcaucccccccccccccccccccccccccccccccaaaggcucuuuucagagccaccagaauu

SEQ ID NO: 12774 - RNA, 2319 nt, Artificial Sequence
  mRNA product Design h-2 comprising derived and/or modified sequence from HRSV(Memphis-37)__AIY60640.1__F0_DSCav1 (opt5)
gggagacccgugacccggaaguuguacggcuacgcgacuuucccucccacaaacccucgcgcccuuccuuuccuacuugggcccggcagaaagcuuaccauggagcugcccauccucaagaccaacgccauuacaacgauccuggcugccgugacccuuugcuucgcgagcucccagaauauuacagaagaguuuuaccaaucuaccuguagcgcugucuccaaaggcuaucugucugcccucagaacagggugguacaccagcguuaucacaauugaacuguccaacaucaaggagaauaaaugcaacggaaccgacgccaaggugaaacuuaucaagcaggaacuggauaaguauaaaaaugcugugacggagcuccagcugcugaugcagucuaccccugccgcuaacaaucgggcccgcagagagcucccgcgguucaugaacuacacacugaauaacaccaagaauaacaaugucacacuuagcaaaaagcgcaaaagacgguuucugggcuuccuccugggggugggauccgcgauugccagcggcaucgcuguuuguaaggugcuucaccuggaaggggaggucaacaagauuaaaaaugcccuccugucuaccaacaaggcugugguuucccugagcaacggagugucuguccucacguuuaaagugcuggaccuuaagaauuauaucgauaaacaacugcuccccauucugaacaagcaguccugcagcaucucuaauauugaaacagugaucgaguuccagcagaaaaacaaucgccuucuggagaucaccagagaauuuuccgucaacgccggcguuacaaccccugugagcaccuacaugcucacaaauuccgagcugcugucucucauuaacgacaugcccaucacgaaugaucaaaagaagcugaugagcaacaaugugcagauuguccggcagcaguccuauagcaucauguguauuaucaaagaagaggugcuugcguacguugugcaacugccucucuacggcgucaucgacacccccugcuggaagcugcauacaucuccucuuuguaccacaaacaccaaagaaggguccaauauuugccugacgcgcacagauagaggaugguauugugacaacgccggcagcgugucuuucuuuccgcaggcugagaccugcaagguucagagcaaucggguguucugugauaccaugaacucccucacacugcccucugaggucaaccugugcaauaucgacauuuuuaacccuaaauacgauugcaagaucaugaccagcaagacagacguguccagcucugucauuacgucccucggggccaucgugagcuguuauggaaaaaccaagugcacagcuucuaauaaaaaccgcggcaucauuaagaccuucuccaaugggugugauuacguuagcaacaaaggaguggacacagucuccgugggcaauacccuguauuacguuaacaagcaagaaggcaagucucuuuaugugaaaggggagcccaucauuaauuuuuacgacccucuggucuuccccagcgaugaguucgacgccuccaucucucaggugaacgaaaagauuaaucagagccucgccuuuaucagaaaauccgaugaacugcugcacaacgugaauguuggaaagagcacgaccaacauuaugaucacaaccaucauuaucgucauuaucgugauucuucuccugcugaucgcugugggccucuuccuguacugcaaagcgcggucuacaccggucacccuuuccaaggaccagcugagcgggaucaauaacauugccuuuucuaacugaggacuagugaagggaacacccaaauuuaauucagccuuaagcacaauuaauuaagagugaaacguaauuguacaagcaguuggucacccaccauagggcaugaucaacaccgcaaccuuuccuuuuucccccagugauucugaaaaaccccucuucccuucagcuugcuuagauguuccaaauuuaguaagcuuaaggcggccuacagaagaaaaagaaaaaaaaggccacaaaaguucccucucacuuucaguaaauaaaauaaaagcagcaacagaaauaaagaaauaaaugaaauucaaaaugaaauaaauauuguguugugcagcauuaaaaaaucaauaaaaauuaaaaaugagcaagaucuaaaaaaaaaaaaaaaaaaaaaaaaaaaaaaaaaaaaaaaaaaaaaaaaaaaaaaaaaaaaaaaaugcaucccccccccccccccccccccccccccccccaaaggcucuuuucagagccaccagaauu

SEQ ID NO: 12775 - RNA, 2319 nt, Artificial Sequence
  mRNA product Design h-2 comprising derived and/or modified sequence from HRSV(Memphis-37)__AIY60640.1__F0_DSCav1 (opt6)
gggagacccgugacccggaaguuguacggcuacgcgacuuucccucccacaaacccucgcgcccuuccuuuccuacuugggcccggcagaaagcuuaccauggaacucccaauccucaaaaccaaugccauaacaaccauacucgcugcaguaaccuuauguuucgcaaguagccaaaacauaaccgaagaauuuuaucaauccacaugcuccgcaguuucuaaaggauaucuaucagcauuaagaacuggaugguacacaucuguaauaacuauagaacuaagcaauauaaaagaaaacaaauguaacggaacugacgcuaaaguaaaacuuauaaaacaagaacuagauaaauacaaaaacgccguuaccgaacuacaacuauuaaugcaaucaacaccagccgcaaauaacagagcaagacgcgaauuaccaagauucaugaauuacacacuaaacaauacaaaaaauaacaauguaacacuaucaaaaaaaagaaaacgacgauucuuaggcuuccuacuaggagucggcucagcaauagcuuccggaauagccgucuguaaaguccuacaccuugaaggcgaaguaaacaaaaucaaaaacgcacuauuaucaacaaacaaagcagucguaucuuuauccaacggagucucaguccuaacauucaaaguacucgauuuaaaaaacuacaucgauaaacaacuccuucccauucuaaacaaacaauccugcucaauauccaacaucgaaacagucauagaauuucaacaaaaaaacaaccgccugcuagaaauaacaagagaauuuuccguaaaugccggcgucaccacaccaguaucaacauacaugcuaacaaacuccgaacuacucucccuaauaaacgauaugccaaucaccaacgaccaaaaaaaacuaaugucaaauaacguucaaauagucagacaacaaucauacagcauaaugugcauaauaaaagaagaagucuuagccuacguuguacaacucccauuauacggaguuaucgauacaccaugcuggaaauuacacacaucacccuuaugcaccacaaacacaaaagaaggauccaauauuugucuaacacgaacagacagaggaugguacugugauaacgcaggaucagugucauucuuuccacaagcagaaacauguaaaguucaaucuaacagaguauucugcgacaccaugaacucccuaaccuuacccucagaaguaaaucuaugcaacauagauaucuuuaacccaaaauacgacugcaaaaucaugacaucaaaaacugacguuucuucauccguuauaacuucccucggcgcuauaguguccugcuacggaaaaacuaaaugcacagcauccaacaaaaauagaggaauaauaaaaacauuuuccaacggcugcgacuauguuucaaacaaaggaguagauaccguaucagucggcaauacauuauauuauguuaacaaacaagaaggaaaaucccuauacguaaaaggagaaccuauaaucaacuucuacgacccacucguauuccccucagacgaauuugacgcaucuauaucucaaguaaaugaaaaaauaaaccaaucacucgcauuuauccgcaaaucugacgaauuacuccauaacgucaacgucggcaaaucaaccaccaacauaaugauaacaacaauuauaauaguaauaauugucauacuacuacuccuaauagcaguaggucuauuccuauacugcaaagcaagauccacccccguaacccuuuccaaagaucaacucucaggaauaaauaacauagccuuuucaaacuaaggacuagugaagggaacacccaaauuuaauucagccuuaagcacaauuaauuaagagugaaacguaauuguacaagcaguuggucacccaccauagggcaugaucaacaccgcaaccuuuccuuuuucccccagugauucugaaaaaccccucuucccuucagcuugcuuagauguuccaaauuuaguaagcuuaaggcggccuacagaagaaaaagaaaaaaaaggccacaaaaguucccucucacuuucaguaaauaaaauaaaagcagcaacagaaauaaagaaauaaaugaaauucaaaaugaaauaaauauuguguugugcagcauuaaaaaaucaauaaaaauuaaaaaugagcaagaucuaaaaaaaaaaaaaaaaaaaaaaaaaaaaaaaaaaaaaaaaaaaaaaaaaaaaaaaaaaaaaaaaugcaucccccccccccccccccccccccccccccccaaaggcucuuuucagagccaccagaauu

SEQ ID NO: 12776 - RNA, 2319 nt, Artificial Sequence
  mRNA product Design h-2 comprising derived and/or modified sequence from HRSV(Memphis-37)__AIY60640.1__F0_DSCav1 (opt11)
gggagacccgugacccggaaguuguacggcuacgcgacuuucccucccacaaacccucgcgcccuuccuuuccuacuugggcccggcagaaagcuuaccauggaacuccccauacucaagacuaaugccaucaccaccauccucgccgccgugacccucugcuucgcaucgucccaaaacauaacagaagaguucuaccaaagcacaugcuccgcagucuccaaaggauaccucuccgcacuacguaccggcugguacaccagcgucaucaccaucgaacuuuccaacaucaaagagaacaaaugcaacggcaccgacgccaaaguaaaacucauaaaacaagagcuagacaaauacaaaaacgccgucacagaacuccaacuacugaugcaauccacaccggccgccaacaaccgcgcucgacgugaacucccacgcuucaugaacuacacucuuaacaacaccaaaaauaacaacgucacccuauccaaaaagcgaaagcgcagauuccucggcuuccuacuuggcgucggcucggcgauagccucuggaaucgccguuugcaagguccuccaccuagaaggcgaaguaaacaaaaucaaaaacgcacuccuaagcaccaacaaagccgucgucucacuuuccaacggcgucucaguccucacauucaaaguucucgaccuaaagaacuacaucgacaagcaacuacuacccauacucaauaaacaauccugcuccaucagcaacaucgagacagucaucgaauuucaacaaaagaacaaccgccuccucgaaauuacacgcgaguucucagucaacgccggagucaccaccccagucucaacauacaugcucaccaacagcgaacuccugucucuaaucaacgacaugcccaucacuaacgaccagaagaaacucauguccaacaacguccaaaucgugcgacaacaaucauacucuaucaugugcaucaucaaagaagaaguccucgcauacgucguccagcucccacucuacggcguaaucgacacacccugcuggaaacuccacacaucaccccuaugcaccaccaacacaaaagaaggcuccaacaucugccuaacccgaaccgacagagguugguauugcgacaacgccggcucagucucauucuucccacaagccgaaaccuguaaaguccaaucaaaccgcgucuucugcgauaccaugaacucucucacacuccccuccgaagucaaucucugcaacauagacaucuucaauccaaaguacgacugcaaaauaaugaccucgaaaaccgacguaagcuccagcgucaucaccuccuuaggcgcaaucguauccugcuacggcaaaaccaaaugcaccgccucaaacaaaaacagaggcaucaucaaaacguucucgaacggaugcgacuacguuuccaauaaaggcguagauaccgucuccgucggcaacacacucuauuacgucaacaaacaagaaggcaaaucccucuacgucaaaggugaaccuaucaucaacuucuacgacccccucgucuuccccagcgacgaguucgaugccucaaucagccaagucaacgagaaaaucaaccaaucacuggcuuucauacgcaaauccgacgaacuccuccacaacgugaacgucggcaaauccacaaccaacaucaugauaaccacaauaaucaucgucauaaucguaauccuacuccuccuuauugccguaggacuauuccuauacugcaaagcccgauccacccccgucacccucucaaaagaccaacucuccggcaucaacaauauagccuucucuaacuaaggacuagugaagggaacacccaaauuuaauucagccuuaagcacaauuaauuaagagugaaacguaauuguacaagcaguuggucacccaccauagggcaugaucaacaccgcaaccuuuccuuuuucccccagugauucugaaaaaccccucuucccuucagcuugcuuagauguuccaaauuuaguaagcuuaaggcggccuacagaagaaaaagaaaaaaaaggccacaaaaguucccucucacuuucaguaaauaaaauaaaagcagcaacagaaauaaagaaauaaaugaaauucaaaaugaaauaaauauuguguugugcagcauuaaaaaaucaauaaaaauuaaaaaugagcaagaucuaaaaaaaaaaaaaaaaaaaaaaaaaaaaaaaaaaaaaaaaaaaaaaaaaaaaaaaaaaaaaaaaugcaucccccccccccccccccccccccccccccccaaaggcucuuuucagagccaccagaauu

SEQ ID NO: 12777 - RNA, 2099 nt, Artificial Sequence
  mRNA product Design h-3 comprising derived and/or modified sequence from HRSV(Memphis-37)__AIY60640.1__F0_DSCav1 (opt1)
gggagacccgugacccggaaguuguacggcuacgcgacuuucccucccacaaacccucgcgcccuuccuuuccuacuugggcccggcagaaagcuuaccauggagcugcccauccucaagaccaacgccaucaccacgauccuggccgcggugacccugugcuucgccagcucccagaacaucaccgaggaguucuaccagagcacgugcuccgccgucagcaagggcuaccucuccgcccugcgcaccgggugguacaccagcgugaucaccaucgagcuguccaacaucaaggagaacaagugcaacggcaccgacgccaaggugaagcucaucaagcaggagcuggacaaguacaagaacgcggucacggagcugcagcuccugaugcagagcaccccggccgccaacaaccgggcccgccgggagcugccccgcuucaugaacuacacccucaacaacaccaagaacaacaacgugacgcuguccaagaagcggaagcgccgguuccugggguuccuccugggcguggggagcgcgaucgccuccggcaucgccgucugcaaggugcugcaccucgagggcgaggugaacaagaucaagaacgcccugcuguccaccaacaaggccgucgugagccucuccaacggggugagcguccugaccuucaaggugcuggaccucaagaacuacaucgacaagcagcugcugcccauccugaacaagcagagcugcuccaucagcaacaucgagaccgucaucgaguuccagcagaagaacaaccgccuccuggagaucacgcgggaguucagcgugaacgcgggcgugaccacccccgucuccaccuacaugcugacgaacagcgagcuccugucccugaucaacgacaugccgaucaccaacgaccagaagaagcucaugagcaacaacgugcagaucgugcgccagcaguccuacagcaucaugugcaucaucaaggaggagguccuggccuacguggugcagcugccccucuacggggucaucgacacccccugcuggaagcugcacaccagcccccugugcacgaccaacaccaaggagggcuccaacaucugccucacccggacggaccgcgggugguacugcgacaacgccggcagcguguccuucuucccgcaggccgagaccugcaagguccagagcaaccggguguucugcgacaccaugaacucccugacccugcccagcgaggugaaccucugcaacaucgacaucuucaaccccaaguacgacugcaagaucaugacguccaagaccgacgucagcuccagcgugaucaccucccugggcgccaucgugagcugcuacgggaagaccaagugcacggcgagcaacaagaaccgcggcaucaucaagaccuucuccaacgggugcgacuacgucagcaacaagggcguggacaccguguccgucggcaacacccuguacuacgugaacaagcaggagggcaagagccucuacgugaagggggagcccaucaucaacuucuacgacccgcuggucuuccccuccgacgaguucgacgccagcaucucccaggugaacgagaagaucaaccagagccuggccuucauccggaaguccgacgagcuccugcacaacgugaacgucggcaagagcaccacgaacaucaugaucaccaccaucaucaucgugaucaucgugauccugcugcuccugaucgccgucgggcuguuccucuacugcaaggcccgcuccacccccgugacgcugagcaaggaccagcuguccgggaucaacaacaucgcguucagcaacugaggacuaguggaagcauuuuccuggcugauuaaaagaaauuacucagcuauggucaucuguuccuguuagaaggcuaugcagcauauuauauacuaugcgcauguuaugaaaugcauaauaaaaaauuuuaaaaaaucuaaaagaucuaaaaaaaaaaaaaaaaaaaaaaaaaaaaaaaaaaaaaaaaaaaaaaaaaaaaaaaaaaaaaaaaugcaucccccccccccccccccccccccccccccccaaaggcucuuuucagagccaccagaauu

SEQ ID NO: 12778 - RNA, 2099 nt, Artificial Sequence
  mRNA product Design h-3 comprising derived and/or modified sequence from HRSV(Memphis-37)__AIY60640.1__F0_DSCav1 (opt1)
gggagacccgugacccggaaguuguacggcuacgcgacuuucccucccacaaacccucgcgcccuuccuuuccuacuugggcccggcagaaagcuuaccauggagcugcccauccucaagaccaacgccaucaccacgauccuggccgcggugacccugugcuucgccagcucccagaacaucaccgaggaguucuaccagagcacgugcuccgccgucagcaagggcuaccucuccgcccugcgcaccgggugguacaccagcgugaucaccaucgagcuguccaacaucaaggagaacaagugcaacggcaccgacgccaaggugaagcucaucaagcaggagcuggacaaguacaagaacgcggucacggagcugcagcuccugaugcagagcaccccggccgccaacaaccgggcccgccgggagcugccccgcuucaugaacuacacccucaacaacaccaagaacaacaacgugacgcuguccaagaagcggaagcgccgguuccugggguuccuccugggcguggggagcgcgaucgccuccggcaucgccgucugcaaggugcugcaccucgagggcgaggugaacaagaucaagaacgcccugcugagcaccaacaaggccgucgugucccucagcaacgggguguccguccugaccuucaaggugcuggaccucaagaacuacaucgacaagcagcugcugcccauccucaacaagcagagcugcuccaucagcaacaucgagaccgugaucgaguuccagcagaagaacaaccgccugcuggagaucacgcgggaguucuccgucaacgcgggcgugaccacccccgugagcaccuacaugcucacgaacagcgagcugcugucccucaucaacgacaugccgaucaccaacgaccagaagaagcugaugagcaacaacguccagaucgugcgccagcaguccuacagcaucaugugcaucaucaaggaggaggugcuggccuacgucgugcagcucccccuguacggggugaucgacacccccugcuggaagcugcacaccagcccccucugcacgaccaacaccaaggagggcagcaacaucugccugacccggacggaccgcgggugguacugcgacaacgccggcuccgucagcuucuucccgcaggccgagaccugcaaggugcaguccaaccgggucuucugcgacaccaugaacagccugacccuccccuccgaggugaaccugugcaacaucgacaucuucaaccccaaguacgacugcaagaucaugacgagcaagaccgacguguccagcuccgucaucaccagccugggcgccaucguguccugcuacgggaagaccaagugcacggcgagcaacaagaaccgcggcaucaucaagaccuucuccaacgggugcgacuacgugagcaacaagggcgucgacaccgugagcgugggcaacacccucuacuacgucaacaagcaggaggggaagucccuguacgugaagggcgagcccaucaucaacuucuacgacccgcugguguuccccagcgacgaguucgacgccuccaucagccaggucaacgagaagaucaaccagucccucgccuucauccggaaguccgacgagcugcugcacaacgugaacguggggaaguccaccacgaacaucaugaucaccaccaucaucaucgucaucaucgugauccugcuccugcugaucgccgugggccucuuccuguacugcaaggcccgcagcacccccgucacgcuguccaaggaccagcucagcgggaucaacaacaucgcguucuccaacugaggacuaguggaagcauuuuccuggcugauuaaaagaaauuacucagcuauggucaucuguuccuguuagaaggcuaugcagcauauuauauacuaugcgcauguuaugaaaugcauaauaaaaaauuuuaaaaaaucuaaaagaucuaaaaaaaaaaaaaaaaaaaaaaaaaaaaaaaaaaaaaaaaaaaaaaaaaaaaaaaaaaaaaaaaugcaucccccccccccccccccccccccccccccccaaaggcucuuuucagagccaccagaauu

SEQ ID NO: 12779 - RNA, 2099 nt, Artificial Sequence
  mRNA product Design h-3 comprising derived and/or modified sequence from HRSV(Memphis-37)__AIY60640.1__F0_DSCav1 (opt2)
gggagacccgugacccggaaguuguacggcuacgcgacuuucccucccacaaacccucgcgcccuuccuuuccuacuugggcccggcagaaagcuuaccauggagcuccccauccucaagaccaacgccaucaccaccauccucgccgccgucacccucugcuucgccuccucccagaacaucaccgaggaguucuaccaguccaccugcuccgccgucuccaagggcuaccucuccgcccuccgcaccggcugguacaccuccgucaucaccaucgagcucuccaacaucaaggagaacaagugcaacggcaccgacgccaaggucaagcucaucaagcaggagcucgacaaguacaagaacgccgucaccgagcuccagcuccucaugcaguccacccccgccgccaacaaccgcgcccgccgcgagcucccccgcuucaugaacuacacccucaacaacaccaagaacaacaacgucacccucuccaagaagcgcaagcgccgcuuccucggcuuccuccucggcgucggcuccgccaucgccuccggcaucgccgucugcaagguccuccaccucgagggcgaggucaacaagaucaagaacgcccuccucuccaccaacaaggccgucgucucccucuccaacggcgucuccguccucaccuucaagguccucgaccucaagaacuacaucgacaagcagcuccuccccauccucaacaagcaguccugcuccaucuccaacaucgagaccgucaucgaguuccagcagaagaacaaccgccuccucgagaucacccgcgaguucuccgucaacgccggcgucaccacccccgucuccaccuacaugcucaccaacuccgagcuccucucccucaucaacgacaugcccaucaccaacgaccagaagaagcucauguccaacaacguccagaucguccgccagcaguccuacuccaucaugugcaucaucaaggaggagguccucgccuacgucguccagcucccccucuacggcgucaucgacacccccugcuggaagcuccacaccuccccccucugcaccaccaacaccaaggagggcuccaacaucugccucacccgcaccgaccgcggcugguacugcgacaacgccggcuccgucuccuucuucccccaggccgagaccugcaagguccaguccaaccgcgucuucugcgacaccaugaacucccucacccuccccuccgaggucaaccucugcaacaucgacaucuucaaccccaaguacgacugcaagaucaugaccuccaagaccgacgucuccuccuccgucaucaccucccucggcgccaucgucuccugcuacggcaagaccaagugcaccgccuccaacaagaaccgcggcaucaucaagaccuucuccaacggcugcgacuacgucuccaacaagggcgucgacaccgucuccgucggcaacacccucuacuacgucaacaagcaggagggcaagucccucuacgucaagggcgagcccaucaucaacuucuacgacccccucgucuuccccuccgacgaguucgacgccuccaucucccaggucaacgagaagaucaaccagucccucgccuucauccgcaaguccgacgagcuccuccacaacgucaacgucggcaaguccaccaccaacaucaugaucaccaccaucaucaucgucaucaucgucauccuccuccuccucaucgccgucggccucuuccucuacugcaaggcccgcuccacccccgucacccucuccaaggaccagcucuccggcaucaacaacaucgccuucuccaacugaggacuaguggaagcauuuuccuggcugauuaaaagaaauuacucagcuauggucaucuguuccuguuagaaggcuaugcagcauauuauauacuaugcgcauguuaugaaaugcauaauaaaaaauuuuaaaaaaucuaaaagaucuaaaaaaaaaaaaaaaaaaaaaaaaaaaaaaaaaaaaaaaaaaaaaaaaaaaaaaaaaaaaaaaaugcaucccccccccccccccccccccccccccccccaaaggcucuuuucagagccaccagaauu

SEQ ID NO: 12780 - RNA, 2099 nt, Artificial Sequence
  mRNA product Design h-3 comprising derived and/or modified sequence from HRSV(Memphis-37)__AIY60640.1__F0_DSCav1 (opt3)
gggagacccgugacccggaaguuguacggcuacgcgacuuucccucccacaaacccucgcgcccuuccuuuccuacuugggcccggcagaaagcuuaccauggagcugcccauccucaagaccaacgccauuacaacuauacuugcugcagugacgcugugcuucgccagcucccagaauaucaccgaagaguuuuaccaaucuacauguucagcggucaguaaaggcuauuugagcgcuuuaagaacugggugguacaccuccguuauuacaaucgaacugucuaacauuaaggagaauaaaugcaacggaaccgacgccaaggugaaacuaaucaagcaggaacucgauaaguauaaaaaugcaguaacugagcugcagcuucugaugcagucgaccccugccgcuaacaauagggcacggcgcgaguugccacgauucaugaacuacacacucaauaacacgaagaauaacaaugugacucugagcaaaaagcguaaaagaagguuucuggguuuccucuuaggcgucgggucagccauagcuaguggaaucgccguguguaagguucugcaccuugaaggcgaggugaacaagauuaaaaaugcguugcuguccaccaacaaggcagucgugucucuaagcaacgguguauccguucucacauuuaaagugcuggaccuuaagaauuauaucgauaaacaacuguugccgauucucaacaagcagucaugcaguaucagcaauauagaaacugucauugaguuccagcagaaaaacaaucggcuguuagagaucacccgcgaauuuucugugaacgccggggugacaacccccgucuccacguacaugcugacuaauucagagcuccuuagccugauuaacgacaugccuaucacaaaugaucaaaagaaguugaugaguaacaauguucagaucgugagacagcagucuuauuccauuauguguauaaucaaagaagagguacuagcuuacgugguccaacugccacucuacggagugauugacacccccugcuggaagcugcauacuagcccucuuuguacaaccaacacgaaagaaggcucgaauaucugccugaccaggacagaucggggcugguauugugacaacgccgggucuguuuccuucuuuccacaggcagagacuugcaaggugcagucaaaucgcgucuucugugauaccaugaacaguuugacacuccccagcgaggugaaccugugcaauauagacauuuuuaacccuaaauacgauugcaagaucaugacuuccaagaccgacguaucuagcucaguuaucacaaguuuaggagcuauuguguccuguuaugguaaaaccaagugcacugccagcaauaaaaaccgaggcaucauuaagacguucucuaaugggugugauuacgucucaaacaaaggaguggacacagucagugugggcaauacccuguauuacguuaacaagcaagaagguaagagccuauaugugaaaggggagccaauaaucaauuuuuacgacccgcucguauuccccuccgaugaguucgacgcgucuauuucgcaggucaacgaaaagaucaaucagagccuggccuuuaucagaaaauccgaugaacuuuugcacaacgugaauguuggaaagucaacuaccaacauuaugauaacaaccaucauuaucgugauuaucgucauacugcuccugcuuaucgcagugggccuguucuuguacugcaaagcuaggaguacuccuguaacacucucuaaggaccagcugagcggcauuaauaacaucgccuuuuccaacugaggacuaguggaagcauuuuccuggcugauuaaaagaaauuacucagcuauggucaucuguuccuguuagaaggcuaugcagcauauuauauacuaugcgcauguuaugaaaugcauaauaaaaaauuuuaaaaaaucuaaaagaucuaaaaaaaaaaaaaaaaaaaaaaaaaaaaaaaaaaaaaaaaaaaaaaaaaaaaaaaaaaaaaaaaugcaucccccccccccccccccccccccccccccccaaaggcucuuuucagagccaccagaauu

SEQ ID NO: 12781 - RNA, 2099 nt, Artificial Sequence
  mRNA product Design h-3 comprising derived and/or modified sequence from HRSV(Memphis-37)__AIY60640.1__F0_DSCav1 (opt4)
gggagacccgugacccggaaguuguacggcuacgcgacuuucccucccacaaacccucgcgcccuuccuuuccuacuugggcccggcagaaagcuuaccauggagcugcccauccugaagaccaacgccaucaccaccauccuggccgccgugacccugugcuucgccagcagccagaacaucaccgaggaguucuaccagagcaccugcagcgccgugagcaagggcuaccugagcgcccugagaaccggcugguacaccagcgugaucaccaucgagcugagcaacaucaaggagaacaagugcaacggcaccgacgccaaggugaagcugaucaagcaggagcuggacaaguacaagaacgccgugaccgagcugcagcugcugaugcagagcacccccgccgccaacaacagagccagaagagagcugcccagauucaugaacuacacccugaacaacaccaagaacaacaacgugacccugagcaagaagagaaagagaagauuccugggcuuccugcugggcgugggcagcgccaucgccagcggcaucgccgugugcaaggugcugcaccuggagggcgaggugaacaagaucaagaacgcccugcugagcaccaacaaggccguggugagccugagcaacggcgugagcgugcugaccuucaaggugcuggaccugaagaacuacaucgacaagcagcugcugcccauccugaacaagcagagcugcagcaucagcaacaucgagaccgugaucgaguuccagcagaagaacaacagacugcuggagaucaccagagaguucagcgugaacgccggcgugaccacccccgugagcaccuacaugcugaccaacagcgagcugcugagccugaucaacgacaugcccaucaccaacgaccagaagaagcugaugagcaacaacgugcagaucgugagacagcagagcuacagcaucaugugcaucaucaaggaggaggugcuggccuacguggugcagcugccccuguacggcgugaucgacacccccugcuggaagcugcacaccagcccccugugcaccaccaacaccaaggagggcagcaacaucugccugaccagaaccgacagaggcugguacugcgacaacgccggcagcgugagcuucuucccccaggccgagaccugcaaggugcagagcaacagaguguucugcgacaccaugaacagccugacccugcccagcgaggugaaccugugcaacaucgacaucuucaaccccaaguacgacugcaagaucaugaccagcaagaccgacgugagcagcagcgugaucaccagccugggcgccaucgugagcugcuacggcaagaccaagugcaccgccagcaacaagaacagaggcaucaucaagaccuucagcaacggcugcgacuacgugagcaacaagggcguggacaccgugagcgugggcaacacccuguacuacgugaacaagcaggagggcaagagccuguacgugaagggcgagcccaucaucaacuucuacgacccccugguguuccccagcgacgaguucgacgccagcaucagccaggugaacgagaagaucaaccagagccuggccuucaucagaaagagcgacgagcugcugcacaacgugaacgugggcaagagcaccaccaacaucaugaucaccaccaucaucaucgugaucaucgugauccugcugcugcugaucgccgugggccuguuccuguacugcaaggccagaagcacccccgugacccugagcaaggaccagcugagcggcaucaacaacaucgccuucagcaacugaggacuaguggaagcauuuuccuggcugauuaaaagaaauuacucagcuauggucaucuguuccuguuagaaggcuaugcagcauauuauauacuaugcgcauguuaugaaaugcauaauaaaaaauuuuaaaaaaucuaaaagaucuaaaaaaaaaaaaaaaaaaaaaaaaaaaaaaaaaaaaaaaaaaaaaaaaaaaaaaaaaaaaaaaaugcaucccccccccccccccccccccccccccccccaaaggcucuuuucagagccaccagaauu

SEQ ID NO: 12782 - RNA, 2099 nt, Artificial Sequence
  mRNA product Design h-3 comprising derived and/or modified sequence from HRSV(Memphis-37)__AIY60640.1__F0_DSCav1 (opt5)
gggagacccgugacccggaaguuguacggcuacgcgacuuucccucccacaaacccucgcgcccuuccuuuccuacuugggcccggcagaaagcuuaccauggagcugcccauccucaagaccaacgccauuacaacgauccuggcugccgugacccuuugcuucgcgagcucccagaauauuacagaagaguuuuaccaaucuaccuguagcgcugucuccaaaggcuaucugucugcccucagaacagggugguacaccagcguuaucacaauugaacuguccaacaucaaggagaauaaaugcaacggaaccgacgccaaggugaaacuuaucaagcaggaacuggauaaguauaaaaaugcugugacggagcuccagcugcugaugcagucuaccccugccgcuaacaaucgggcccgcagagagcucccgcgguucaugaacuacacacugaauaacaccaagaauaacaaugucacacuuagcaaaaagcgcaaaagacgguuucugggcuuccuccugggggugggauccgcgauugccagcggcaucgcuguuuguaaggugcuucaccuggaaggggaggucaacaagauuaaaaaugcccuccugucuaccaacaaggcugugguuucccugagcaacggagugucuguccucacguuuaaagugcuggaccuuaagaauuauaucgauaaacaacugcuccccauucugaacaagcaguccugcagcaucucuaauauugaaacagugaucgaguuccagcagaaaaacaaucgccuucuggagaucaccagagaauuuuccgucaacgccggcguuacaaccccugugagcaccuacaugcucacaaauuccgagcugcugucucucauuaacgacaugcccaucacgaaugaucaaaagaagcugaugagcaacaaugugcagauuguccggcagcaguccuauagcaucauguguauuaucaaagaagaggugcuugcguacguugugcaacugccucucuacggcgucaucgacacccccugcuggaagcugcauacaucuccucuuuguaccacaaacaccaaagaaggguccaauauuugccugacgcgcacagauagaggaugguauugugacaacgccggcagcgugucuuucuuuccgcaggcugagaccugcaagguucagagcaaucggguguucugugauaccaugaacucccucacacugcccucugaggucaaccugugcaauaucgacauuuuuaacccuaaauacgauugcaagaucaugaccagcaagacagacguguccagcucugucauuacgucccucggggccaucgugagcuguuauggaaaaaccaagugcacagcuucuaauaaaaaccgcggcaucauuaagaccuucuccaaugggugugauuacguuagcaacaaaggaguggacacagucuccgugggcaauacccuguauuacguuaacaagcaagaaggcaagucucuuuaugugaaaggggagcccaucauuaauuuuuacgacccucuggucuuccccagcgaugaguucgacgccuccaucucucaggugaacgaaaagauuaaucagagccucgccuuuaucagaaaauccgaugaacugcugcacaacgugaauguuggaaagagcacgaccaacauuaugaucacaaccaucauuaucgucauuaucgugauucuucuccugcugaucgcugugggccucuuccuguacugcaaagcgcggucuacaccggucacccuuuccaaggaccagcugagcgggaucaauaacauugccuuuucuaacugaggacuaguggaagcauuuuccuggcugauuaaaagaaauuacucagcuauggucaucuguuccuguuagaaggcuaugcagcauauuauauacuaugcgcauguuaugaaaugcauaauaaaaaauuuuaaaaaaucuaaaagaucuaaaaaaaaaaaaaaaaaaaaaaaaaaaaaaaaaaaaaaaaaaaaaaaaaaaaaaaaaaaaaaaaugcaucccccccccccccccccccccccccccccccaaaggcucuuuucagagccaccagaauu

SEQ ID NO: 12783 - RNA, 2099 nt, Artificial Sequence
  mRNA product Design h-3 comprising derived and/or modified sequence from HRSV(Memphis-37)__AIY60640.1__F0_DSCav1 (opt6)
gggagacccgugacccggaaguuguacggcuacgcgacuuucccucccacaaacccucgcgcccuuccuuuccuacuugggcccggcagaaagcuuaccauggaacucccaauccucaaaaccaaugccauaacaaccauacucgcugcaguaaccuuauguuucgcaaguagccaaaacauaaccgaagaauuuuaucaauccacaugcuccgcaguuucuaaaggauaucuaucagcauuaagaacuggaugguacacaucuguaauaacuauagaacuaagcaauauaaaagaaaacaaauguaacggaacugacgcuaaaguaaaacuuauaaaacaagaacuagauaaauacaaaaacgccguuaccgaacuacaacuauuaaugcaaucaacaccagccgcaaauaacagagcaagacgcgaauuaccaagauucaugaauuacacacuaaacaauacaaaaaauaacaauguaacacuaucaaaaaaaagaaaacgacgauucuuaggcuuccuacuaggagucggcucagcaauagcuuccggaauagccgucuguaaaguccuacaccuugaaggcgaaguaaacaaaaucaaaaacgcacuauuaucaacaaacaaagcagucguaucuuuauccaacggagucucaguccuaacauucaaaguacucgauuuaaaaaacuacaucgauaaacaacuccuucccauucuaaacaaacaauccugcucaauauccaacaucgaaacagucauagaauuucaacaaaaaaacaaccgccugcuagaaauaacaagagaauuuuccguaaaugccggcgucaccacaccaguaucaacauacaugcuaacaaacuccgaacuacucucccuaauaaacgauaugccaaucaccaacgaccaaaaaaaacuaaugucaaauaacguucaaauagucagacaacaaucauacagcauaaugugcauaauaaaagaagaagucuuagccuacguuguacaacucccauuauacggaguuaucgauacaccaugcuggaaauuacacacaucacccuuaugcaccacaaacacaaaagaaggauccaauauuugucuaacacgaacagacagaggaugguacugugauaacgcaggaucagugucauucuuuccacaagcagaaacauguaaaguucaaucuaacagaguauucugcgacaccaugaacucccuaaccuuacccucagaaguaaaucuaugcaacauagauaucuuuaacccaaaauacgacugcaaaaucaugacaucaaaaacugacguuucuucauccguuauaacuucccucggcgcuauaguguccugcuacggaaaaacuaaaugcacagcauccaacaaaaauagaggaauaauaaaaacauuuuccaacggcugcgacuauguuucaaacaaaggaguagauaccguaucagucggcaauacauuauauuauguuaacaaacaagaaggaaaaucccuauacguaaaaggagaaccuauaaucaacuucuacgacccacucguauuccccucagacgaauuugacgcaucuauaucucaaguaaaugaaaaaauaaaccaaucacucgcauuuauccgcaaaucugacgaauuacuccauaacgucaacgucggcaaaucaaccaccaacauaaugauaacaacaauuauaauaguaauaauugucauacuacuacuccuaauagcaguaggucuauuccuauacugcaaagcaagauccacccccguaacccuuuccaaagaucaacucucaggaauaaauaacauagccuuuucaaacuaaggacuaguggaagcauuuuccuggcugauuaaaagaaauuacucagcuauggucaucuguuccuguuagaaggcuaugcagcauauuauauacuaugcgcauguuaugaaaugcauaauaaaaaauuuuaaaaaaucuaaaagaucuaaaaaaaaaaaaaaaaaaaaaaaaaaaaaaaaaaaaaaaaaaaaaaaaaaaaaaaaaaaaaaaaugcaucccccccccccccccccccccccccccccccaaaggcucuuuucagagccaccagaauu

SEQ ID NO: 12784 - RNA, 2099 nt, Artificial Sequence
  mRNA product Design h-3 comprising derived and/or modified sequence from HRSV(Memphis-37)__AIY60640.1__F0_DSCav1 (opt11)
gggagacccgugacccggaaguuguacggcuacgcgacuuucccucccacaaacccucgcgcccuuccuuuccuacuugggcccggcagaaagcuuaccauggaacuccccauacucaagacuaaugccaucaccaccauccucgccgccgugacccucugcuucgcaucgucccaaaacauaacagaagaguucuaccaaagcacaugcuccgcagucuccaaaggauaccucuccgcacuacguaccggcugguacaccagcgucaucaccaucgaacuuuccaacaucaaagagaacaaaugcaacggcaccgacgccaaaguaaaacucauaaaacaagagcuagacaaauacaaaaacgccgucacagaacuccaacuacugaugcaauccacaccggccgccaacaaccgcgcucgacgugaacucccacgcuucaugaacuacacucuuaacaacaccaaaaauaacaacgucacccuauccaaaaagcgaaagcgcagauuccucggcuuccuacuuggcgucggcucggcgauagccucuggaaucgccguuugcaagguccuccaccuagaaggcgaaguaaacaaaaucaaaaacgcacuccuaagcaccaacaaagccgucgucucacuuuccaacggcgucucaguccucacauucaaaguucucgaccuaaagaacuacaucgacaagcaacuacuacccauacucaauaaacaauccugcuccaucagcaacaucgagacagucaucgaauuucaacaaaagaacaaccgccuccucgaaauuacacgcgaguucucagucaacgccggagucaccaccccagucucaacauacaugcucaccaacagcgaacuccugucucuaaucaacgacaugcccaucacuaacgaccagaagaaacucauguccaacaacguccaaaucgugcgacaacaaucauacucuaucaugugcaucaucaaagaagaaguccucgcauacgucguccagcucccacucuacggcguaaucgacacacccugcuggaaacuccacacaucaccccuaugcaccaccaacacaaaagaaggcuccaacaucugccuaacccgaaccgacagagguugguauugcgacaacgccggcucagucucauucuucccacaagccgaaaccuguaaaguccaaucaaaccgcgucuucugcgauaccaugaacucucucacacuccccuccgaagucaaucucugcaacauagacaucuucaauccaaaguacgacugcaaaauaaugaccucgaaaaccgacguaagcuccagcgucaucaccuccuuaggcgcaaucguauccugcuacggcaaaaccaaaugcaccgccucaaacaaaaacagaggcaucaucaaaacguucucgaacggaugcgacuacguuuccaauaaaggcguagauaccgucuccgucggcaacacacucuauuacgucaacaaacaagaaggcaaaucccucuacgucaaaggugaaccuaucaucaacuucuacgacccccucgucuuccccagcgacgaguucgaugccucaaucagccaagucaacgagaaaaucaaccaaucacuggcuuucauacgcaaauccgacgaacuccuccacaacgugaacgucggcaaauccacaaccaacaucaugauaaccacaauaaucaucgucauaaucguaauccuacuccuccuuauugccguaggacuauuccuauacugcaaagcccgauccacccccgucacccucucaaaagaccaacucuccggcaucaacaauauagccuucucuaacuaaggacuaguggaagcauuuuccuggcugauuaaaagaaauuacucagcuauggucaucuguuccuguuagaaggcuaugcagcauauuauauacuaugcgcauguuaugaaaugcauaauaaaaaauuuuaaaaaaucuaaaagaucuaaaaaaaaaaaaaaaaaaaaaaaaaaaaaaaaaaaaaaaaaaaaaaaaaaaaaaaaaaaaaaaaugcaucccccccccccccccccccccccccccccccaaaggcucuuuucagagccaccagaauu

SEQ ID NO: 12785 - RNA, 2162 nt, Artificial Sequence
  mRNA product Design h-4 comprising derived and/or modified sequence from HRSV(Memphis-37)__AIY60640.1__F0_DSCav1 (opt1)
gggagagggcgcuuggcuugcaaggacccugagcugcggcauugaagcacacccaacccaacucgacugaagucagccucacugaaccggaucugagaaucuucucucucugggcuugccagggcucuccgaaccuagcuagcauccucuucaauuccaacuagaaagcuuaccauggagcugcccauccucaagaccaacgccaucaccacgauccuggccgcggugacccugugcuucgccagcucccagaacaucaccgaggaguucuaccagagcacgugcuccgccgucagcaagggcuaccucuccgcccugcgcaccgggugguacaccagcgugaucaccaucgagcuguccaacaucaaggagaacaagugcaacggcaccgacgccaaggugaagcucaucaagcaggagcuggacaaguacaagaacgcggucacggagcugcagcuccugaugcagagcaccccggccgccaacaaccgggcccgccgggagcugccccgcuucaugaacuacacccucaacaacaccaagaacaacaacgugacgcuguccaagaagcggaagcgccgguuccugggguuccuccugggcguggggagcgcgaucgccuccggcaucgccgucugcaaggugcugcaccucgagggcgaggugaacaagaucaagaacgcccugcuguccaccaacaaggccgucgugagccucuccaacggggugagcguccugaccuucaaggugcuggaccucaagaacuacaucgacaagcagcugcugcccauccugaacaagcagagcugcuccaucagcaacaucgagaccgucaucgaguuccagcagaagaacaaccgccuccuggagaucacgcgggaguucagcgugaacgcgggcgugaccacccccgucuccaccuacaugcugacgaacagcgagcuccugucccugaucaacgacaugccgaucaccaacgaccagaagaagcucaugagcaacaacgugcagaucgugcgccagcaguccuacagcaucaugugcaucaucaaggaggagguccuggccuacguggugcagcugccccucuacggggucaucgacacccccugcuggaagcugcacaccagcccccugugcacgaccaacaccaaggagggcuccaacaucugccucacccggacggaccgcgggugguacugcgacaacgccggcagcguguccuucuucccgcaggccgagaccugcaagguccagagcaaccggguguucugcgacaccaugaacucccugacccugcccagcgaggugaaccucugcaacaucgacaucuucaaccccaaguacgacugcaagaucaugacguccaagaccgacgucagcuccagcgugaucaccucccugggcgccaucgugagcugcuacgggaagaccaagugcacggcgagcaacaagaaccgcggcaucaucaagaccuucuccaacgggugcgacuacgucagcaacaagggcguggacaccguguccgucggcaacacccuguacuacgugaacaagcaggagggcaagagccucuacgugaagggggagcccaucaucaacuucuacgacccgcuggucuuccccuccgacgaguucgacgccagcaucucccaggugaacgagaagaucaaccagagccuggccuucauccggaaguccgacgagcuccugcacaacgugaacgucggcaagagcaccacgaacaucaugaucaccaccaucaucaucgugaucaucgugauccugcugcuccugaucgccgucgggcuguuccucuacugcaaggcccgcuccacccccgugacgcugagcaaggaccagcuguccgggaucaacaacaucgcguucagcaacugaggacuaguaauaaggaaacuguaugaaugucugugggcaggaagugaagagauccuucuguaaagguuuuuggaauuaugucugcugaauaauaaacuuuuuugaaauaauaaaucugguagaaaaaugagaucuaaaaaaaaaaaaaaaaaaaaaaaaaaaaaaaaaaaaaaaaaaaaaaaaaaaaaaaaaaaaaaaaugcaucccccccccccccccccccccccccccccccaaaggcucuuuucagagccaccagaauu

SEQ ID NO: 12786 - RNA, 2162 nt, Artificial Sequence
  mRNA product Design h-4 comprising derived and/or modified sequence from HRSV(Memphis-37)__AIY60640.1__F0_DSCav1 (opt1)
gggagagggcgcuuggcuugcaaggacccugagcugcggcauugaagcacacccaacccaacucgacugaagucagccucacugaaccggaucugagaaucuucucucucugggcuugccagggcucuccgaaccuagcuagcauccucuucaauuccaacuagaaagcuuaccauggagcugcccauccucaagaccaacgccaucaccacgauccuggccgcggugacccugugcuucgccagcucccagaacaucaccgaggaguucuaccagagcacgugcuccgccgucagcaagggcuaccucuccgcccugcgcaccgggugguacaccagcgugaucaccaucgagcuguccaacaucaaggagaacaagugcaacggcaccgacgccaaggugaagcucaucaagcaggagcuggacaaguacaagaacgcggucacggagcugcagcuccugaugcagagcaccccggccgccaacaaccgggcccgccgggagcugccccgcuucaugaacuacacccucaacaacaccaagaacaacaacgugacgcuguccaagaagcggaagcgccgguuccugggguuccuccugggcguggggagcgcgaucgccuccggcaucgccgucugcaaggugcugcaccucgagggcgaggugaacaagaucaagaacgcccugcugagcaccaacaaggccgucgugucccucagcaacgggguguccguccugaccuucaaggugcuggaccucaagaacuacaucgacaagcagcugcugcccauccucaacaagcagagcugcuccaucagcaacaucgagaccgugaucgaguuccagcagaagaacaaccgccugcuggagaucacgcgggaguucuccgucaacgcgggcgugaccacccccgugagcaccuacaugcucacgaacagcgagcugcugucccucaucaacgacaugccgaucaccaacgaccagaagaagcugaugagcaacaacguccagaucgugcgccagcaguccuacagcaucaugugcaucaucaaggaggaggugcuggccuacgucgugcagcucccccuguacggggugaucgacacccccugcuggaagcugcacaccagcccccucugcacgaccaacaccaaggagggcagcaacaucugccugacccggacggaccgcgggugguacugcgacaacgccggcuccgucagcuucuucccgcaggccgagaccugcaaggugcaguccaaccgggucuucugcgacaccaugaacagccugacccuccccuccgaggugaaccugugcaacaucgacaucuucaaccccaaguacgacugcaagaucaugacgagcaagaccgacguguccagcuccgucaucaccagccugggcgccaucguguccugcuacgggaagaccaagugcacggcgagcaacaagaaccgcggcaucaucaagaccuucuccaacgggugcgacuacgugagcaacaagggcgucgacaccgugagcgugggcaacacccucuacuacgucaacaagcaggaggggaagucccuguacgugaagggcgagcccaucaucaacuucuacgacccgcugguguuccccagcgacgaguucgacgccuccaucagccaggucaacgagaagaucaaccagucccucgccuucauccggaaguccgacgagcugcugcacaacgugaacguggggaaguccaccacgaacaucaugaucaccaccaucaucaucgucaucaucgugauccugcuccugcugaucgccgugggccucuuccuguacugcaaggcccgcagcacccccgucacgcuguccaaggaccagcucagcgggaucaacaacaucgcguucuccaacugaggacuaguaauaaggaaacuguaugaaugucugugggcaggaagugaagagauccuucuguaaagguuuuuggaauuaugucugcugaauaauaaacuuuuuugaaauaauaaaucugguagaaaaaugagaucuaaaaaaaaaaaaaaaaaaaaaaaaaaaaaaaaaaaaaaaaaaaaaaaaaaaaaaaaaaaaaaaaugcaucccccccccccccccccccccccccccccccaaaggcucuuuucagagccaccagaauu

SEQ ID NO: 12787 - RNA, 2162 nt, Artificial Sequence
  mRNA product Design h-4 comprising derived and/or modified sequence from HRSV(Memphis-37)__AIY60640.1__F0_DSCav1 (opt2)
gggagagggcgcuuggcuugcaaggacccugagcugcggcauugaagcacacccaacccaacucgacugaagucagccucacugaaccggaucugagaaucuucucucucugggcuugccagggcucuccgaaccuagcuagcauccucuucaauuccaacuagaaagcuuaccauggagcuccccauccucaagaccaacgccaucaccaccauccucgccgccgucacccucugcuucgccuccucccagaacaucaccgaggaguucuaccaguccaccugcuccgccgucuccaagggcuaccucuccgcccuccgcaccggcugguacaccuccgucaucaccaucgagcucuccaacaucaaggagaacaagugcaacggcaccgacgccaaggucaagcucaucaagcaggagcucgacaaguacaagaacgccgucaccgagcuccagcuccucaugcaguccacccccgccgccaacaaccgcgcccgccgcgagcucccccgcuucaugaacuacacccucaacaacaccaagaacaacaacgucacccucuccaagaagcgcaagcgccgcuuccucggcuuccuccucggcgucggcuccgccaucgccuccggcaucgccgucugcaagguccuccaccucgagggcgaggucaacaagaucaagaacgcccuccucuccaccaacaaggccgucgucucccucuccaacggcgucuccguccucaccuucaagguccucgaccucaagaacuacaucgacaagcagcuccuccccauccucaacaagcaguccugcuccaucuccaacaucgagaccgucaucgaguuccagcagaagaacaaccgccuccucgagaucacccgcgaguucuccgucaacgccggcgucaccacccccgucuccaccuacaugcucaccaacuccgagcuccucucccucaucaacgacaugcccaucaccaacgaccagaagaagcucauguccaacaacguccagaucguccgccagcaguccuacuccaucaugugcaucaucaaggaggagguccucgccuacgucguccagcucccccucuacggcgucaucgacacccccugcuggaagcuccacaccuccccccucugcaccaccaacaccaaggagggcuccaacaucugccucacccgcaccgaccgcggcugguacugcgacaacgccggcuccgucuccuucuucccccaggccgagaccugcaagguccaguccaaccgcgucuucugcgacaccaugaacucccucacccuccccuccgaggucaaccucugcaacaucgacaucuucaaccccaaguacgacugcaagaucaugaccuccaagaccgacgucuccuccuccgucaucaccucccucggcgccaucgucuccugcuacggcaagaccaagugcaccgccuccaacaagaaccgcggcaucaucaagaccuucuccaacggcugcgacuacgucuccaacaagggcgucgacaccgucuccgucggcaacacccucuacuacgucaacaagcaggagggcaagucccucuacgucaagggcgagcccaucaucaacuucuacgacccccucgucuuccccuccgacgaguucgacgccuccaucucccaggucaacgagaagaucaaccagucccucgccuucauccgcaaguccgacgagcuccuccacaacgucaacgucggcaaguccaccaccaacaucaugaucaccaccaucaucaucgucaucaucgucauccuccuccuccucaucgccgucggccucuuccucuacugcaaggcccgcuccacccccgucacccucuccaaggaccagcucuccggcaucaacaacaucgccuucuccaacugaggacuaguaauaaggaaacuguaugaaugucugugggcaggaagugaagagauccuucuguaaagguuuuuggaauuaugucugcugaauaauaaacuuuuuugaaauaauaaaucugguagaaaaaugagaucuaaaaaaaaaaaaaaaaaaaaaaaaaaaaaaaaaaaaaaaaaaaaaaaaaaaaaaaaaaaaaaaaugcaucccccccccccccccccccccccccccccccaaaggcucuuuucagagccaccagaauu

SEQ ID NO: 12788 - RNA, 2162 nt, Artificial Sequence
  mRNA product Design h-4 comprising derived and/or modified sequence from HRSV(Memphis-37)__AIY60640.1__F0_DSCav1 (opt3)
gggagagggcgcuuggcuugcaaggacccugagcugcggcauugaagcacacccaacccaacucgacugaagucagccucacugaaccggaucugagaaucuucucucucugggcuugccagggcucuccgaaccuagcuagcauccucuucaauuccaacuagaaagcuuaccauggagcugcccauccucaagaccaacgccauuacaacuauacuugcugcagugacgcugugcuucgccagcucccagaauaucaccgaagaguuuuaccaaucuacauguucagcggucaguaaaggcuauuugagcgcuuuaagaacugggugguacaccuccguuauuacaaucgaacugucuaacauuaaggagaauaaaugcaacggaaccgacgccaaggugaaacuaaucaagcaggaacucgauaaguauaaaaaugcaguaacugagcugcagcuucugaugcagucgaccccugccgcuaacaauagggcacggcgcgaguugccacgauucaugaacuacacacucaauaacacgaagaauaacaaugugacucugagcaaaaagcguaaaagaagguuucuggguuuccucuuaggcgucgggucagccauagcuaguggaaucgccguguguaagguucugcaccuugaaggcgaggugaacaagauuaaaaaugcguugcuguccaccaacaaggcagucgugucucuaagcaacgguguauccguucucacauuuaaagugcuggaccuuaagaauuauaucgauaaacaacuguugccgauucucaacaagcagucaugcaguaucagcaauauagaaacugucauugaguuccagcagaaaaacaaucggcuguuagagaucacccgcgaauuuucugugaacgccggggugacaacccccgucuccacguacaugcugacuaauucagagcuccuuagccugauuaacgacaugccuaucacaaaugaucaaaagaaguugaugaguaacaauguucagaucgugagacagcagucuuauuccauuauguguauaaucaaagaagagguacuagcuuacgugguccaacugccacucuacggagugauugacacccccugcuggaagcugcauacuagcccucuuuguacaaccaacacgaaagaaggcucgaauaucugccugaccaggacagaucggggcugguauugugacaacgccgggucuguuuccuucuuuccacaggcagagacuugcaaggugcagucaaaucgcgucuucugugauaccaugaacaguuugacacuccccagcgaggugaaccugugcaauauagacauuuuuaacccuaaauacgauugcaagaucaugacuuccaagaccgacguaucuagcucaguuaucacaaguuuaggagcuauuguguccuguuaugguaaaaccaagugcacugccagcaauaaaaaccgaggcaucauuaagacguucucuaaugggugugauuacgucucaaacaaaggaguggacacagucagugugggcaauacccuguauuacguuaacaagcaagaagguaagagccuauaugugaaaggggagccaauaaucaauuuuuacgacccgcucguauuccccuccgaugaguucgacgcgucuauuucgcaggucaacgaaaagaucaaucagagccuggccuuuaucagaaaauccgaugaacuuuugcacaacgugaauguuggaaagucaacuaccaacauuaugauaacaaccaucauuaucgugauuaucgucauacugcuccugcuuaucgcagugggccuguucuuguacugcaaagcuaggaguacuccuguaacacucucuaaggaccagcugagcggcauuaauaacaucgccuuuuccaacugaggacuaguaauaaggaaacuguaugaaugucugugggcaggaagugaagagauccuucuguaaagguuuuuggaauuaugucugcugaauaauaaacuuuuuugaaauaauaaaucugguagaaaaaugagaucuaaaaaaaaaaaaaaaaaaaaaaaaaaaaaaaaaaaaaaaaaaaaaaaaaaaaaaaaaaaaaaaaugcaucccccccccccccccccccccccccccccccaaaggcucuuuucagagccaccagaauu

SEQ ID NO: 12789 - RNA, 2162 nt, Artificial Sequence
  mRNA product Design h-4 comprising derived and/or modified sequence from HRSV(Memphis-37)__AIY60640.1__F0_DSCav1 (opt4)
gggagagggcgcuuggcuugcaaggacccugagcugcggcauugaagcacacccaacccaacucgacugaagucagccucacugaaccggaucugagaaucuucucucucugggcuugccagggcucuccgaaccuagcuagcauccucuucaauuccaacuagaaagcuuaccauggagcugcccauccugaagaccaacgccaucaccaccauccuggccgccgugacccugugcuucgccagcagccagaacaucaccgaggaguucuaccagagcaccugcagcgccgugagcaagggcuaccugagcgcccugagaaccggcugguacaccagcgugaucaccaucgagcugagcaacaucaaggagaacaagugcaacggcaccgacgccaaggugaagcugaucaagcaggagcuggacaaguacaagaacgccgugaccgagcugcagcugcugaugcagagcacccccgccgccaacaacagagccagaagagagcugcccagauucaugaacuacacccugaacaacaccaagaacaacaacgugacccugagcaagaagagaaagagaagauuccugggcuuccugcugggcgugggcagcgccaucgccagcggcaucgccgugugcaaggugcugcaccuggagggcgaggugaacaagaucaagaacgcccugcugagcaccaacaaggccguggugagccugagcaacggcgugagcgugcugaccuucaaggugcuggaccugaagaacuacaucgacaagcagcugcugcccauccugaacaagcagagcugcagcaucagcaacaucgagaccgugaucgaguuccagcagaagaacaacagacugcuggagaucaccagagaguucagcgugaacgccggcgugaccacccccgugagcaccuacaugcugaccaacagcgagcugcugagccugaucaacgacaugcccaucaccaacgaccagaagaagcugaugagcaacaacgugcagaucgugagacagcagagcuacagcaucaugugcaucaucaaggaggaggugcuggccuacguggugcagcugccccuguacggcgugaucgacacccccugcuggaagcugcacaccagcccccugugcaccaccaacaccaaggagggcagcaacaucugccugaccagaaccgacagaggcugguacugcgacaacgccggcagcgugagcuucuucccccaggccgagaccugcaaggugcagagcaacagaguguucugcgacaccaugaacagccugacccugcccagcgaggugaaccugugcaacaucgacaucuucaaccccaaguacgacugcaagaucaugaccagcaagaccgacgugagcagcagcgugaucaccagccugggcgccaucgugagcugcuacggcaagaccaagugcaccgccagcaacaagaacagaggcaucaucaagaccuucagcaacggcugcgacuacgugagcaacaagggcguggacaccgugagcgugggcaacacccuguacuacgugaacaagcaggagggcaagagccuguacgugaagggcgagcccaucaucaacuucuacgacccccugguguuccccagcgacgaguucgacgccagcaucagccaggugaacgagaagaucaaccagagccuggccuucaucagaaagagcgacgagcugcugcacaacgugaacgugggcaagagcaccaccaacaucaugaucaccaccaucaucaucgugaucaucgugauccugcugcugcugaucgccgugggccuguuccuguacugcaaggccagaagcacccccgugacccugagcaaggaccagcugagcggcaucaacaacaucgccuucagcaacugaggacuaguaauaaggaaacuguaugaaugucugugggcaggaagugaagagauccuucuguaaagguuuuuggaauuaugucugcugaauaauaaacuuuuuugaaauaauaaaucugguagaaaaaugagaucuaaaaaaaaaaaaaaaaaaaaaaaaaaaaaaaaaaaaaaaaaaaaaaaaaaaaaaaaaaaaaaaaugcaucccccccccccccccccccccccccccccccaaaggcucuuuucagagccaccagaauu

SEQ ID NO: 12790 - RNA, 2162 nt, Artificial Sequence
  mRNA product Design h-4 comprising derived and/or modified sequence from HRSV(Memphis-37)__AIY60640.1__F0_DSCav1 (opt5)
gggagagggcgcuuggcuugcaaggacccugagcugcggcauugaagcacacccaacccaacucgacugaagucagccucacugaaccggaucugagaaucuucucucucugggcuugccagggcucuccgaaccuagcuagcauccucuucaauuccaacuagaaagcuuaccauggagcugcccauccucaagaccaacgccauuacaacgauccuggcugccgugacccuuugcuucgcgagcucccagaauauuacagaagaguuuuaccaaucuaccuguagcgcugucuccaaaggcuaucugucugcccucagaacagggugguacaccagcguuaucacaauugaacuguccaacaucaaggagaauaaaugcaacggaaccgacgccaaggugaaacuuaucaagcaggaacuggauaaguauaaaaaugcugugacggagcuccagcugcugaugcagucuaccccugccgcuaacaaucgggcccgcagagagcucccgcgguucaugaacuacacacugaauaacaccaagaauaacaaugucacacuuagcaaaaagcgcaaaagacgguuucugggcuuccuccugggggugggauccgcgauugccagcggcaucgcuguuuguaaggugcuucaccuggaaggggaggucaacaagauuaaaaaugcccuccugucuaccaacaaggcugugguuucccugagcaacggagugucuguccucacguuuaaagugcuggaccuuaagaauuauaucgauaaacaacugcuccccauucugaacaagcaguccugcagcaucucuaauauugaaacagugaucgaguuccagcagaaaaacaaucgccuucuggagaucaccagagaauuuuccgucaacgccggcguuacaaccccugugagcaccuacaugcucacaaauuccgagcugcugucucucauuaacgacaugcccaucacgaaugaucaaaagaagcugaugagcaacaaugugcagauuguccggcagcaguccuauagcaucauguguauuaucaaagaagaggugcuugcguacguugugcaacugccucucuacggcgucaucgacacccccugcuggaagcugcauacaucuccucuuuguaccacaaacaccaaagaaggguccaauauuugccugacgcgcacagauagaggaugguauugugacaacgccggcagcgugucuuucuuuccgcaggcugagaccugcaagguucagagcaaucggguguucugugauaccaugaacucccucacacugcccucugaggucaaccugugcaauaucgacauuuuuaacccuaaauacgauugcaagaucaugaccagcaagacagacguguccagcucugucauuacgucccucggggccaucgugagcuguuauggaaaaaccaagugcacagcuucuaauaaaaaccgcggcaucauuaagaccuucuccaaugggugugauuacguuagcaacaaaggaguggacacagucuccgugggcaauacccuguauuacguuaacaagcaagaaggcaagucucuuuaugugaaaggggagcccaucauuaauuuuuacgacccucuggucuuccccagcgaugaguucgacgccuccaucucucaggugaacgaaaagauuaaucagagccucgccuuuaucagaaaauccgaugaacugcugcacaacgugaauguuggaaagagcacgaccaacauuaugaucacaaccaucauuaucgucauuaucgugauucuucuccugcugaucgcugugggccucuuccuguacugcaaagcgcggucuacaccggucacccuuuccaaggaccagcugagcgggaucaauaacauugccuuuucuaacugaggacuaguaauaaggaaacuguaugaaugucugugggcaggaagugaagagauccuucuguaaagguuuuuggaauuaugucugcugaauaauaaacuuuuuugaaauaauaaaucugguagaaaaaugagaucuaaaaaaaaaaaaaaaaaaaaaaaaaaaaaaaaaaaaaaaaaaaaaaaaaaaaaaaaaaaaaaaaugcaucccccccccccccccccccccccccccccccaaaggcucuuuucagagccaccagaauu

SEQ ID NO: 12791 - RNA, 2162 nt, Artificial Sequence
  mRNA product Design h-4 comprising derived and/or modified sequence from HRSV(Memphis-37)__AIY60640.1__F0_DSCav1 (opt6)
gggagagggcgcuuggcuugcaaggacccugagcugcggcauugaagcacacccaacccaacucgacugaagucagccucacugaaccggaucugagaaucuucucucucugggcuugccagggcucuccgaaccuagcuagcauccucuucaauuccaacuagaaagcuuaccauggaacucccaauccucaaaaccaaugccauaacaaccauacucgcugcaguaaccuuauguuucgcaaguagccaaaacauaaccgaagaauuuuaucaauccacaugcuccgcaguuucuaaaggauaucuaucagcauuaagaacuggaugguacacaucuguaauaacuauagaacuaagcaauauaaaagaaaacaaauguaacggaacugacgcuaaaguaaaacuuauaaaacaagaacuagauaaauacaaaaacgccguuaccgaacuacaacuauuaaugcaaucaacaccagccgcaaauaacagagcaagacgcgaauuaccaagauucaugaauuacacacuaaacaauacaaaaaauaacaauguaacacuaucaaaaaaaagaaaacgacgauucuuaggcuuccuacuaggagucggcucagcaauagcuuccggaauagccgucuguaaaguccuacaccuugaaggcgaaguaaacaaaaucaaaaacgcacuauuaucaacaaacaaagcagucguaucuuuauccaacggagucucaguccuaacauucaaaguacucgauuuaaaaaacuacaucgauaaacaacuccuucccauucuaaacaaacaauccugcucaauauccaacaucgaaacagucauagaauuucaacaaaaaaacaaccgccugcuagaaauaacaagagaauuuuccguaaaugccggcgucaccacaccaguaucaacauacaugcuaacaaacuccgaacuacucucccuaauaaacgauaugccaaucaccaacgaccaaaaaaaacuaaugucaaauaacguucaaauagucagacaacaaucauacagcauaaugugcauaauaaaagaagaagucuuagccuacguuguacaacucccauuauacggaguuaucgauacaccaugcuggaaauuacacacaucacccuuaugcaccacaaacacaaaagaaggauccaauauuugucuaacacgaacagacagaggaugguacugugauaacgcaggaucagugucauucuuuccacaagcagaaacauguaaaguucaaucuaacagaguauucugcgacaccaugaacucccuaaccuuacccucagaaguaaaucuaugcaacauagauaucuuuaacccaaaauacgacugcaaaaucaugacaucaaaaacugacguuucuucauccguuauaacuucccucggcgcuauaguguccugcuacggaaaaacuaaaugcacagcauccaacaaaaauagaggaauaauaaaaacauuuuccaacggcugcgacuauguuucaaacaaaggaguagauaccguaucagucggcaauacauuauauuauguuaacaaacaagaaggaaaaucccuauacguaaaaggagaaccuauaaucaacuucuacgacccacucguauuccccucagacgaauuugacgcaucuauaucucaaguaaaugaaaaaauaaaccaaucacucgcauuuauccgcaaaucugacgaauuacuccauaacgucaacgucggcaaaucaaccaccaacauaaugauaacaacaauuauaauaguaauaauugucauacuacuacuccuaauagcaguaggucuauuccuauacugcaaagcaagauccacccccguaacccuuuccaaagaucaacucucaggaauaaauaacauagccuuuucaaacuaaggacuaguaauaaggaaacuguaugaaugucugugggcaggaagugaagagauccuucuguaaagguuuuuggaauuaugucugcugaauaauaaacuuuuuugaaauaauaaaucugguagaaaaaugagaucuaaaaaaaaaaaaaaaaaaaaaaaaaaaaaaaaaaaaaaaaaaaaaaaaaaaaaaaaaaaaaaaaugcaucccccccccccccccccccccccccccccccaaaggcucuuuucagagccaccagaauu

SEQ ID NO: 12792 - RNA, 2162 nt, Artificial Sequence
  mRNA product Design h-4 comprising derived and/or modified sequence from HRSV(Memphis-37)__AIY60640.1__F0_DSCav1 (opt11)
gggagagggcgcuuggcuugcaaggacccugagcugcggcauugaagcacacccaacccaacucgacugaagucagccucacugaaccggaucugagaaucuucucucucugggcuugccagggcucuccgaaccuagcuagcauccucuucaauuccaacuagaaagcuuaccauggaacuccccauacucaagacuaaugccaucaccaccauccucgccgccgugacccucugcuucgcaucgucccaaaacauaacagaagaguucuaccaaagcacaugcuccgcagucuccaaaggauaccucuccgcacuacguaccggcugguacaccagcgucaucaccaucgaacuuuccaacaucaaagagaacaaaugcaacggcaccgacgccaaaguaaaacucauaaaacaagagcuagacaaauacaaaaacgccgucacagaacuccaacuacugaugcaauccacaccggccgccaacaaccgcgcucgacgugaacucccacgcuucaugaacuacacucuuaacaacaccaaaaauaacaacgucacccuauccaaaaagcgaaagcgcagauuccucggcuuccuacuuggcgucggcucggcgauagccucuggaaucgccguuugcaagguccuccaccuagaaggcgaaguaaacaaaaucaaaaacgcacuccuaagcaccaacaaagccgucgucucacuuuccaacggcgucucaguccucacauucaaaguucucgaccuaaagaacuacaucgacaagcaacuacuacccauacucaauaaacaauccugcuccaucagcaacaucgagacagucaucgaauuucaacaaaagaacaaccgccuccucgaaauuacacgcgaguucucagucaacgccggagucaccaccccagucucaacauacaugcucaccaacagcgaacuccugucucuaaucaacgacaugcccaucacuaacgaccagaagaaacucauguccaacaacguccaaaucgugcgacaacaaucauacucuaucaugugcaucaucaaagaagaaguccucgcauacgucguccagcucccacucuacggcguaaucgacacacccugcuggaaacuccacacaucaccccuaugcaccaccaacacaaaagaaggcuccaacaucugccuaacccgaaccgacagagguugguauugcgacaacgccggcucagucucauucuucccacaagccgaaaccuguaaaguccaaucaaaccgcgucuucugcgauaccaugaacucucucacacuccccuccgaagucaaucucugcaacauagacaucuucaauccaaaguacgacugcaaaauaaugaccucgaaaaccgacguaagcuccagcgucaucaccuccuuaggcgcaaucguauccugcuacggcaaaaccaaaugcaccgccucaaacaaaaacagaggcaucaucaaaacguucucgaacggaugcgacuacguuuccaauaaaggcguagauaccgucuccgucggcaacacacucuauuacgucaacaaacaagaaggcaaaucccucuacgucaaaggugaaccuaucaucaacuucuacgacccccucgucuuccccagcgacgaguucgaugccucaaucagccaagucaacgagaaaaucaaccaaucacuggcuuucauacgcaaauccgacgaacuccuccacaacgugaacgucggcaaauccacaaccaacaucaugauaaccacaauaaucaucgucauaaucguaauccuacuccuccuuauugccguaggacuauuccuauacugcaaagcccgauccacccccgucacccucucaaaagaccaacucuccggcaucaacaauauagccuucucuaacuaaggacuaguaauaaggaaacuguaugaaugucugugggcaggaagugaagagauccuucuguaaagguuuuuggaauuaugucugcugaauaauaaacuuuuuugaaauaauaaaucugguagaaaaaugagaucuaaaaaaaaaaaaaaaaaaaaaaaaaaaaaaaaaaaaaaaaaaaaaaaaaaaaaaaaaaaaaaaaugcaucccccccccccccccccccccccccccccccaaaggcucuuuucagagccaccagaauu

SEQ ID NO: 12793 - RNA, 2178 nt, Artificial Sequence
  mRNA product Design h-5 comprising derived and/or modified sequence from HRSV(Memphis-37)__AIY60640.1__F0_DSCav1 (opt1)
gggagagggcgcuuggcuugcaaggacccugagcugcggcauugaagcacacccaacccaacucgacugaagucagccucacugaaccggaucugagaaucuucucucucugggcuugccagggcucuccgaaccuagcuagcauccucuucaauuccaacuagaaagcuuaccauggagcugcccauccucaagaccaacgccaucaccacgauccuggccgcggugacccugugcuucgccagcucccagaacaucaccgaggaguucuaccagagcacgugcuccgccgucagcaagggcuaccucuccgcccugcgcaccgggugguacaccagcgugaucaccaucgagcuguccaacaucaaggagaacaagugcaacggcaccgacgccaaggugaagcucaucaagcaggagcuggacaaguacaagaacgcggucacggagcugcagcuccugaugcagagcaccccggccgccaacaaccgggcccgccgggagcugccccgcuucaugaacuacacccucaacaacaccaagaacaacaacgugacgcuguccaagaagcggaagcgccgguuccugggguuccuccugggcguggggagcgcgaucgccuccggcaucgccgucugcaaggugcugcaccucgagggcgaggugaacaagaucaagaacgcccugcuguccaccaacaaggccgucgugagccucuccaacggggugagcguccugaccuucaaggugcuggaccucaagaacuacaucgacaagcagcugcugcccauccugaacaagcagagcugcuccaucagcaacaucgagaccgucaucgaguuccagcagaagaacaaccgccuccuggagaucacgcgggaguucagcgugaacgcgggcgugaccacccccgucuccaccuacaugcugacgaacagcgagcuccugucccugaucaacgacaugccgaucaccaacgaccagaagaagcucaugagcaacaacgugcagaucgugcgccagcaguccuacagcaucaugugcaucaucaaggaggagguccuggccuacguggugcagcugccccucuacggggucaucgacacccccugcuggaagcugcacaccagcccccugugcacgaccaacaccaaggagggcuccaacaucugccucacccggacggaccgcgggugguacugcgacaacgccggcagcguguccuucuucccgcaggccgagaccugcaagguccagagcaaccggguguucugcgacaccaugaacucccugacccugcccagcgaggugaaccucugcaacaucgacaucuucaaccccaaguacgacugcaagaucaugacguccaagaccgacgucagcuccagcgugaucaccucccugggcgccaucgugagcugcuacgggaagaccaagugcacggcgagcaacaagaaccgcggcaucaucaagaccuucuccaacgggugcgacuacgucagcaacaagggcguggacaccguguccgucggcaacacccuguacuacgugaacaagcaggagggcaagagccucuacgugaagggggagcccaucaucaacuucuacgacccgcuggucuuccccuccgacgaguucgacgccagcaucucccaggugaacgagaagaucaaccagagccuggccuucauccggaaguccgacgagcuccugcacaacgugaacgucggcaagagcaccacgaacaucaugaucaccaccaucaucaucgugaucaucgugauccugcugcuccugaucgccgucgggcuguuccucuacugcaaggcccgcuccacccccgugacgcugagcaaggaccagcuguccgggaucaacaacaucgcguucagcaacugaggacuaguacuggcugcaucucccuuuccucuguccuccauccuucucccaggauggugaagggggaccugguacccagugauccccaccccaggauccuaaaucaugacuuaccugcuaauaaaaacucauuggaaaagugagaagaucuaaaaaaaaaaaaaaaaaaaaaaaaaaaaaaaaaaaaaaaaaaaaaaaaaaaaaaaaaaaaaaaaugcaucccccccccccccccccccccccccccccccaaaggcucuuuucagagccaccagaauu

SEQ ID NO: 12794 - RNA, 2178 nt, Artificial Sequence
  mRNA product Design h-5 comprising derived and/or modified sequence from HRSV(Memphis-37)__AIY60640.1__F0_DSCav1 (opt1)
gggagagggcgcuuggcuugcaaggacccugagcugcggcauugaagcacacccaacccaacucgacugaagucagccucacugaaccggaucugagaaucuucucucucugggcuugccagggcucuccgaaccuagcuagcauccucuucaauuccaacuagaaagcuuaccauggagcugcccauccucaagaccaacgccaucaccacgauccuggccgcggugacccugugcuucgccagcucccagaacaucaccgaggaguucuaccagagcacgugcuccgccgucagcaagggcuaccucuccgcccugcgcaccgggugguacaccagcgugaucaccaucgagcuguccaacaucaaggagaacaagugcaacggcaccgacgccaaggugaagcucaucaagcaggagcuggacaaguacaagaacgcggucacggagcugcagcuccugaugcagagcaccccggccgccaacaaccgggcccgccgggagcugccccgcuucaugaacuacacccucaacaacaccaagaacaacaacgugacgcuguccaagaagcggaagcgccgguuccugggguuccuccugggcguggggagcgcgaucgccuccggcaucgccgucugcaaggugcugcaccucgagggcgaggugaacaagaucaagaacgcccugcugagcaccaacaaggccgucgugucccucagcaacgggguguccguccugaccuucaaggugcuggaccucaagaacuacaucgacaagcagcugcugcccauccucaacaagcagagcugcuccaucagcaacaucgagaccgugaucgaguuccagcagaagaacaaccgccugcuggagaucacgcgggaguucuccgucaacgcgggcgugaccacccccgugagcaccuacaugcucacgaacagcgagcugcugucccucaucaacgacaugccgaucaccaacgaccagaagaagcugaugagcaacaacguccagaucgugcgccagcaguccuacagcaucaugugcaucaucaaggaggaggugcuggccuacgucgugcagcucccccuguacggggugaucgacacccccugcuggaagcugcacaccagcccccucugcacgaccaacaccaaggagggcagcaacaucugccugacccggacggaccgcgggugguacugcgacaacgccggcuccgucagcuucuucccgcaggccgagaccugcaaggugcaguccaaccgggucuucugcgacaccaugaacagccugacccuccccuccgaggugaaccugugcaacaucgacaucuucaaccccaaguacgacugcaagaucaugacgagcaagaccgacguguccagcuccgucaucaccagccugggcgccaucguguccugcuacgggaagaccaagugcacggcgagcaacaagaaccgcggcaucaucaagaccuucuccaacgggugcgacuacgugagcaacaagggcgucgacaccgugagcgugggcaacacccucuacuacgucaacaagcaggaggggaagucccuguacgugaagggcgagcccaucaucaacuucuacgacccgcugguguuccccagcgacgaguucgacgccuccaucagccaggucaacgagaagaucaaccagucccucgccuucauccggaaguccgacgagcugcugcacaacgugaacguggggaaguccaccacgaacaucaugaucaccaccaucaucaucgucaucaucgugauccugcuccugcugaucgccgugggccucuuccuguacugcaaggcccgcagcacccccgucacgcuguccaaggaccagcucagcgggaucaacaacaucgcguucuccaacugaggacuaguacuggcugcaucucccuuuccucuguccuccauccuucucccaggauggugaagggggaccugguacccagugauccccaccccaggauccuaaaucaugacuuaccugcuaauaaaaacucauuggaaaagugagaagaucuaaaaaaaaaaaaaaaaaaaaaaaaaaaaaaaaaaaaaaaaaaaaaaaaaaaaaaaaaaaaaaaaugcaucccccccccccccccccccccccccccccccaaaggcucuuuucagagccaccagaauu

SEQ ID NO: 12795 - RNA, 2178 nt, Artificial Sequence
  mRNA product Design h-5 comprising derived and/or modified sequence from HRSV(Memphis-37)__AIY60640.1__F0_DSCav1 (opt2)
gggagagggcgcuuggcuugcaaggacccugagcugcggcauugaagcacacccaacccaacucgacugaagucagccucacugaaccggaucugagaaucuucucucucugggcuugccagggcucuccgaaccuagcuagcauccucuucaauuccaacuagaaagcuuaccauggagcuccccauccucaagaccaacgccaucaccaccauccucgccgccgucacccucugcuucgccuccucccagaacaucaccgaggaguucuaccaguccaccugcuccgccgucuccaagggcuaccucuccgcccuccgcaccggcugguacaccuccgucaucaccaucgagcucuccaacaucaaggagaacaagugcaacggcaccgacgccaaggucaagcucaucaagcaggagcucgacaaguacaagaacgccgucaccgagcuccagcuccucaugcaguccacccccgccgccaacaaccgcgcccgccgcgagcucccccgcuucaugaacuacacccucaacaacaccaagaacaacaacgucacccucuccaagaagcgcaagcgccgcuuccucggcuuccuccucggcgucggcuccgccaucgccuccggcaucgccgucugcaagguccuccaccucgagggcgaggucaacaagaucaagaacgcccuccucuccaccaacaaggccgucgucucccucuccaacggcgucuccguccucaccuucaagguccucgaccucaagaacuacaucgacaagcagcuccuccccauccucaacaagcaguccugcuccaucuccaacaucgagaccgucaucgaguuccagcagaagaacaaccgccuccucgagaucacccgcgaguucuccgucaacgccggcgucaccacccccgucuccaccuacaugcucaccaacuccgagcuccucucccucaucaacgacaugcccaucaccaacgaccagaagaagcucauguccaacaacguccagaucguccgccagcaguccuacuccaucaugugcaucaucaaggaggagguccucgccuacgucguccagcucccccucuacggcgucaucgacacccccugcuggaagcuccacaccuccccccucugcaccaccaacaccaaggagggcuccaacaucugccucacccgcaccgaccgcggcugguacugcgacaacgccggcuccgucuccuucuucccccaggccgagaccugcaagguccaguccaaccgcgucuucugcgacaccaugaacucccucacccuccccuccgaggucaaccucugcaacaucgacaucuucaaccccaaguacgacugcaagaucaugaccuccaagaccgacgucuccuccuccgucaucaccucccucggcgccaucgucuccugcuacggcaagaccaagugcaccgccuccaacaagaaccgcggcaucaucaagaccuucuccaacggcugcgacuacgucuccaacaagggcgucgacaccgucuccgucggcaacacccucuacuacgucaacaagcaggagggcaagucccucuacgucaagggcgagcccaucaucaacuucuacgacccccucgucuuccccuccgacgaguucgacgccuccaucucccaggucaacgagaagaucaaccagucccucgccuucauccgcaaguccgacgagcuccuccacaacgucaacgucggcaaguccaccaccaacaucaugaucaccaccaucaucaucgucaucaucgucauccuccuccuccucaucgccgucggccucuuccucuacugcaaggcccgcuccacccccgucacccucuccaaggaccagcucuccggcaucaacaacaucgccuucuccaacugaggacuaguacuggcugcaucucccuuuccucuguccuccauccuucucccaggauggugaagggggaccugguacccagugauccccaccccaggauccuaaaucaugacuuaccugcuaauaaaaacucauuggaaaagugagaagaucuaaaaaaaaaaaaaaaaaaaaaaaaaaaaaaaaaaaaaaaaaaaaaaaaaaaaaaaaaaaaaaaaugcaucccccccccccccccccccccccccccccccaaaggcucuuuucagagccaccagaauu

SEQ ID NO: 12796 - RNA, 2178 nt, Artificial Sequence
  mRNA product Design h-5 comprising derived and/or modified sequence from HRSV(Memphis-37)__AIY60640.1__F0_DSCav1 (opt3)
gggagagggcgcuuggcuugcaaggacccugagcugcggcauugaagcacacccaacccaacucgacugaagucagccucacugaaccggaucugagaaucuucucucucugggcuugccagggcucuccgaaccuagcuagcauccucuucaauuccaacuagaaagcuuaccauggagcugcccauccucaagaccaacgccauuacaacuauacuugcugcagugacgcugugcuucgccagcucccagaauaucaccgaagaguuuuaccaaucuacauguucagcggucaguaaaggcuauuugagcgcuuuaagaacugggugguacaccuccguuauuacaaucgaacugucuaacauuaaggagaauaaaugcaacggaaccgacgccaaggugaaacuaaucaagcaggaacucgauaaguauaaaaaugcaguaacugagcugcagcuucugaugcagucgaccccugccgcuaacaauagggcacggcgcgaguugccacgauucaugaacuacacacucaauaacacgaagaauaacaaugugacucugagcaaaaagcguaaaagaagguuucuggguuuccucuuaggcgucgggucagccauagcuaguggaaucgccguguguaagguucugcaccuugaaggcgaggugaacaagauuaaaaaugcguugcuguccaccaacaaggcagucgugucucuaagcaacgguguauccguucucacauuuaaagugcuggaccuuaagaauuauaucgauaaacaacuguugccgauucucaacaagcagucaugcaguaucagcaauauagaaacugucauugaguuccagcagaaaaacaaucggcuguuagagaucacccgcgaauuuucugugaacgccggggugacaacccccgucuccacguacaugcugacuaauucagagcuccuuagccugauuaacgacaugccuaucacaaaugaucaaaagaaguugaugaguaacaauguucagaucgugagacagcagucuuauuccauuauguguauaaucaaagaagagguacuagcuuacgugguccaacugccacucuacggagugauugacacccccugcuggaagcugcauacuagcccucuuuguacaaccaacacgaaagaaggcucgaauaucugccugaccaggacagaucggggcugguauugugacaacgccgggucuguuuccuucuuuccacaggcagagacuugcaaggugcagucaaaucgcgucuucugugauaccaugaacaguuugacacuccccagcgaggugaaccugugcaauauagacauuuuuaacccuaaauacgauugcaagaucaugacuuccaagaccgacguaucuagcucaguuaucacaaguuuaggagcuauuguguccuguuaugguaaaaccaagugcacugccagcaauaaaaaccgaggcaucauuaagacguucucuaaugggugugauuacgucucaaacaaaggaguggacacagucagugugggcaauacccuguauuacguuaacaagcaagaagguaagagccuauaugugaaaggggagccaauaaucaauuuuuacgacccgcucguauuccccuccgaugaguucgacgcgucuauuucgcaggucaacgaaaagaucaaucagagccuggccuuuaucagaaaauccgaugaacuuuugcacaacgugaauguuggaaagucaacuaccaacauuaugauaacaaccaucauuaucgugauuaucgucauacugcuccugcuuaucgcagugggccuguucuuguacugcaaagcuaggaguacuccuguaacacucucuaaggaccagcugagcggcauuaauaacaucgccuuuuccaacugaggacuaguacuggcugcaucucccuuuccucuguccuccauccuucucccaggauggugaagggggaccugguacccagugauccccaccccaggauccuaaaucaugacuuaccugcuaauaaaaacucauuggaaaagugagaagaucuaaaaaaaaaaaaaaaaaaaaaaaaaaaaaaaaaaaaaaaaaaaaaaaaaaaaaaaaaaaaaaaaugcaucccccccccccccccccccccccccccccccaaaggcucuuuucagagccaccagaauu

SEQ ID NO: 12797 - RNA, 2178 nt, Artificial Sequence
  mRNA product Design h-5 comprising derived and/or modified sequence from HRSV(Memphis-37)__AIY60640.1__F0_DSCav1 (opt4)
gggagagggcgcuuggcuugcaaggacccugagcugcggcauugaagcacacccaacccaacucgacugaagucagccucacugaaccggaucugagaaucuucucucucugggcuugccagggcucuccgaaccuagcuagcauccucuucaauuccaacuagaaagcuuaccauggagcugcccauccugaagaccaacgccaucaccaccauccuggccgccgugacccugugcuucgccagcagccagaacaucaccgaggaguucuaccagagcaccugcagcgccgugagcaagggcuaccugagcgcccugagaaccggcugguacaccagcgugaucaccaucgagcugagcaacaucaaggagaacaagugcaacggcaccgacgccaaggugaagcugaucaagcaggagcuggacaaguacaagaacgccgugaccgagcugcagcugcugaugcagagcacccccgccgccaacaacagagccagaagagagcugcccagauucaugaacuacacccugaacaacaccaagaacaacaacgugacccugagcaagaagagaaagagaagauuccugggcuuccugcugggcgugggcagcgccaucgccagcggcaucgccgugugcaaggugcugcaccuggagggcgaggugaacaagaucaagaacgcccugcugagcaccaacaaggccguggugagccugagcaacggcgugagcgugcugaccuucaaggugcuggaccugaagaacuacaucgacaagcagcugcugcccauccugaacaagcagagcugcagcaucagcaacaucgagaccgugaucgaguuccagcagaagaacaacagacugcuggagaucaccagagaguucagcgugaacgccggcgugaccacccccgugagcaccuacaugcugaccaacagcgagcugcugagccugaucaacgacaugcccaucaccaacgaccagaagaagcugaugagcaacaacgugcagaucgugagacagcagagcuacagcaucaugugcaucaucaaggaggaggugcuggccuacguggugcagcugccccuguacggcgugaucgacacccccugcuggaagcugcacaccagcccccugugcaccaccaacaccaaggagggcagcaacaucugccugaccagaaccgacagaggcugguacugcgacaacgccggcagcgugagcuucuucccccaggccgagaccugcaaggugcagagcaacagaguguucugcgacaccaugaacagccugacccugcccagcgaggugaaccugugcaacaucgacaucuucaaccccaaguacgacugcaagaucaugaccagcaagaccgacgugagcagcagcgugaucaccagccugggcgccaucgugagcugcuacggcaagaccaagugcaccgccagcaacaagaacagaggcaucaucaagaccuucagcaacggcugcgacuacgugagcaacaagggcguggacaccgugagcgugggcaacacccuguacuacgugaacaagcaggagggcaagagccuguacgugaagggcgagcccaucaucaacuucuacgacccccugguguuccccagcgacgaguucgacgccagcaucagccaggugaacgagaagaucaaccagagccuggccuucaucagaaagagcgacgagcugcugcacaacgugaacgugggcaagagcaccaccaacaucaugaucaccaccaucaucaucgugaucaucgugauccugcugcugcugaucgccgugggccuguuccuguacugcaaggccagaagcacccccgugacccugagcaaggaccagcugagcggcaucaacaacaucgccuucagcaacugaggacuaguacuggcugcaucucccuuuccucuguccuccauccuucucccaggauggugaagggggaccugguacccagugauccccaccccaggauccuaaaucaugacuuaccugcuaauaaaaacucauuggaaaagugagaagaucuaaaaaaaaaaaaaaaaaaaaaaaaaaaaaaaaaaaaaaaaaaaaaaaaaaaaaaaaaaaaaaaaugcaucccccccccccccccccccccccccccccccaaaggcucuuuucagagccaccagaauu

SEQ ID NO: 12798 - RNA, 2178 nt, Artificial Sequence
  mRNA product Design h-5 comprising derived and/or modified sequence from HRSV(Memphis-37)__AIY60640.1__F0_DSCav1 (opt5)
gggagagggcgcuuggcuugcaaggacccugagcugcggcauugaagcacacccaacccaacucgacugaagucagccucacugaaccggaucugagaaucuucucucucugggcuugccagggcucuccgaaccuagcuagcauccucuucaauuccaacuagaaagcuuaccauggagcugcccauccucaagaccaacgccauuacaacgauccuggcugccgugacccuuugcuucgcgagcucccagaauauuacagaagaguuuuaccaaucuaccuguagcgcugucuccaaaggcuaucugucugcccucagaacagggugguacaccagcguuaucacaauugaacuguccaacaucaaggagaauaaaugcaacggaaccgacgccaaggugaaacuuaucaagcaggaacuggauaaguauaaaaaugcugugacggagcuccagcugcugaugcagucuaccccugccgcuaacaaucgggcccgcagagagcucccgcgguucaugaacuacacacugaauaacaccaagaauaacaaugucacacuuagcaaaaagcgcaaaagacgguuucugggcuuccuccugggggugggauccgcgauugccagcggcaucgcuguuuguaaggugcuucaccuggaaggggaggucaacaagauuaaaaaugcccuccugucuaccaacaaggcugugguuucccugagcaacggagugucuguccucacguuuaaagugcuggaccuuaagaauuauaucgauaaacaacugcuccccauucugaacaagcaguccugcagcaucucuaauauugaaacagugaucgaguuccagcagaaaaacaaucgccuucuggagaucaccagagaauuuuccgucaacgccggcguuacaaccccugugagcaccuacaugcucacaaauuccgagcugcugucucucauuaacgacaugcccaucacgaaugaucaaaagaagcugaugagcaacaaugugcagauuguccggcagcaguccuauagcaucauguguauuaucaaagaagaggugcuugcguacguugugcaacugccucucuacggcgucaucgacacccccugcuggaagcugcauacaucuccucuuuguaccacaaacaccaaagaaggguccaauauuugccugacgcgcacagauagaggaugguauugugacaacgccggcagcgugucuuucuuuccgcaggcugagaccugcaagguucagagcaaucggguguucugugauaccaugaacucccucacacugcccucugaggucaaccugugcaauaucgacauuuuuaacccuaaauacgauugcaagaucaugaccagcaagacagacguguccagcucugucauuacgucccucggggccaucgugagcuguuauggaaaaaccaagugcacagcuucuaauaaaaaccgcggcaucauuaagaccuucuccaaugggugugauuacguuagcaacaaaggaguggacacagucuccgugggcaauacccuguauuacguuaacaagcaagaaggcaagucucuuuaugugaaaggggagcccaucauuaauuuuuacgacccucuggucuuccccagcgaugaguucgacgccuccaucucucaggugaacgaaaagauuaaucagagccucgccuuuaucagaaaauccgaugaacugcugcacaacgugaauguuggaaagagcacgaccaacauuaugaucacaaccaucauuaucgucauuaucgugauucuucuccugcugaucgcugugggccucuuccuguacugcaaagcgcggucuacaccggucacccuuuccaaggaccagcugagcgggaucaauaacauugccuuuucuaacugaggacuaguacuggcugcaucucccuuuccucuguccuccauccuucucccaggauggugaagggggaccugguacccagugauccccaccccaggauccuaaaucaugacuuaccugcuaauaaaaacucauuggaaaagugagaagaucuaaaaaaaaaaaaaaaaaaaaaaaaaaaaaaaaaaaaaaaaaaaaaaaaaaaaaaaaaaaaaaaaugcaucccccccccccccccccccccccccccccccaaaggcucuuuucagagccaccagaauu

SEQ ID NO: 12799 - RNA, 2178 nt, Artificial Sequence
  mRNA product Design h-5 comprising derived and/or modified sequence from HRSV(Memphis-37)__AIY60640.1__F0_DSCav1 (opt6)
gggagagggcgcuuggcuugcaaggacccugagcugcggcauugaagcacacccaacccaacucgacugaagucagccucacugaaccggaucugagaaucuucucucucugggcuugccagggcucuccgaaccuagcuagcauccucuucaauuccaacuagaaagcuuaccauggaacucccaauccucaaaaccaaugccauaacaaccauacucgcugcaguaaccuuauguuucgcaaguagccaaaacauaaccgaagaauuuuaucaauccacaugcuccgcaguuucuaaaggauaucuaucagcauuaagaacuggaugguacacaucuguaauaacuauagaacuaagcaauauaaaagaaaacaaauguaacggaacugacgcuaaaguaaaacuuauaaaacaagaacuagauaaauacaaaaacgccguuaccgaacuacaacuauuaaugcaaucaacaccagccgcaaauaacagagcaagacgcgaauuaccaagauucaugaauuacacacuaaacaauacaaaaaauaacaauguaacacuaucaaaaaaaagaaaacgacgauucuuaggcuuccuacuaggagucggcucagcaauagcuuccggaauagccgucuguaaaguccuacaccuugaaggcgaaguaaacaaaaucaaaaacgcacuauuaucaacaaacaaagcagucguaucuuuauccaacggagucucaguccuaacauucaaaguacucgauuuaaaaaacuacaucgauaaacaacuccuucccauucuaaacaaacaauccugcucaauauccaacaucgaaacagucauagaauuucaacaaaaaaacaaccgccugcuagaaauaacaagagaauuuuccguaaaugccggcgucaccacaccaguaucaacauacaugcuaacaaacuccgaacuacucucccuaauaaacgauaugccaaucaccaacgaccaaaaaaaacuaaugucaaauaacguucaaauagucagacaacaaucauacagcauaaugugcauaauaaaagaagaagucuuagccuacguuguacaacucccauuauacggaguuaucgauacaccaugcuggaaauuacacacaucacccuuaugcaccacaaacacaaaagaaggauccaauauuugucuaacacgaacagacagaggaugguacugugauaacgcaggaucagugucauucuuuccacaagcagaaacauguaaaguucaaucuaacagaguauucugcgacaccaugaacucccuaaccuuacccucagaaguaaaucuaugcaacauagauaucuuuaacccaaaauacgacugcaaaaucaugacaucaaaaacugacguuucuucauccguuauaacuucccucggcgcuauaguguccugcuacggaaaaacuaaaugcacagcauccaacaaaaauagaggaauaauaaaaacauuuuccaacggcugcgacuauguuucaaacaaaggaguagauaccguaucagucggcaauacauuauauuauguuaacaaacaagaaggaaaaucccuauacguaaaaggagaaccuauaaucaacuucuacgacccacucguauuccccucagacgaauuugacgcaucuauaucucaaguaaaugaaaaaauaaaccaaucacucgcauuuauccgcaaaucugacgaauuacuccauaacgucaacgucggcaaaucaaccaccaacauaaugauaacaacaauuauaauaguaauaauugucauacuacuacuccuaauagcaguaggucuauuccuauacugcaaagcaagauccacccccguaacccuuuccaaagaucaacucucaggaauaaauaacauagccuuuucaaacuaaggacuaguacuggcugcaucucccuuuccucuguccuccauccuucucccaggauggugaagggggaccugguacccagugauccccaccccaggauccuaaaucaugacuuaccugcuaauaaaaacucauuggaaaagugagaagaucuaaaaaaaaaaaaaaaaaaaaaaaaaaaaaaaaaaaaaaaaaaaaaaaaaaaaaaaaaaaaaaaaugcaucccccccccccccccccccccccccccccccaaaggcucuuuucagagccaccagaauu

SEQ ID NO: 12800 - RNA, 2178 nt, Artificial Sequence
  mRNA product Design h-5 comprising derived and/or modified sequence from HRSV(Memphis-37)__AIY60640.1__F0_DSCav1 (opt11)
gggagagggcgcuuggcuugcaaggacccugagcugcggcauugaagcacacccaacccaacucgacugaagucagccucacugaaccggaucugagaaucuucucucucugggcuugccagggcucuccgaaccuagcuagcauccucuucaauuccaacuagaaagcuuaccauggaacuccccauacucaagacuaaugccaucaccaccauccucgccgccgugacccucugcuucgcaucgucccaaaacauaacagaagaguucuaccaaagcacaugcuccgcagucuccaaaggauaccucuccgcacuacguaccggcugguacaccagcgucaucaccaucgaacuuuccaacaucaaagagaacaaaugcaacggcaccgacgccaaaguaaaacucauaaaacaagagcuagacaaauacaaaaacgccgucacagaacuccaacuacugaugcaauccacaccggccgccaacaaccgcgcucgacgugaacucccacgcuucaugaacuacacucuuaacaacaccaaaaauaacaacgucacccuauccaaaaagcgaaagcgcagauuccucggcuuccuacuuggcgucggcucggcgauagccucuggaaucgccguuugcaagguccuccaccuagaaggcgaaguaaacaaaaucaaaaacgcacuccuaagcaccaacaaagccgucgucucacuuuccaacggcgucucaguccucacauucaaaguucucgaccuaaagaacuacaucgacaagcaacuacuacccauacucaauaaacaauccugcuccaucagcaacaucgagacagucaucgaauuucaacaaaagaacaaccgccuccucgaaauuacacgcgaguucucagucaacgccggagucaccaccccagucucaacauacaugcucaccaacagcgaacuccugucucuaaucaacgacaugcccaucacuaacgaccagaagaaacucauguccaacaacguccaaaucgugcgacaacaaucauacucuaucaugugcaucaucaaagaagaaguccucgcauacgucguccagcucccacucuacggcguaaucgacacacccugcuggaaacuccacacaucaccccuaugcaccaccaacacaaaagaaggcuccaacaucugccuaacccgaaccgacagagguugguauugcgacaacgccggcucagucucauucuucccacaagccgaaaccuguaaaguccaaucaaaccgcgucuucugcgauaccaugaacucucucacacuccccuccgaagucaaucucugcaacauagacaucuucaauccaaaguacgacugcaaaauaaugaccucgaaaaccgacguaagcuccagcgucaucaccuccuuaggcgcaaucguauccugcuacggcaaaaccaaaugcaccgccucaaacaaaaacagaggcaucaucaaaacguucucgaacggaugcgacuacguuuccaauaaaggcguagauaccgucuccgucggcaacacacucuauuacgucaacaaacaagaaggcaaaucccucuacgucaaaggugaaccuaucaucaacuucuacgacccccucgucuuccccagcgacgaguucgaugccucaaucagccaagucaacgagaaaaucaaccaaucacuggcuuucauacgcaaauccgacgaacuccuccacaacgugaacgucggcaaauccacaaccaacaucaugauaaccacaauaaucaucgucauaaucguaauccuacuccuccuuauugccguaggacuauuccuauacugcaaagcccgauccacccccgucacccucucaaaagaccaacucuccggcaucaacaauauagccuucucuaacuaaggacuaguacuggcugcaucucccuuuccucuguccuccauccuucucccaggauggugaagggggaccugguacccagugauccccaccccaggauccuaaaucaugacuuaccugcuaauaaaaacucauuggaaaagugagaagaucuaaaaaaaaaaaaaaaaaaaaaaaaaaaaaaaaaaaaaaaaaaaaaaaaaaaaaaaaaaaaaaaaugcaucccccccccccccccccccccccccccccccaaaggcucuuuucagagccaccagaauu

SEQ ID NO: 12801 - RNA, 2111 nt, Artificial Sequence
  mRNA product Design i-1 comprising derived and/or modified sequence from HRSV(Memphis-37)__AIY60640.1__F0_DSCav1 (opt1)
gggagagggcgcuuggcuugcaaggacccugagcugcggcauugaagcacacccaacccaacucgacugaagucagccucacugaaccggaucugagaaucuucucucucugggcuugccagggcucuccgaaccuagcuagcauccucuucaauuccaacuagaaagcuuaccauggagcugcccauccucaagaccaacgccaucaccacgauccuggccgcggugacccugugcuucgccagcucccagaacaucaccgaggaguucuaccagagcacgugcuccgccgucagcaagggcuaccucuccgcccugcgcaccgggugguacaccagcgugaucaccaucgagcuguccaacaucaaggagaacaagugcaacggcaccgacgccaaggugaagcucaucaagcaggagcuggacaaguacaagaacgcggucacggagcugcagcuccugaugcagagcaccccggccgccaacaaccgggcccgccgggagcugccccgcuucaugaacuacacccucaacaacaccaagaacaacaacgugacgcuguccaagaagcggaagcgccgguuccugggguuccuccugggcguggggagcgcgaucgccuccggcaucgccgucugcaaggugcugcaccucgagggcgaggugaacaagaucaagaacgcccugcuguccaccaacaaggccgucgugagccucuccaacggggugagcguccugaccuucaaggugcuggaccucaagaacuacaucgacaagcagcugcugcccauccugaacaagcagagcugcuccaucagcaacaucgagaccgucaucgaguuccagcagaagaacaaccgccuccuggagaucacgcgggaguucagcgugaacgcgggcgugaccacccccgucuccaccuacaugcugacgaacagcgagcuccugucccugaucaacgacaugccgaucaccaacgaccagaagaagcucaugagcaacaacgugcagaucgugcgccagcaguccuacagcaucaugugcaucaucaaggaggagguccuggccuacguggugcagcugccccucuacggggucaucgacacccccugcuggaagcugcacaccagcccccugugcacgaccaacaccaaggagggcuccaacaucugccucacccggacggaccgcgggugguacugcgacaacgccggcagcguguccuucuucccgcaggccgagaccugcaagguccagagcaaccggguguucugcgacaccaugaacucccugacccugcccagcgaggugaaccucugcaacaucgacaucuucaaccccaaguacgacugcaagaucaugacguccaagaccgacgucagcuccagcgugaucaccucccugggcgccaucgugagcugcuacgggaagaccaagugcacggcgagcaacaagaaccgcggcaucaucaagaccuucuccaacgggugcgacuacgucagcaacaagggcguggacaccguguccgucggcaacacccuguacuacgugaacaagcaggagggcaagagccucuacgugaagggggagcccaucaucaacuucuacgacccgcuggucuuccccuccgacgaguucgacgccagcaucucccaggugaacgagaagaucaaccagagccuggccuucauccggaaguccgacgagcuccugcacaacgugaacgucggcaagagcaccacgaacaucaugaucaccaccaucaucaucgugaucaucgugauccugcugcuccugaucgccgucgggcuguuccucuacugcaaggcccgcuccacccccgugacgcugagcaaggaccagcuguccgggaucaacaacaucgcguucagcaacugaggacuaguguccaccugucccuccugggcugcuggauugucucguuuuccugccaaauaaacaggaucagcgcuuuacagaucuaaaaaaaaaaaaaaaaaaaaaaaaaaaaaaaaaaaaaaaaaaaaaaaaaaaaaaaaaaaaaaaaugcaucccccccccccccccccccccccccccccccaaaggcucuuuucagagccaccagaauu

SEQ ID NO: 12802 - RNA, 2111 nt, Artificial Sequence
  mRNA product Design i-1 comprising derived and/or modified sequence from HRSV(Memphis-37)__AIY60640.1__F0_DSCav1 (opt1)
gggagagggcgcuuggcuugcaaggacccugagcugcggcauugaagcacacccaacccaacucgacugaagucagccucacugaaccggaucugagaaucuucucucucugggcuugccagggcucuccgaaccuagcuagcauccucuucaauuccaacuagaaagcuuaccauggagcugcccauccucaagaccaacgccaucaccacgauccuggccgcggugacccugugcuucgccagcucccagaacaucaccgaggaguucuaccagagcacgugcuccgccgucagcaagggcuaccucuccgcccugcgcaccgggugguacaccagcgugaucaccaucgagcuguccaacaucaaggagaacaagugcaacggcaccgacgccaaggugaagcucaucaagcaggagcuggacaaguacaagaacgcggucacggagcugcagcuccugaugcagagcaccccggccgccaacaaccgggcccgccgggagcugccccgcuucaugaacuacacccucaacaacaccaagaacaacaacgugacgcuguccaagaagcggaagcgccgguuccugggguuccuccugggcguggggagcgcgaucgccuccggcaucgccgucugcaaggugcugcaccucgagggcgaggugaacaagaucaagaacgcccugcugagcaccaacaaggccgucgugucccucagcaacgggguguccguccugaccuucaaggugcuggaccucaagaacuacaucgacaagcagcugcugcccauccucaacaagcagagcugcuccaucagcaacaucgagaccgugaucgaguuccagcagaagaacaaccgccugcuggagaucacgcgggaguucuccgucaacgcgggcgugaccacccccgugagcaccuacaugcucacgaacagcgagcugcugucccucaucaacgacaugccgaucaccaacgaccagaagaagcugaugagcaacaacguccagaucgugcgccagcaguccuacagcaucaugugcaucaucaaggaggaggugcuggccuacgucgugcagcucccccuguacggggugaucgacacccccugcuggaagcugcacaccagcccccucugcacgaccaacaccaaggagggcagcaacaucugccugacccggacggaccgcgggugguacugcgacaacgccggcuccgucagcuucuucccgcaggccgagaccugcaaggugcaguccaaccgggucuucugcgacaccaugaacagccugacccuccccuccgaggugaaccugugcaacaucgacaucuucaaccccaaguacgacugcaagaucaugacgagcaagaccgacguguccagcuccgucaucaccagccugggcgccaucguguccugcuacgggaagaccaagugcacggcgagcaacaagaaccgcggcaucaucaagaccuucuccaacgggugcgacuacgugagcaacaagggcgucgacaccgugagcgugggcaacacccucuacuacgucaacaagcaggaggggaagucccuguacgugaagggcgagcccaucaucaacuucuacgacccgcugguguuccccagcgacgaguucgacgccuccaucagccaggucaacgagaagaucaaccagucccucgccuucauccggaaguccgacgagcugcugcacaacgugaacguggggaaguccaccacgaacaucaugaucaccaccaucaucaucgucaucaucgugauccugcuccugcugaucgccgugggccucuuccuguacugcaaggcccgcagcacccccgucacgcuguccaaggaccagcucagcgggaucaacaacaucgcguucuccaacugaggacuaguguccaccugucccuccugggcugcuggauugucucguuuuccugccaaauaaacaggaucagcgcuuuacagaucuaaaaaaaaaaaaaaaaaaaaaaaaaaaaaaaaaaaaaaaaaaaaaaaaaaaaaaaaaaaaaaaaugcaucccccccccccccccccccccccccccccccaaaggcucuuuucagagccaccagaauu

SEQ ID NO: 12803 - RNA, 2111 nt, Artificial Sequence
  mRNA product Design i-1 comprising derived and/or modified sequence from HRSV(Memphis-37)__AIY60640.1__F0_DSCav1 (opt2)
gggagagggcgcuuggcuugcaaggacccugagcugcggcauugaagcacacccaacccaacucgacugaagucagccucacugaaccggaucugagaaucuucucucucugggcuugccagggcucuccgaaccuagcuagcauccucuucaauuccaacuagaaagcuuaccauggagcuccccauccucaagaccaacgccaucaccaccauccucgccgccgucacccucugcuucgccuccucccagaacaucaccgaggaguucuaccaguccaccugcuccgccgucuccaagggcuaccucuccgcccuccgcaccggcugguacaccuccgucaucaccaucgagcucuccaacaucaaggagaacaagugcaacggcaccgacgccaaggucaagcucaucaagcaggagcucgacaaguacaagaacgccgucaccgagcuccagcuccucaugcaguccacccccgccgccaacaaccgcgcccgccgcgagcucccccgcuucaugaacuacacccucaacaacaccaagaacaacaacgucacccucuccaagaagcgcaagcgccgcuuccucggcuuccuccucggcgucggcuccgccaucgccuccggcaucgccgucugcaagguccuccaccucgagggcgaggucaacaagaucaagaacgcccuccucuccaccaacaaggccgucgucucccucuccaacggcgucuccguccucaccuucaagguccucgaccucaagaacuacaucgacaagcagcuccuccccauccucaacaagcaguccugcuccaucuccaacaucgagaccgucaucgaguuccagcagaagaacaaccgccuccucgagaucacccgcgaguucuccgucaacgccggcgucaccacccccgucuccaccuacaugcucaccaacuccgagcuccucucccucaucaacgacaugcccaucaccaacgaccagaagaagcucauguccaacaacguccagaucguccgccagcaguccuacuccaucaugugcaucaucaaggaggagguccucgccuacgucguccagcucccccucuacggcgucaucgacacccccugcuggaagcuccacaccuccccccucugcaccaccaacaccaaggagggcuccaacaucugccucacccgcaccgaccgcggcugguacugcgacaacgccggcuccgucuccuucuucccccaggccgagaccugcaagguccaguccaaccgcgucuucugcgacaccaugaacucccucacccuccccuccgaggucaaccucugcaacaucgacaucuucaaccccaaguacgacugcaagaucaugaccuccaagaccgacgucuccuccuccgucaucaccucccucggcgccaucgucuccugcuacggcaagaccaagugcaccgccuccaacaagaaccgcggcaucaucaagaccuucuccaacggcugcgacuacgucuccaacaagggcgucgacaccgucuccgucggcaacacccucuacuacgucaacaagcaggagggcaagucccucuacgucaagggcgagcccaucaucaacuucuacgacccccucgucuuccccuccgacgaguucgacgccuccaucucccaggucaacgagaagaucaaccagucccucgccuucauccgcaaguccgacgagcuccuccacaacgucaacgucggcaaguccaccaccaacaucaugaucaccaccaucaucaucgucaucaucgucauccuccuccuccucaucgccgucggccucuuccucuacugcaaggcccgcuccacccccgucacccucuccaaggaccagcucuccggcaucaacaacaucgccuucuccaacugaggacuaguguccaccugucccuccugggcugcuggauugucucguuuuccugccaaauaaacaggaucagcgcuuuacagaucuaaaaaaaaaaaaaaaaaaaaaaaaaaaaaaaaaaaaaaaaaaaaaaaaaaaaaaaaaaaaaaaaugcaucccccccccccccccccccccccccccccccaaaggcucuuuucagagccaccagaauu

SEQ ID NO: 12804 - RNA, 2111 nt, Artificial Sequence
  mRNA product Design i-1 comprising derived and/or modified sequence from HRSV(Memphis-37)__AIY60640.1__F0_DSCav1 (opt3)
gggagagggcgcuuggcuugcaaggacccugagcugcggcauugaagcacacccaacccaacucgacugaagucagccucacugaaccggaucugagaaucuucucucucugggcuugccagggcucuccgaaccuagcuagcauccucuucaauuccaacuagaaagcuuaccauggagcugcccauccucaagaccaacgccauuacaacuauacuugcugcagugacgcugugcuucgccagcucccagaauaucaccgaagaguuuuaccaaucuacauguucagcggucaguaaaggcuauuugagcgcuuuaagaacugggugguacaccuccguuauuacaaucgaacugucuaacauuaaggagaauaaaugcaacggaaccgacgccaaggugaaacuaaucaagcaggaacucgauaaguauaaaaaugcaguaacugagcugcagcuucugaugcagucgaccccugccgcuaacaauagggcacggcgcgaguugccacgauucaugaacuacacacucaauaacacgaagaauaacaaugugacucugagcaaaaagcguaaaagaagguuucuggguuuccucuuaggcgucgggucagccauagcuaguggaaucgccguguguaagguucugcaccuugaaggcgaggugaacaagauuaaaaaugcguugcuguccaccaacaaggcagucgugucucuaagcaacgguguauccguucucacauuuaaagugcuggaccuuaagaauuauaucgauaaacaacuguugccgauucucaacaagcagucaugcaguaucagcaauauagaaacugucauugaguuccagcagaaaaacaaucggcuguuagagaucacccgcgaauuuucugugaacgccggggugacaacccccgucuccacguacaugcugacuaauucagagcuccuuagccugauuaacgacaugccuaucacaaaugaucaaaagaaguugaugaguaacaauguucagaucgugagacagcagucuuauuccauuauguguauaaucaaagaagagguacuagcuuacgugguccaacugccacucuacggagugauugacacccccugcuggaagcugcauacuagcccucuuuguacaaccaacacgaaagaaggcucgaauaucugccugaccaggacagaucggggcugguauugugacaacgccgggucuguuuccuucuuuccacaggcagagacuugcaaggugcagucaaaucgcgucuucugugauaccaugaacaguuugacacuccccagcgaggugaaccugugcaauauagacauuuuuaacccuaaauacgauugcaagaucaugacuuccaagaccgacguaucuagcucaguuaucacaaguuuaggagcuauuguguccuguuaugguaaaaccaagugcacugccagcaauaaaaaccgaggcaucauuaagacguucucuaaugggugugauuacgucucaaacaaaggaguggacacagucagugugggcaauacccuguauuacguuaacaagcaagaagguaagagccuauaugugaaaggggagccaauaaucaauuuuuacgacccgcucguauuccccuccgaugaguucgacgcgucuauuucgcaggucaacgaaaagaucaaucagagccuggccuuuaucagaaaauccgaugaacuuuugcacaacgugaauguuggaaagucaacuaccaacauuaugauaacaaccaucauuaucgugauuaucgucauacugcuccugcuuaucgcagugggccuguucuuguacugcaaagcuaggaguacuccuguaacacucucuaaggaccagcugagcggcauuaauaacaucgccuuuuccaacugaggacuaguguccaccugucccuccugggcugcuggauugucucguuuuccugccaaauaaacaggaucagcgcuuuacagaucuaaaaaaaaaaaaaaaaaaaaaaaaaaaaaaaaaaaaaaaaaaaaaaaaaaaaaaaaaaaaaaaaugcaucccccccccccccccccccccccccccccccaaaggcucuuuucagagccaccagaauu

SEQ ID NO: 12805 - RNA, 2111 nt, Artificial Sequence
  mRNA product Design i-1 comprising derived and/or modified sequence from HRSV(Memphis-37)__AIY60640.1__F0_DSCav1 (opt4)
gggagagggcgcuuggcuugcaaggacccugagcugcggcauugaagcacacccaacccaacucgacugaagucagccucacugaaccggaucugagaaucuucucucucugggcuugccagggcucuccgaaccuagcuagcauccucuucaauuccaacuagaaagcuuaccauggagcugcccauccugaagaccaacgccaucaccaccauccuggccgccgugacccugugcuucgccagcagccagaacaucaccgaggaguucuaccagagcaccugcagcgccgugagcaagggcuaccugagcgcccugagaaccggcugguacaccagcgugaucaccaucgagcugagcaacaucaaggagaacaagugcaacggcaccgacgccaaggugaagcugaucaagcaggagcuggacaaguacaagaacgccgugaccgagcugcagcugcugaugcagagcacccccgccgccaacaacagagccagaagagagcugcccagauucaugaacuacacccugaacaacaccaagaacaacaacgugacccugagcaagaagagaaagagaagauuccugggcuuccugcugggcgugggcagcgccaucgccagcggcaucgccgugugcaaggugcugcaccuggagggcgaggugaacaagaucaagaacgcccugcugagcaccaacaaggccguggugagccugagcaacggcgugagcgugcugaccuucaaggugcuggaccugaagaacuacaucgacaagcagcugcugcccauccugaacaagcagagcugcagcaucagcaacaucgagaccgugaucgaguuccagcagaagaacaacagacugcuggagaucaccagagaguucagcgugaacgccggcgugaccacccccgugagcaccuacaugcugaccaacagcgagcugcugagccugaucaacgacaugcccaucaccaacgaccagaagaagcugaugagcaacaacgugcagaucgugagacagcagagcuacagcaucaugugcaucaucaaggaggaggugcuggccuacguggugcagcugccccuguacggcgugaucgacacccccugcuggaagcugcacaccagcccccugugcaccaccaacaccaaggagggcagcaacaucugccugaccagaaccgacagaggcugguacugcgacaacgccggcagcgugagcuucuucccccaggccgagaccugcaaggugcagagcaacagaguguucugcgacaccaugaacagccugacccugcccagcgaggugaaccugugcaacaucgacaucuucaaccccaaguacgacugcaagaucaugaccagcaagaccgacgugagcagcagcgugaucaccagccugggcgccaucgugagcugcuacggcaagaccaagugcaccgccagcaacaagaacagaggcaucaucaagaccuucagcaacggcugcgacuacgugagcaacaagggcguggacaccgugagcgugggcaacacccuguacuacgugaacaagcaggagggcaagagccuguacgugaagggcgagcccaucaucaacuucuacgacccccugguguuccccagcgacgaguucgacgccagcaucagccaggugaacgagaagaucaaccagagccuggccuucaucagaaagagcgacgagcugcugcacaacgugaacgugggcaagagcaccaccaacaucaugaucaccaccaucaucaucgugaucaucgugauccugcugcugcugaucgccgugggccuguuccuguacugcaaggccagaagcacccccgugacccugagcaaggaccagcugagcggcaucaacaacaucgccuucagcaacugaggacuaguguccaccugucccuccugggcugcuggauugucucguuuuccugccaaauaaacaggaucagcgcuuuacagaucuaaaaaaaaaaaaaaaaaaaaaaaaaaaaaaaaaaaaaaaaaaaaaaaaaaaaaaaaaaaaaaaaugcaucccccccccccccccccccccccccccccccaaaggcucuuuucagagccaccagaauu

SEQ ID NO: 12806 - RNA, 2111 nt, Artificial Sequence
  mRNA product Design i-1 comprising derived and/or modified sequence from HRSV(Memphis-37)__AIY60640.1__F0_DSCav1 (opt5)
gggagagggcgcuuggcuugcaaggacccugagcugcggcauugaagcacacccaacccaacucgacugaagucagccucacugaaccggaucugagaaucuucucucucugggcuugccagggcucuccgaaccuagcuagcauccucuucaauuccaacuagaaagcuuaccauggagcugcccauccucaagaccaacgccauuacaacgauccuggcugccgugacccuuugcuucgcgagcucccagaauauuacagaagaguuuuaccaaucuaccuguagcgcugucuccaaaggcuaucugucugcccucagaacagggugguacaccagcguuaucacaauugaacuguccaacaucaaggagaauaaaugcaacggaaccgacgccaaggugaaacuuaucaagcaggaacuggauaaguauaaaaaugcugugacggagcuccagcugcugaugcagucuaccccugccgcuaacaaucgggcccgcagagagcucccgcgguucaugaacuacacacugaauaacaccaagaauaacaaugucacacuuagcaaaaagcgcaaaagacgguuucugggcuuccuccugggggugggauccgcgauugccagcggcaucgcuguuuguaaggugcuucaccuggaaggggaggucaacaagauuaaaaaugcccuccugucuaccaacaaggcugugguuucccugagcaacggagugucuguccucacguuuaaagugcuggaccuuaagaauuauaucgauaaacaacugcuccccauucugaacaagcaguccugcagcaucucuaauauugaaacagugaucgaguuccagcagaaaaacaaucgccuucuggagaucaccagagaauuuuccgucaacgccggcguuacaaccccugugagcaccuacaugcucacaaauuccgagcugcugucucucauuaacgacaugcccaucacgaaugaucaaaagaagcugaugagcaacaaugugcagauuguccggcagcaguccuauagcaucauguguauuaucaaagaagaggugcuugcguacguugugcaacugccucucuacggcgucaucgacacccccugcuggaagcugcauacaucuccucuuuguaccacaaacaccaaagaaggguccaauauuugccugacgcgcacagauagaggaugguauugugacaacgccggcagcgugucuuucuuuccgcaggcugagaccugcaagguucagagcaaucggguguucugugauaccaugaacucccucacacugcccucugaggucaaccugugcaauaucgacauuuuuaacccuaaauacgauugcaagaucaugaccagcaagacagacguguccagcucugucauuacgucccucggggccaucgugagcuguuauggaaaaaccaagugcacagcuucuaauaaaaaccgcggcaucauuaagaccuucuccaaugggugugauuacguuagcaacaaaggaguggacacagucuccgugggcaauacccuguauuacguuaacaagcaagaaggcaagucucuuuaugugaaaggggagcccaucauuaauuuuuacgacccucuggucuuccccagcgaugaguucgacgccuccaucucucaggugaacgaaaagauuaaucagagccucgccuuuaucagaaaauccgaugaacugcugcacaacgugaauguuggaaagagcacgaccaacauuaugaucacaaccaucauuaucgucauuaucgugauucuucuccugcugaucgcugugggccucuuccuguacugcaaagcgcggucuacaccggucacccuuuccaaggaccagcugagcgggaucaauaacauugccuuuucuaacugaggacuaguguccaccugucccuccugggcugcuggauugucucguuuuccugccaaauaaacaggaucagcgcuuuacagaucuaaaaaaaaaaaaaaaaaaaaaaaaaaaaaaaaaaaaaaaaaaaaaaaaaaaaaaaaaaaaaaaaugcaucccccccccccccccccccccccccccccccaaaggcucuuuucagagccaccagaauu

SEQ ID NO: 12807 - RNA, 2111 nt, Artificial Sequence
  mRNA product Design i-1 comprising derived and/or modified sequence from HRSV(Memphis-37)__AIY60640.1__F0_DSCav1 (opt6)
gggagagggcgcuuggcuugcaaggacccugagcugcggcauugaagcacacccaacccaacucgacugaagucagccucacugaaccggaucugagaaucuucucucucugggcuugccagggcucuccgaaccuagcuagcauccucuucaauuccaacuagaaagcuuaccauggaacucccaauccucaaaaccaaugccauaacaaccauacucgcugcaguaaccuuauguuucgcaaguagccaaaacauaaccgaagaauuuuaucaauccacaugcuccgcaguuucuaaaggauaucuaucagcauuaagaacuggaugguacacaucuguaauaacuauagaacuaagcaauauaaaagaaaacaaauguaacggaacugacgcuaaaguaaaacuuauaaaacaagaacuagauaaauacaaaaacgccguuaccgaacuacaacuauuaaugcaaucaacaccagccgcaaauaacagagcaagacgcgaauuaccaagauucaugaauuacacacuaaacaauacaaaaaauaacaauguaacacuaucaaaaaaaagaaaacgacgauucuuaggcuuccuacuaggagucggcucagcaauagcuuccggaauagccgucuguaaaguccuacaccuugaaggcgaaguaaacaaaaucaaaaacgcacuauuaucaacaaacaaagcagucguaucuuuauccaacggagucucaguccuaacauucaaaguacucgauuuaaaaaacuacaucgauaaacaacuccuucccauucuaaacaaacaauccugcucaauauccaacaucgaaacagucauagaauuucaacaaaaaaacaaccgccugcuagaaauaacaagagaauuuuccguaaaugccggcgucaccacaccaguaucaacauacaugcuaacaaacuccgaacuacucucccuaauaaacgauaugccaaucaccaacgaccaaaaaaaacuaaugucaaauaacguucaaauagucagacaacaaucauacagcauaaugugcauaauaaaagaagaagucuuagccuacguuguacaacucccauuauacggaguuaucgauacaccaugcuggaaauuacacacaucacccuuaugcaccacaaacacaaaagaaggauccaauauuugucuaacacgaacagacagaggaugguacugugauaacgcaggaucagugucauucuuuccacaagcagaaacauguaaaguucaaucuaacagaguauucugcgacaccaugaacucccuaaccuuacccucagaaguaaaucuaugcaacauagauaucuuuaacccaaaauacgacugcaaaaucaugacaucaaaaacugacguuucuucauccguuauaacuucccucggcgcuauaguguccugcuacggaaaaacuaaaugcacagcauccaacaaaaauagaggaauaauaaaaacauuuuccaacggcugcgacuauguuucaaacaaaggaguagauaccguaucagucggcaauacauuauauuauguuaacaaacaagaaggaaaaucccuauacguaaaaggagaaccuauaaucaacuucuacgacccacucguauuccccucagacgaauuugacgcaucuauaucucaaguaaaugaaaaaauaaaccaaucacucgcauuuauccgcaaaucugacgaauuacuccauaacgucaacgucggcaaaucaaccaccaacauaaugauaacaacaauuauaauaguaauaauugucauacuacuacuccuaauagcaguaggucuauuccuauacugcaaagcaagauccacccccguaacccuuuccaaagaucaacucucaggaauaaauaacauagccuuuucaaacuaaggacuaguguccaccugucccuccugggcugcuggauugucucguuuuccugccaaauaaacaggaucagcgcuuuacagaucuaaaaaaaaaaaaaaaaaaaaaaaaaaaaaaaaaaaaaaaaaaaaaaaaaaaaaaaaaaaaaaaaugcaucccccccccccccccccccccccccccccccaaaggcucuuuucagagccaccagaauu

SEQ ID NO: 12808 - RNA, 2111 nt, Artificial Sequence
  mRNA product Design i-1 comprising derived and/or modified sequence from HRSV(Memphis-37)__AIY60640.1__F0_DSCav1 (opt11)
gggagagggcgcuuggcuugcaaggacccugagcugcggcauugaagcacacccaacccaacucgacugaagucagccucacugaaccggaucugagaaucuucucucucugggcuugccagggcucuccgaaccuagcuagcauccucuucaauuccaacuagaaagcuuaccauggaacuccccauacucaagacuaaugccaucaccaccauccucgccgccgugacccucugcuucgcaucgucccaaaacauaacagaagaguucuaccaaagcacaugcuccgcagucuccaaaggauaccucuccgcacuacguaccggcugguacaccagcgucaucaccaucgaacuuuccaacaucaaagagaacaaaugcaacggcaccgacgccaaaguaaaacucauaaaacaagagcuagacaaauacaaaaacgccgucacagaacuccaacuacugaugcaauccacaccggccgccaacaaccgcgcucgacgugaacucccacgcuucaugaacuacacucuuaacaacaccaaaaauaacaacgucacccuauccaaaaagcgaaagcgcagauuccucggcuuccuacuuggcgucggcucggcgauagccucuggaaucgccguuugcaagguccuccaccuagaaggcgaaguaaacaaaaucaaaaacgcacuccuaagcaccaacaaagccgucgucucacuuuccaacggcgucucaguccucacauucaaaguucucgaccuaaagaacuacaucgacaagcaacuacuacccauacucaauaaacaauccugcuccaucagcaacaucgagacagucaucgaauuucaacaaaagaacaaccgccuccucgaaauuacacgcgaguucucagucaacgccggagucaccaccccagucucaacauacaugcucaccaacagcgaacuccugucucuaaucaacgacaugcccaucacuaacgaccagaagaaacucauguccaacaacguccaaaucgugcgacaacaaucauacucuaucaugugcaucaucaaagaagaaguccucgcauacgucguccagcucccacucuacggcguaaucgacacacccugcuggaaacuccacacaucaccccuaugcaccaccaacacaaaagaaggcuccaacaucugccuaacccgaaccgacagagguugguauugcgacaacgccggcucagucucauucuucccacaagccgaaaccuguaaaguccaaucaaaccgcgucuucugcgauaccaugaacucucucacacuccccuccgaagucaaucucugcaacauagacaucuucaauccaaaguacgacugcaaaauaaugaccucgaaaaccgacguaagcuccagcgucaucaccuccuuaggcgcaaucguauccugcuacggcaaaaccaaaugcaccgccucaaacaaaaacagaggcaucaucaaaacguucucgaacggaugcgacuacguuuccaauaaaggcguagauaccgucuccgucggcaacacacucuauuacgucaacaaacaagaaggcaaaucccucuacgucaaaggugaaccuaucaucaacuucuacgacccccucgucuuccccagcgacgaguucgaugccucaaucagccaagucaacgagaaaaucaaccaaucacuggcuuucauacgcaaauccgacgaacuccuccacaacgugaacgucggcaaauccacaaccaacaucaugauaaccacaauaaucaucgucauaaucguaauccuacuccuccuuauugccguaggacuauuccuauacugcaaagcccgauccacccccgucacccucucaaaagaccaacucuccggcaucaacaauauagccuucucuaacuaaggacuaguguccaccugucccuccugggcugcuggauugucucguuuuccugccaaauaaacaggaucagcgcuuuacagaucuaaaaaaaaaaaaaaaaaaaaaaaaaaaaaaaaaaaaaaaaaaaaaaaaaaaaaaaaaaaaaaaaugcaucccccccccccccccccccccccccccccccaaaggcucuuuucagagccaccagaauu

SEQ ID NO: 12809 - RNA, 2111 nt, Artificial Sequence
  mRNA product Design i-2 comprising derived and/or modified sequence from HRSV(Memphis-37)__AIY60640.1__F0_DSCav1 (opt1)
gggagaggcgcugccuacggagguggcagccaucuccuucucggcaucaagcuuaccauggagcugcccauccucaagaccaacgccaucaccacgauccuggccgcggugacccugugcuucgccagcucccagaacaucaccgaggaguucuaccagagcacgugcuccgccgucagcaagggcuaccucuccgcccugcgcaccgggugguacaccagcgugaucaccaucgagcuguccaacaucaaggagaacaagugcaacggcaccgacgccaaggugaagcucaucaagcaggagcuggacaaguacaagaacgcggucacggagcugcagcuccugaugcagagcaccccggccgccaacaaccgggcccgccgggagcugccccgcuucaugaacuacacccucaacaacaccaagaacaacaacgugacgcuguccaagaagcggaagcgccgguuccugggguuccuccugggcguggggagcgcgaucgccuccggcaucgccgucugcaaggugcugcaccucgagggcgaggugaacaagaucaagaacgcccugcuguccaccaacaaggccgucgugagccucuccaacggggugagcguccugaccuucaaggugcuggaccucaagaacuacaucgacaagcagcugcugcccauccugaacaagcagagcugcuccaucagcaacaucgagaccgucaucgaguuccagcagaagaacaaccgccuccuggagaucacgcgggaguucagcgugaacgcgggcgugaccacccccgucuccaccuacaugcugacgaacagcgagcuccugucccugaucaacgacaugccgaucaccaacgaccagaagaagcucaugagcaacaacgugcagaucgugcgccagcaguccuacagcaucaugugcaucaucaaggaggagguccuggccuacguggugcagcugccccucuacggggucaucgacacccccugcuggaagcugcacaccagcccccugugcacgaccaacaccaaggagggcuccaacaucugccucacccggacggaccgcgggugguacugcgacaacgccggcagcguguccuucuucccgcaggccgagaccugcaagguccagagcaaccggguguucugcgacaccaugaacucccugacccugcccagcgaggugaaccucugcaacaucgacaucuucaaccccaaguacgacugcaagaucaugacguccaagaccgacgucagcuccagcgugaucaccucccugggcgccaucgugagcugcuacgggaagaccaagugcacggcgagcaacaagaaccgcggcaucaucaagaccuucuccaacgggugcgacuacgucagcaacaagggcguggacaccguguccgucggcaacacccuguacuacgugaacaagcaggagggcaagagccucuacgugaagggggagcccaucaucaacuucuacgacccgcuggucuuccccuccgacgaguucgacgccagcaucucccaggugaacgagaagaucaaccagagccuggccuucauccggaaguccgacgagcuccugcacaacgugaacgucggcaagagcaccacgaacaucaugaucaccaccaucaucaucgugaucaucgugauccugcugcuccugaucgccgucgggcuguuccucuacugcaaggcccgcuccacccccgugacgcugagcaaggaccagcuguccgggaucaacaacaucgcguucagcaacugaggacuagugcaucacauuuaaaagcaucucagccuaccaugagaauaagagaaagaaaaugaagaucaauagcuuauucaucucuuuuucuuuuucguugguguaaagccaacacccugucuaaaaaacauaaauuucuuuaaucauuuugccucuuuucucugugcuucaauuaauaaaaaauggaaagaaccuagaucuaaaaaaaaaaaaaaaaaaaaaaaaaaaaaaaaaaaaaaaaaaaaaaaaaaaaaaaaaaaaaaaaugcaucccccccccccccccccccccccccccccccaaaggcucuuuucagagccaccagaauu

SEQ ID NO: 12810 - RNA, 2111 nt, Artificial Sequence
  mRNA product Design i-2 comprising derived and/or modified sequence from HRSV(Memphis-37)__AIY60640.1__F0_DSCav1 (opt1)
gggagaggcgcugccuacggagguggcagccaucuccuucucggcaucaagcuuaccauggagcugcccauccucaagaccaacgccaucaccacgauccuggccgcggugacccugugcuucgccagcucccagaacaucaccgaggaguucuaccagagcacgugcuccgccgucagcaagggcuaccucuccgcccugcgcaccgggugguacaccagcgugaucaccaucgagcuguccaacaucaaggagaacaagugcaacggcaccgacgccaaggugaagcucaucaagcaggagcuggacaaguacaagaacgcggucacggagcugcagcuccugaugcagagcaccccggccgccaacaaccgggcccgccgggagcugccccgcuucaugaacuacacccucaacaacaccaagaacaacaacgugacgcuguccaagaagcggaagcgccgguuccugggguuccuccugggcguggggagcgcgaucgccuccggcaucgccgucugcaaggugcugcaccucgagggcgaggugaacaagaucaagaacgcccugcugagcaccaacaaggccgucgugucccucagcaacgggguguccguccugaccuucaaggugcuggaccucaagaacuacaucgacaagcagcugcugcccauccucaacaagcagagcugcuccaucagcaacaucgagaccgugaucgaguuccagcagaagaacaaccgccugcuggagaucacgcgggaguucuccgucaacgcgggcgugaccacccccgugagcaccuacaugcucacgaacagcgagcugcugucccucaucaacgacaugccgaucaccaacgaccagaagaagcugaugagcaacaacguccagaucgugcgccagcaguccuacagcaucaugugcaucaucaaggaggaggugcuggccuacgucgugcagcucccccuguacggggugaucgacacccccugcuggaagcugcacaccagcccccucugcacgaccaacaccaaggagggcagcaacaucugccugacccggacggaccgcgggugguacugcgacaacgccggcuccgucagcuucuucccgcaggccgagaccugcaaggugcaguccaaccgggucuucugcgacaccaugaacagccugacccuccccuccgaggugaaccugugcaacaucgacaucuucaaccccaaguacgacugcaagaucaugacgagcaagaccgacguguccagcuccgucaucaccagccugggcgccaucguguccugcuacgggaagaccaagugcacggcgagcaacaagaaccgcggcaucaucaagaccuucuccaacgggugcgacuacgugagcaacaagggcgucgacaccgugagcgugggcaacacccucuacuacgucaacaagcaggaggggaagucccuguacgugaagggcgagcccaucaucaacuucuacgacccgcugguguuccccagcgacgaguucgacgccuccaucagccaggucaacgagaagaucaaccagucccucgccuucauccggaaguccgacgagcugcugcacaacgugaacguggggaaguccaccacgaacaucaugaucaccaccaucaucaucgucaucaucgugauccugcuccugcugaucgccgugggccucuuccuguacugcaaggcccgcagcacccccgucacgcuguccaaggaccagcucagcgggaucaacaacaucgcguucuccaacugaggacuagugcaucacauuuaaaagcaucucagccuaccaugagaauaagagaaagaaaaugaagaucaauagcuuauucaucucuuuuucuuuuucguugguguaaagccaacacccugucuaaaaaacauaaauuucuuuaaucauuuugccucuuuucucugugcuucaauuaauaaaaaauggaaagaaccuagaucuaaaaaaaaaaaaaaaaaaaaaaaaaaaaaaaaaaaaaaaaaaaaaaaaaaaaaaaaaaaaaaaaugcaucccccccccccccccccccccccccccccccaaaggcucuuuucagagccaccagaauu

SEQ ID NO: 12811 - RNA, 2111 nt, Artificial Sequence
  mRNA product Design i-2 comprising derived and/or modified sequence from HRSV(Memphis-37)__AIY60640.1__F0_DSCav1 (opt2)
gggagaggcgcugccuacggagguggcagccaucuccuucucggcaucaagcuuaccauggagcuccccauccucaagaccaacgccaucaccaccauccucgccgccgucacccucugcuucgccuccucccagaacaucaccgaggaguucuaccaguccaccugcuccgccgucuccaagggcuaccucuccgcccuccgcaccggcugguacaccuccgucaucaccaucgagcucuccaacaucaaggagaacaagugcaacggcaccgacgccaaggucaagcucaucaagcaggagcucgacaaguacaagaacgccgucaccgagcuccagcuccucaugcaguccacccccgccgccaacaaccgcgcccgccgcgagcucccccgcuucaugaacuacacccucaacaacaccaagaacaacaacgucacccucuccaagaagcgcaagcgccgcuuccucggcuuccuccucggcgucggcuccgccaucgccuccggcaucgccgucugcaagguccuccaccucgagggcgaggucaacaagaucaagaacgcccuccucuccaccaacaaggccgucgucucccucuccaacggcgucuccguccucaccuucaagguccucgaccucaagaacuacaucgacaagcagcuccuccccauccucaacaagcaguccugcuccaucuccaacaucgagaccgucaucgaguuccagcagaagaacaaccgccuccucgagaucacccgcgaguucuccgucaacgccggcgucaccacccccgucuccaccuacaugcucaccaacuccgagcuccucucccucaucaacgacaugcccaucaccaacgaccagaagaagcucauguccaacaacguccagaucguccgccagcaguccuacuccaucaugugcaucaucaaggaggagguccucgccuacgucguccagcucccccucuacggcgucaucgacacccccugcuggaagcuccacaccuccccccucugcaccaccaacaccaaggagggcuccaacaucugccucacccgcaccgaccgcggcugguacugcgacaacgccggcuccgucuccuucuucccccaggccgagaccugcaagguccaguccaaccgcgucuucugcgacaccaugaacucccucacccuccccuccgaggucaaccucugcaacaucgacaucuucaaccccaaguacgacugcaagaucaugaccuccaagaccgacgucuccuccuccgucaucaccucccucggcgccaucgucuccugcuacggcaagaccaagugcaccgccuccaacaagaaccgcggcaucaucaagaccuucuccaacggcugcgacuacgucuccaacaagggcgucgacaccgucuccgucggcaacacccucuacuacgucaacaagcaggagggcaagucccucuacgucaagggcgagcccaucaucaacuucuacgacccccucgucuuccccuccgacgaguucgacgccuccaucucccaggucaacgagaagaucaaccagucccucgccuucauccgcaaguccgacgagcuccuccacaacgucaacgucggcaaguccaccaccaacaucaugaucaccaccaucaucaucgucaucaucgucauccuccuccuccucaucgccgucggccucuuccucuacugcaaggcccgcuccacccccgucacccucuccaaggaccagcucuccggcaucaacaacaucgccuucuccaacugaggacuagugcaucacauuuaaaagcaucucagccuaccaugagaauaagagaaagaaaaugaagaucaauagcuuauucaucucuuuuucuuuuucguugguguaaagccaacacccugucuaaaaaacauaaauuucuuuaaucauuuugccucuuuucucugugcuucaauuaauaaaaaauggaaagaaccuagaucuaaaaaaaaaaaaaaaaaaaaaaaaaaaaaaaaaaaaaaaaaaaaaaaaaaaaaaaaaaaaaaaaugcaucccccccccccccccccccccccccccccccaaaggcucuuuucagagccaccagaauu

SEQ ID NO: 12812 - RNA, 2111 nt, Artificial Sequence
  mRNA product Design i-2 comprising derived and/or modified sequence from HRSV(Memphis-37)__AIY60640.1__F0_DSCav1 (opt3)
gggagaggcgcugccuacggagguggcagccaucuccuucucggcaucaagcuuaccauggagcugcccauccucaagaccaacgccauuacaacuauacuugcugcagugacgcugugcuucgccagcucccagaauaucaccgaagaguuuuaccaaucuacauguucagcggucaguaaaggcuauuugagcgcuuuaagaacugggugguacaccuccguuauuacaaucgaacugucuaacauuaaggagaauaaaugcaacggaaccgacgccaaggugaaacuaaucaagcaggaacucgauaaguauaaaaaugcaguaacugagcugcagcuucugaugcagucgaccccugccgcuaacaauagggcacggcgcgaguugccacgauucaugaacuacacacucaauaacacgaagaauaacaaugugacucugagcaaaaagcguaaaagaagguuucuggguuuccucuuaggcgucgggucagccauagcuaguggaaucgccguguguaagguucugcaccuugaaggcgaggugaacaagauuaaaaaugcguugcuguccaccaacaaggcagucgugucucuaagcaacgguguauccguucucacauuuaaagugcuggaccuuaagaauuauaucgauaaacaacuguugccgauucucaacaagcagucaugcaguaucagcaauauagaaacugucauugaguuccagcagaaaaacaaucggcuguuagagaucacccgcgaauuuucugugaacgccggggugacaacccccgucuccacguacaugcugacuaauucagagcuccuuagccugauuaacgacaugccuaucacaaaugaucaaaagaaguugaugaguaacaauguucagaucgugagacagcagucuuauuccauuauguguauaaucaaagaagagguacuagcuuacgugguccaacugccacucuacggagugauugacacccccugcuggaagcugcauacuagcccucuuuguacaaccaacacgaaagaaggcucgaauaucugccugaccaggacagaucggggcugguauugugacaacgccgggucuguuuccuucuuuccacaggcagagacuugcaaggugcagucaaaucgcgucuucugugauaccaugaacaguuugacacuccccagcgaggugaaccugugcaauauagacauuuuuaacccuaaauacgauugcaagaucaugacuuccaagaccgacguaucuagcucaguuaucacaaguuuaggagcuauuguguccuguuaugguaaaaccaagugcacugccagcaauaaaaaccgaggcaucauuaagacguucucuaaugggugugauuacgucucaaacaaaggaguggacacagucagugugggcaauacccuguauuacguuaacaagcaagaagguaagagccuauaugugaaaggggagccaauaaucaauuuuuacgacccgcucguauuccccuccgaugaguucgacgcgucuauuucgcaggucaacgaaaagaucaaucagagccuggccuuuaucagaaaauccgaugaacuuuugcacaacgugaauguuggaaagucaacuaccaacauuaugauaacaaccaucauuaucgugauuaucgucauacugcuccugcuuaucgcagugggccuguucuuguacugcaaagcuaggaguacuccuguaacacucucuaaggaccagcugagcggcauuaauaacaucgccuuuuccaacugaggacuagugcaucacauuuaaaagcaucucagccuaccaugagaauaagagaaagaaaaugaagaucaauagcuuauucaucucuuuuucuuuuucguugguguaaagccaacacccugucuaaaaaacauaaauuucuuuaaucauuuugccucuuuucucugugcuucaauuaauaaaaaauggaaagaaccuagaucuaaaaaaaaaaaaaaaaaaaaaaaaaaaaaaaaaaaaaaaaaaaaaaaaaaaaaaaaaaaaaaaaugcaucccccccccccccccccccccccccccccccaaaggcucuuuucagagccaccagaauu

SEQ ID NO: 12813 - RNA, 2111 nt, Artificial Sequence
  mRNA product Design i-2 comprising derived and/or modified sequence from HRSV(Memphis-37)__AIY60640.1__F0_DSCav1 (opt4)
gggagaggcgcugccuacggagguggcagccaucuccuucucggcaucaagcuuaccauggagcugcccauccugaagaccaacgccaucaccaccauccuggccgccgugacccugugcuucgccagcagccagaacaucaccgaggaguucuaccagagcaccugcagcgccgugagcaagggcuaccugagcgcccugagaaccggcugguacaccagcgugaucaccaucgagcugagcaacaucaaggagaacaagugcaacggcaccgacgccaaggugaagcugaucaagcaggagcuggacaaguacaagaacgccgugaccgagcugcagcugcugaugcagagcacccccgccgccaacaacagagccagaagagagcugcccagauucaugaacuacacccugaacaacaccaagaacaacaacgugacccugagcaagaagagaaagagaagauuccugggcuuccugcugggcgugggcagcgccaucgccagcggcaucgccgugugcaaggugcugcaccuggagggcgaggugaacaagaucaagaacgcccugcugagcaccaacaaggccguggugagccugagcaacggcgugagcgugcugaccuucaaggugcuggaccugaagaacuacaucgacaagcagcugcugcccauccugaacaagcagagcugcagcaucagcaacaucgagaccgugaucgaguuccagcagaagaacaacagacugcuggagaucaccagagaguucagcgugaacgccggcgugaccacccccgugagcaccuacaugcugaccaacagcgagcugcugagccugaucaacgacaugcccaucaccaacgaccagaagaagcugaugagcaacaacgugcagaucgugagacagcagagcuacagcaucaugugcaucaucaaggaggaggugcuggccuacguggugcagcugccccuguacggcgugaucgacacccccugcuggaagcugcacaccagcccccugugcaccaccaacaccaaggagggcagcaacaucugccugaccagaaccgacagaggcugguacugcgacaacgccggcagcgugagcuucuucccccaggccgagaccugcaaggugcagagcaacagaguguucugcgacaccaugaacagccugacccugcccagcgaggugaaccugugcaacaucgacaucuucaaccccaaguacgacugcaagaucaugaccagcaagaccgacgugagcagcagcgugaucaccagccugggcgccaucgugagcugcuacggcaagaccaagugcaccgccagcaacaagaacagaggcaucaucaagaccuucagcaacggcugcgacuacgugagcaacaagggcguggacaccgugagcgugggcaacacccuguacuacgugaacaagcaggagggcaagagccuguacgugaagggcgagcccaucaucaacuucuacgacccccugguguuccccagcgacgaguucgacgccagcaucagccaggugaacgagaagaucaaccagagccuggccuucaucagaaagagcgacgagcugcugcacaacgugaacgugggcaagagcaccaccaacaucaugaucaccaccaucaucaucgugaucaucgugauccugcugcugcugaucgccgugggccuguuccuguacugcaaggccagaagcacccccgugacccugagcaaggaccagcugagcggcaucaacaacaucgccuucagcaacugaggacuagugcaucacauuuaaaagcaucucagccuaccaugagaauaagagaaagaaaaugaagaucaauagcuuauucaucucuuuuucuuuuucguugguguaaagccaacacccugucuaaaaaacauaaauuucuuuaaucauuuugccucuuuucucugugcuucaauuaauaaaaaauggaaagaaccuagaucuaaaaaaaaaaaaaaaaaaaaaaaaaaaaaaaaaaaaaaaaaaaaaaaaaaaaaaaaaaaaaaaaugcaucccccccccccccccccccccccccccccccaaaggcucuuuucagagccaccagaauu

SEQ ID NO: 12814 - RNA, 2111 nt, Artificial Sequence
  mRNA product Design i-2 comprising derived and/or modified sequence from HRSV(Memphis-37)__AIY60640.1__F0_DSCav1 (opt5)
gggagaggcgcugccuacggagguggcagccaucuccuucucggcaucaagcuuaccauggagcugcccauccucaagaccaacgccauuacaacgauccuggcugccgugacccuuugcuucgcgagcucccagaauauuacagaagaguuuuaccaaucuaccuguagcgcugucuccaaaggcuaucugucugcccucagaacagggugguacaccagcguuaucacaauugaacuguccaacaucaaggagaauaaaugcaacggaaccgacgccaaggugaaacuuaucaagcaggaacuggauaaguauaaaaaugcugugacggagcuccagcugcugaugcagucuaccccugccgcuaacaaucgggcccgcagagagcucccgcgguucaugaacuacacacugaauaacaccaagaauaacaaugucacacuuagcaaaaagcgcaaaagacgguuucugggcuuccuccugggggugggauccgcgauugccagcggcaucgcuguuuguaaggugcuucaccuggaaggggaggucaacaagauuaaaaaugcccuccugucuaccaacaaggcugugguuucccugagcaacggagugucuguccucacguuuaaagugcuggaccuuaagaauuauaucgauaaacaacugcuccccauucugaacaagcaguccugcagcaucucuaauauugaaacagugaucgaguuccagcagaaaaacaaucgccuucuggagaucaccagagaauuuuccgucaacgccggcguuacaaccccugugagcaccuacaugcucacaaauuccgagcugcugucucucauuaacgacaugcccaucacgaaugaucaaaagaagcugaugagcaacaaugugcagauuguccggcagcaguccuauagcaucauguguauuaucaaagaagaggugcuugcguacguugugcaacugccucucuacggcgucaucgacacccccugcuggaagcugcauacaucuccucuuuguaccacaaacaccaaagaaggguccaauauuugccugacgcgcacagauagaggaugguauugugacaacgccggcagcgugucuuucuuuccgcaggcugagaccugcaagguucagagcaaucggguguucugugauaccaugaacucccucacacugcccucugaggucaaccugugcaauaucgacauuuuuaacccuaaauacgauugcaagaucaugaccagcaagacagacguguccagcucugucauuacgucccucggggccaucgugagcuguuauggaaaaaccaagugcacagcuucuaauaaaaaccgcggcaucauuaagaccuucuccaaugggugugauuacguuagcaacaaaggaguggacacagucuccgugggcaauacccuguauuacguuaacaagcaagaaggcaagucucuuuaugugaaaggggagcccaucauuaauuuuuacgacccucuggucuuccccagcgaugaguucgacgccuccaucucucaggugaacgaaaagauuaaucagagccucgccuuuaucagaaaauccgaugaacugcugcacaacgugaauguuggaaagagcacgaccaacauuaugaucacaaccaucauuaucgucauuaucgugauucuucuccugcugaucgcugugggccucuuccuguacugcaaagcgcggucuacaccggucacccuuuccaaggaccagcugagcgggaucaauaacauugccuuuucuaacugaggacuagugcaucacauuuaaaagcaucucagccuaccaugagaauaagagaaagaaaaugaagaucaauagcuuauucaucucuuuuucuuuuucguugguguaaagccaacacccugucuaaaaaacauaaauuucuuuaaucauuuugccucuuuucucugugcuucaauuaauaaaaaauggaaagaaccuagaucuaaaaaaaaaaaaaaaaaaaaaaaaaaaaaaaaaaaaaaaaaaaaaaaaaaaaaaaaaaaaaaaaugcaucccccccccccccccccccccccccccccccaaaggcucuuuucagagccaccagaauu

SEQ ID NO: 12815 - RNA, 2111 nt, Artificial Sequence
  mRNA product Design i-2 comprising derived and/or modified sequence from HRSV(Memphis-37)__AIY60640.1__F0_DSCav1 (opt6)
gggagaggcgcugccuacggagguggcagccaucuccuucucggcaucaagcuuaccauggaacucccaauccucaaaaccaaugccauaacaaccauacucgcugcaguaaccuuauguuucgcaaguagccaaaacauaaccgaagaauuuuaucaauccacaugcuccgcaguuucuaaaggauaucuaucagcauuaagaacuggaugguacacaucuguaauaacuauagaacuaagcaauauaaaagaaaacaaauguaacggaacugacgcuaaaguaaaacuuauaaaacaagaacuagauaaauacaaaaacgccguuaccgaacuacaacuauuaaugcaaucaacaccagccgcaaauaacagagcaagacgcgaauuaccaagauucaugaauuacacacuaaacaauacaaaaaauaacaauguaacacuaucaaaaaaaagaaaacgacgauucuuaggcuuccuacuaggagucggcucagcaauagcuuccggaauagccgucuguaaaguccuacaccuugaaggcgaaguaaacaaaaucaaaaacgcacuauuaucaacaaacaaagcagucguaucuuuauccaacggagucucaguccuaacauucaaaguacucgauuuaaaaaacuacaucgauaaacaacuccuucccauucuaaacaaacaauccugcucaauauccaacaucgaaacagucauagaauuucaacaaaaaaacaaccgccugcuagaaauaacaagagaauuuuccguaaaugccggcgucaccacaccaguaucaacauacaugcuaacaaacuccgaacuacucucccuaauaaacgauaugccaaucaccaacgaccaaaaaaaacuaaugucaaauaacguucaaauagucagacaacaaucauacagcauaaugugcauaauaaaagaagaagucuuagccuacguuguacaacucccauuauacggaguuaucgauacaccaugcuggaaauuacacacaucacccuuaugcaccacaaacacaaaagaaggauccaauauuugucuaacacgaacagacagaggaugguacugugauaacgcaggaucagugucauucuuuccacaagcagaaacauguaaaguucaaucuaacagaguauucugcgacaccaugaacucccuaaccuuacccucagaaguaaaucuaugcaacauagauaucuuuaacccaaaauacgacugcaaaaucaugacaucaaaaacugacguuucuucauccguuauaacuucccucggcgcuauaguguccugcuacggaaaaacuaaaugcacagcauccaacaaaaauagaggaauaauaaaaacauuuuccaacggcugcgacuauguuucaaacaaaggaguagauaccguaucagucggcaauacauuauauuauguuaacaaacaagaaggaaaaucccuauacguaaaaggagaaccuauaaucaacuucuacgacccacucguauuccccucagacgaauuugacgcaucuauaucucaaguaaaugaaaaaauaaaccaaucacucgcauuuauccgcaaaucugacgaauuacuccauaacgucaacgucggcaaaucaaccaccaacauaaugauaacaacaauuauaauaguaauaauugucauacuacuacuccuaauagcaguaggucuauuccuauacugcaaagcaagauccacccccguaacccuuuccaaagaucaacucucaggaauaaauaacauagccuuuucaaacuaaggacuagugcaucacauuuaaaagcaucucagccuaccaugagaauaagagaaagaaaaugaagaucaauagcuuauucaucucuuuuucuuuuucguugguguaaagccaacacccugucuaaaaaacauaaauuucuuuaaucauuuugccucuuuucucugugcuucaauuaauaaaaaauggaaagaaccuagaucuaaaaaaaaaaaaaaaaaaaaaaaaaaaaaaaaaaaaaaaaaaaaaaaaaaaaaaaaaaaaaaaaugcaucccccccccccccccccccccccccccccccaaaggcucuuuucagagccaccagaauu

SEQ ID NO: 12816 - RNA, 2111 nt, Artificial Sequence
  mRNA product Design i-2 comprising derived and/or modified sequence from HRSV(Memphis-37)__AIY60640.1__F0_DSCav1 (opt11)
gggagaggcgcugccuacggagguggcagccaucuccuucucggcaucaagcuuaccauggaacuccccauacucaagacuaaugccaucaccaccauccucgccgccgugacccucugcuucgcaucgucccaaaacauaacagaagaguucuaccaaagcacaugcuccgcagucuccaaaggauaccucuccgcacuacguaccggcugguacaccagcgucaucaccaucgaacuuuccaacaucaaagagaacaaaugcaacggcaccgacgccaaaguaaaacucauaaaacaagagcuagacaaauacaaaaacgccgucacagaacuccaacuacugaugcaauccacaccggccgccaacaaccgcgcucgacgugaacucccacgcuucaugaacuacacucuuaacaacaccaaaaauaacaacgucacccuauccaaaaagcgaaagcgcagauuccucggcuuccuacuuggcgucggcucggcgauagccucuggaaucgccguuugcaagguccuccaccuagaaggcgaaguaaacaaaaucaaaaacgcacuccuaagcaccaacaaagccgucgucucacuuuccaacggcgucucaguccucacauucaaaguucucgaccuaaagaacuacaucgacaagcaacuacuacccauacucaauaaacaauccugcuccaucagcaacaucgagacagucaucgaauuucaacaaaagaacaaccgccuccucgaaauuacacgcgaguucucagucaacgccggagucaccaccccagucucaacauacaugcucaccaacagcgaacuccugucucuaaucaacgacaugcccaucacuaacgaccagaagaaacucauguccaacaacguccaaaucgugcgacaacaaucauacucuaucaugugcaucaucaaagaagaaguccucgcauacgucguccagcucccacucuacggcguaaucgacacacccugcuggaaacuccacacaucaccccuaugcaccaccaacacaaaagaaggcuccaacaucugccuaacccgaaccgacagagguugguauugcgacaacgccggcucagucucauucuucccacaagccgaaaccuguaaaguccaaucaaaccgcgucuucugcgauaccaugaacucucucacacuccccuccgaagucaaucucugcaacauagacaucuucaauccaaaguacgacugcaaaauaaugaccucgaaaaccgacguaagcuccagcgucaucaccuccuuaggcgcaaucguauccugcuacggcaaaaccaaaugcaccgccucaaacaaaaacagaggcaucaucaaaacguucucgaacggaugcgacuacguuuccaauaaaggcguagauaccgucuccgucggcaacacacucuauuacgucaacaaacaagaaggcaaaucccucuacgucaaaggugaaccuaucaucaacuucuacgacccccucgucuuccccagcgacgaguucgaugccucaaucagccaagucaacgagaaaaucaaccaaucacuggcuuucauacgcaaauccgacgaacuccuccacaacgugaacgucggcaaauccacaaccaacaucaugauaaccacaauaaucaucgucauaaucguaauccuacuccuccuuauugccguaggacuauuccuauacugcaaagcccgauccacccccgucacccucucaaaagaccaacucuccggcaucaacaauauagccuucucuaacuaaggacuagugcaucacauuuaaaagcaucucagccuaccaugagaauaagagaaagaaaaugaagaucaauagcuuauucaucucuuuuucuuuuucguugguguaaagccaacacccugucuaaaaaacauaaauuucuuuaaucauuuugccucuuuucucugugcuucaauuaauaaaaaauggaaagaaccuagaucuaaaaaaaaaaaaaaaaaaaaaaaaaaaaaaaaaaaaaaaaaaaaaaaaaaaaaaaaaaaaaaaaugcaucccccccccccccccccccccccccccccccaaaggcucuuuucagagccaccagaauu

SEQ ID NO: 12817 - RNA, 2107 nt, Artificial Sequence
  mRNA product Design i-2 comprising derived and/or modified sequence from HRSV(Memphis-37)__AIY60640.1__F0_DSCav1 (opt1)
ggggcgcugccuacggagguggcagccaucuccuucucggcaucaagcuuaccauggagcugcccauccucaagaccaacgccaucaccacgauccuggccgcggugacccugugcuucgccagcucccagaacaucaccgaggaguucuaccagagcacgugcuccgccgucagcaagggcuaccucuccgcccugcgcaccgggugguacaccagcgugaucaccaucgagcuguccaacaucaaggagaacaagugcaacggcaccgacgccaaggugaagcucaucaagcaggagcuggacaaguacaagaacgcggucacggagcugcagcuccugaugcagagcaccccggccgccaacaaccgggcccgccgggagcugccccgcuucaugaacuacacccucaacaacaccaagaacaacaacgugacgcuguccaagaagcggaagcgccgguuccugggguuccuccugggcguggggagcgcgaucgccuccggcaucgccgucugcaaggugcugcaccucgagggcgaggugaacaagaucaagaacgcccugcuguccaccaacaaggccgucgugagccucuccaacggggugagcguccugaccuucaaggugcuggaccucaagaacuacaucgacaagcagcugcugcccauccugaacaagcagagcugcuccaucagcaacaucgagaccgucaucgaguuccagcagaagaacaaccgccuccuggagaucacgcgggaguucagcgugaacgcgggcgugaccacccccgucuccaccuacaugcugacgaacagcgagcuccugucccugaucaacgacaugccgaucaccaacgaccagaagaagcucaugagcaacaacgugcagaucgugcgccagcaguccuacagcaucaugugcaucaucaaggaggagguccuggccuacguggugcagcugccccucuacggggucaucgacacccccugcuggaagcugcacaccagcccccugugcacgaccaacaccaaggagggcuccaacaucugccucacccggacggaccgcgggugguacugcgacaacgccggcagcguguccuucuucccgcaggccgagaccugcaagguccagagcaaccggguguucugcgacaccaugaacucccugacccugcccagcgaggugaaccucugcaacaucgacaucuucaaccccaaguacgacugcaagaucaugacguccaagaccgacgucagcuccagcgugaucaccucccugggcgccaucgugagcugcuacgggaagaccaagugcacggcgagcaacaagaaccgcggcaucaucaagaccuucuccaacgggugcgacuacgucagcaacaagggcguggacaccguguccgucggcaacacccuguacuacgugaacaagcaggagggcaagagccucuacgugaagggggagcccaucaucaacuucuacgacccgcuggucuuccccuccgacgaguucgacgccagcaucucccaggugaacgagaagaucaaccagagccuggccuucauccggaaguccgacgagcuccugcacaacgugaacgucggcaagagcaccacgaacaucaugaucaccaccaucaucaucgugaucaucgugauccugcugcuccugaucgccgucgggcuguuccucuacugcaaggcccgcuccacccccgugacgcugagcaaggaccagcuguccgggaucaacaacaucgcguucagcaacugaggacuagugcaucacauuuaaaagcaucucagccuaccaugagaauaagagaaagaaaaugaagaucaauagcuuauucaucucuuuuucuuuuucguugguguaaagccaacacccugucuaaaaaacauaaauuucuuuaaucauuuugccucuuuucucugugcuucaauuaauaaaaaauggaaagaaccuagaucuaaaaaaaaaaaaaaaaaaaaaaaaaaaaaaaaaaaaaaaaaaaaaaaaaaaaaaaaaaaaaaaaugcaucccccccccccccccccccccccccccccccaaaggcucuuuucagagccaccagaauu

SEQ ID NO: 12818 - RNA, 2107 nt, Artificial Sequence
  mRNA product Design i-2 comprising derived and/or modified sequence from HRSV(Memphis-37)__AIY60640.1__F0_DSCav1 (opt1)
ggggcgcugccuacggagguggcagccaucuccuucucggcaucaagcuuaccauggagcugcccauccucaagaccaacgccaucaccacgauccuggccgcggugacccugugcuucgccagcucccagaacaucaccgaggaguucuaccagagcacgugcuccgccgucagcaagggcuaccucuccgcccugcgcaccgggugguacaccagcgugaucaccaucgagcuguccaacaucaaggagaacaagugcaacggcaccgacgccaaggugaagcucaucaagcaggagcuggacaaguacaagaacgcggucacggagcugcagcuccugaugcagagcaccccggccgccaacaaccgggcccgccgggagcugccccgcuucaugaacuacacccucaacaacaccaagaacaacaacgugacgcuguccaagaagcggaagcgccgguuccugggguuccuccugggcguggggagcgcgaucgccuccggcaucgccgucugcaaggugcugcaccucgagggcgaggugaacaagaucaagaacgcccugcugagcaccaacaaggccgucgugucccucagcaacgggguguccguccugaccuucaaggugcuggaccucaagaacuacaucgacaagcagcugcugcccauccucaacaagcagagcugcuccaucagcaacaucgagaccgugaucgaguuccagcagaagaacaaccgccugcuggagaucacgcgggaguucuccgucaacgcgggcgugaccacccccgugagcaccuacaugcucacgaacagcgagcugcugucccucaucaacgacaugccgaucaccaacgaccagaagaagcugaugagcaacaacguccagaucgugcgccagcaguccuacagcaucaugugcaucaucaaggaggaggugcuggccuacgucgugcagcucccccuguacggggugaucgacacccccugcuggaagcugcacaccagcccccucugcacgaccaacaccaaggagggcagcaacaucugccugacccggacggaccgcgggugguacugcgacaacgccggcuccgucagcuucuucccgcaggccgagaccugcaaggugcaguccaaccgggucuucugcgacaccaugaacagccugacccuccccuccgaggugaaccugugcaacaucgacaucuucaaccccaaguacgacugcaagaucaugacgagcaagaccgacguguccagcuccgucaucaccagccugggcgccaucguguccugcuacgggaagaccaagugcacggcgagcaacaagaaccgcggcaucaucaagaccuucuccaacgggugcgacuacgugagcaacaagggcgucgacaccgugagcgugggcaacacccucuacuacgucaacaagcaggaggggaagucccuguacgugaagggcgagcccaucaucaacuucuacgacccgcugguguuccccagcgacgaguucgacgccuccaucagccaggucaacgagaagaucaaccagucccucgccuucauccggaaguccgacgagcugcugcacaacgugaacguggggaaguccaccacgaacaucaugaucaccaccaucaucaucgucaucaucgugauccugcuccugcugaucgccgugggccucuuccuguacugcaaggcccgcagcacccccgucacgcuguccaaggaccagcucagcgggaucaacaacaucgcguucuccaacugaggacuagugcaucacauuuaaaagcaucucagccuaccaugagaauaagagaaagaaaaugaagaucaauagcuuauucaucucuuuuucuuuuucguugguguaaagccaacacccugucuaaaaaacauaaauuucuuuaaucauuuugccucuuuucucugugcuucaauuaauaaaaaauggaaagaaccuagaucuaaaaaaaaaaaaaaaaaaaaaaaaaaaaaaaaaaaaaaaaaaaaaaaaaaaaaaaaaaaaaaaaugcaucccccccccccccccccccccccccccccccaaaggcucuuuucagagccaccagaauu

SEQ ID NO: 12819 - RNA, 2107 nt, Artificial Sequence
  mRNA product Design i-2 comprising derived and/or modified sequence from HRSV(Memphis-37)__AIY60640.1__F0_DSCav1 (opt2)
ggggcgcugccuacggagguggcagccaucuccuucucggcaucaagcuuaccauggagcuccccauccucaagaccaacgccaucaccaccauccucgccgccgucacccucugcuucgccuccucccagaacaucaccgaggaguucuaccaguccaccugcuccgccgucuccaagggcuaccucuccgcccuccgcaccggcugguacaccuccgucaucaccaucgagcucuccaacaucaaggagaacaagugcaacggcaccgacgccaaggucaagcucaucaagcaggagcucgacaaguacaagaacgccgucaccgagcuccagcuccucaugcaguccacccccgccgccaacaaccgcgcccgccgcgagcucccccgcuucaugaacuacacccucaacaacaccaagaacaacaacgucacccucuccaagaagcgcaagcgccgcuuccucggcuuccuccucggcgucggcuccgccaucgccuccggcaucgccgucugcaagguccuccaccucgagggcgaggucaacaagaucaagaacgcccuccucuccaccaacaaggccgucgucucccucuccaacggcgucuccguccucaccuucaagguccucgaccucaagaacuacaucgacaagcagcuccuccccauccucaacaagcaguccugcuccaucuccaacaucgagaccgucaucgaguuccagcagaagaacaaccgccuccucgagaucacccgcgaguucuccgucaacgccggcgucaccacccccgucuccaccuacaugcucaccaacuccgagcuccucucccucaucaacgacaugcccaucaccaacgaccagaagaagcucauguccaacaacguccagaucguccgccagcaguccuacuccaucaugugcaucaucaaggaggagguccucgccuacgucguccagcucccccucuacggcgucaucgacacccccugcuggaagcuccacaccuccccccucugcaccaccaacaccaaggagggcuccaacaucugccucacccgcaccgaccgcggcugguacugcgacaacgccggcuccgucuccuucuucccccaggccgagaccugcaagguccaguccaaccgcgucuucugcgacaccaugaacucccucacccuccccuccgaggucaaccucugcaacaucgacaucuucaaccccaaguacgacugcaagaucaugaccuccaagaccgacgucuccuccuccgucaucaccucccucggcgccaucgucuccugcuacggcaagaccaagugcaccgccuccaacaagaaccgcggcaucaucaagaccuucuccaacggcugcgacuacgucuccaacaagggcgucgacaccgucuccgucggcaacacccucuacuacgucaacaagcaggagggcaagucccucuacgucaagggcgagcccaucaucaacuucuacgacccccucgucuuccccuccgacgaguucgacgccuccaucucccaggucaacgagaagaucaaccagucccucgccuucauccgcaaguccgacgagcuccuccacaacgucaacgucggcaaguccaccaccaacaucaugaucaccaccaucaucaucgucaucaucgucauccuccuccuccucaucgccgucggccucuuccucuacugcaaggcccgcuccacccccgucacccucuccaaggaccagcucuccggcaucaacaacaucgccuucuccaacugaggacuagugcaucacauuuaaaagcaucucagccuaccaugagaauaagagaaagaaaaugaagaucaauagcuuauucaucucuuuuucuuuuucguugguguaaagccaacacccugucuaaaaaacauaaauuucuuuaaucauuuugccucuuuucucugugcuucaauuaauaaaaaauggaaagaaccuagaucuaaaaaaaaaaaaaaaaaaaaaaaaaaaaaaaaaaaaaaaaaaaaaaaaaaaaaaaaaaaaaaaaugcaucccccccccccccccccccccccccccccccaaaggcucuuuucagagccaccagaauu

SEQ ID NO: 12820 - RNA, 2107 nt, Artificial Sequence
  mRNA product Design i-2 comprising derived and/or modified sequence from HRSV(Memphis-37)__AIY60640.1__F0_DSCav1 (opt3)
ggggcgcugccuacggagguggcagccaucuccuucucggcaucaagcuuaccauggagcugcccauccucaagaccaacgccauuacaacuauacuugcugcagugacgcugugcuucgccagcucccagaauaucaccgaagaguuuuaccaaucuacauguucagcggucaguaaaggcuauuugagcgcuuuaagaacugggugguacaccuccguuauuacaaucgaacugucuaacauuaaggagaauaaaugcaacggaaccgacgccaaggugaaacuaaucaagcaggaacucgauaaguauaaaaaugcaguaacugagcugcagcuucugaugcagucgaccccugccgcuaacaauagggcacggcgcgaguugccacgauucaugaacuacacacucaauaacacgaagaauaacaaugugacucugagcaaaaagcguaaaagaagguuucuggguuuccucuuaggcgucgggucagccauagcuaguggaaucgccguguguaagguucugcaccuugaaggcgaggugaacaagauuaaaaaugcguugcuguccaccaacaaggcagucgugucucuaagcaacgguguauccguucucacauuuaaagugcuggaccuuaagaauuauaucgauaaacaacuguugccgauucucaacaagcagucaugcaguaucagcaauauagaaacugucauugaguuccagcagaaaaacaaucggcuguuagagaucacccgcgaauuuucugugaacgccggggugacaacccccgucuccacguacaugcugacuaauucagagcuccuuagccugauuaacgacaugccuaucacaaaugaucaaaagaaguugaugaguaacaauguucagaucgugagacagcagucuuauuccauuauguguauaaucaaagaagagguacuagcuuacgugguccaacugccacucuacggagugauugacacccccugcuggaagcugcauacuagcccucuuuguacaaccaacacgaaagaaggcucgaauaucugccugaccaggacagaucggggcugguauugugacaacgccgggucuguuuccuucuuuccacaggcagagacuugcaaggugcagucaaaucgcgucuucugugauaccaugaacaguuugacacuccccagcgaggugaaccugugcaauauagacauuuuuaacccuaaauacgauugcaagaucaugacuuccaagaccgacguaucuagcucaguuaucacaaguuuaggagcuauuguguccuguuaugguaaaaccaagugcacugccagcaauaaaaaccgaggcaucauuaagacguucucuaaugggugugauuacgucucaaacaaaggaguggacacagucagugugggcaauacccuguauuacguuaacaagcaagaagguaagagccuauaugugaaaggggagccaauaaucaauuuuuacgacccgcucguauuccccuccgaugaguucgacgcgucuauuucgcaggucaacgaaaagaucaaucagagccuggccuuuaucagaaaauccgaugaacuuuugcacaacgugaauguuggaaagucaacuaccaacauuaugauaacaaccaucauuaucgugauuaucgucauacugcuccugcuuaucgcagugggccuguucuuguacugcaaagcuaggaguacuccuguaacacucucuaaggaccagcugagcggcauuaauaacaucgccuuuuccaacugaggacuagugcaucacauuuaaaagcaucucagccuaccaugagaauaagagaaagaaaaugaagaucaauagcuuauucaucucuuuuucuuuuucguugguguaaagccaacacccugucuaaaaaacauaaauuucuuuaaucauuuugccucuuuucucugugcuucaauuaauaaaaaauggaaagaaccuagaucuaaaaaaaaaaaaaaaaaaaaaaaaaaaaaaaaaaaaaaaaaaaaaaaaaaaaaaaaaaaaaaaaugcaucccccccccccccccccccccccccccccccaaaggcucuuuucagagccaccagaauu

SEQ ID NO: 12821 - RNA, 2107 nt, Artificial Sequence
  mRNA product Design i-2 comprising derived and/or modified sequence from HRSV(Memphis-37)__AIY60640.1__F0_DSCav1 (opt4)
ggggcgcugccuacggagguggcagccaucuccuucucggcaucaagcuuaccauggagcugcccauccugaagaccaacgccaucaccaccauccuggccgccgugacccugugcuucgccagcagccagaacaucaccgaggaguucuaccagagcaccugcagcgccgugagcaagggcuaccugagcgcccugagaaccggcugguacaccagcgugaucaccaucgagcugagcaacaucaaggagaacaagugcaacggcaccgacgccaaggugaagcugaucaagcaggagcuggacaaguacaagaacgccgugaccgagcugcagcugcugaugcagagcacccccgccgccaacaacagagccagaagagagcugcccagauucaugaacuacacccugaacaacaccaagaacaacaacgugacccugagcaagaagagaaagagaagauuccugggcuuccugcugggcgugggcagcgccaucgccagcggcaucgccgugugcaaggugcugcaccuggagggcgaggugaacaagaucaagaacgcccugcugagcaccaacaaggccguggugagccugagcaacggcgugagcgugcugaccuucaaggugcuggaccugaagaacuacaucgacaagcagcugcugcccauccugaacaagcagagcugcagcaucagcaacaucgagaccgugaucgaguuccagcagaagaacaacagacugcuggagaucaccagagaguucagcgugaacgccggcgugaccacccccgugagcaccuacaugcugaccaacagcgagcugcugagccugaucaacgacaugcccaucaccaacgaccagaagaagcugaugagcaacaacgugcagaucgugagacagcagagcuacagcaucaugugcaucaucaaggaggaggugcuggccuacguggugcagcugccccuguacggcgugaucgacacccccugcuggaagcugcacaccagcccccugugcaccaccaacaccaaggagggcagcaacaucugccugaccagaaccgacagaggcugguacugcgacaacgccggcagcgugagcuucuucccccaggccgagaccugcaaggugcagagcaacagaguguucugcgacaccaugaacagccugacccugcccagcgaggugaaccugugcaacaucgacaucuucaaccccaaguacgacugcaagaucaugaccagcaagaccgacgugagcagcagcgugaucaccagccugggcgccaucgugagcugcuacggcaagaccaagugcaccgccagcaacaagaacagaggcaucaucaagaccuucagcaacggcugcgacuacgugagcaacaagggcguggacaccgugagcgugggcaacacccuguacuacgugaacaagcaggagggcaagagccuguacgugaagggcgagcccaucaucaacuucuacgacccccugguguuccccagcgacgaguucgacgccagcaucagccaggugaacgagaagaucaaccagagccuggccuucaucagaaagagcgacgagcugcugcacaacgugaacgugggcaagagcaccaccaacaucaugaucaccaccaucaucaucgugaucaucgugauccugcugcugcugaucgccgugggccuguuccuguacugcaaggccagaagcacccccgugacccugagcaaggaccagcugagcggcaucaacaacaucgccuucagcaacugaggacuagugcaucacauuuaaaagcaucucagccuaccaugagaauaagagaaagaaaaugaagaucaauagcuuauucaucucuuuuucuuuuucguugguguaaagccaacacccugucuaaaaaacauaaauuucuuuaaucauuuugccucuuuucucugugcuucaauuaauaaaaaauggaaagaaccuagaucuaaaaaaaaaaaaaaaaaaaaaaaaaaaaaaaaaaaaaaaaaaaaaaaaaaaaaaaaaaaaaaaaugcaucccccccccccccccccccccccccccccccaaaggcucuuuucagagccaccagaauu

SEQ ID NO: 12822 - RNA, 2107 nt, Artificial Sequence
  mRNA product Design i-2 comprising derived and/or modified sequence from HRSV(Memphis-37)__AIY60640.1__F0_DSCav1 (opt5)
ggggcgcugccuacggagguggcagccaucuccuucucggcaucaagcuuaccauggagcugcccauccucaagaccaacgccauuacaacgauccuggcugccgugacccuuugcuucgcgagcucccagaauauuacagaagaguuuuaccaaucuaccuguagcgcugucuccaaaggcuaucugucugcccucagaacagggugguacaccagcguuaucacaauugaacuguccaacaucaaggagaauaaaugcaacggaaccgacgccaaggugaaacuuaucaagcaggaacuggauaaguauaaaaaugcugugacggagcuccagcugcugaugcagucuaccccugccgcuaacaaucgggcccgcagagagcucccgcgguucaugaacuacacacugaauaacaccaagaauaacaaugucacacuuagcaaaaagcgcaaaagacgguuucugggcuuccuccugggggugggauccgcgauugccagcggcaucgcuguuuguaaggugcuucaccuggaaggggaggucaacaagauuaaaaaugcccuccugucuaccaacaaggcugugguuucccugagcaacggagugucuguccucacguuuaaagugcuggaccuuaagaauuauaucgauaaacaacugcuccccauucugaacaagcaguccugcagcaucucuaauauugaaacagugaucgaguuccagcagaaaaacaaucgccuucuggagaucaccagagaauuuuccgucaacgccggcguuacaaccccugugagcaccuacaugcucacaaauuccgagcugcugucucucauuaacgacaugcccaucacgaaugaucaaaagaagcugaugagcaacaaugugcagauuguccggcagcaguccuauagcaucauguguauuaucaaagaagaggugcuugcguacguugugcaacugccucucuacggcgucaucgacacccccugcuggaagcugcauacaucuccucuuuguaccacaaacaccaaagaaggguccaauauuugccugacgcgcacagauagaggaugguauugugacaacgccggcagcgugucuuucuuuccgcaggcugagaccugcaagguucagagcaaucggguguucugugauaccaugaacucccucacacugcccucugaggucaaccugugcaauaucgacauuuuuaacccuaaauacgauugcaagaucaugaccagcaagacagacguguccagcucugucauuacgucccucggggccaucgugagcuguuauggaaaaaccaagugcacagcuucuaauaaaaaccgcggcaucauuaagaccuucuccaaugggugugauuacguuagcaacaaaggaguggacacagucuccgugggcaauacccuguauuacguuaacaagcaagaaggcaagucucuuuaugugaaaggggagcccaucauuaauuuuuacgacccucuggucuuccccagcgaugaguucgacgccuccaucucucaggugaacgaaaagauuaaucagagccucgccuuuaucagaaaauccgaugaacugcugcacaacgugaauguuggaaagagcacgaccaacauuaugaucacaaccaucauuaucgucauuaucgugauucuucuccugcugaucgcugugggccucuuccuguacugcaaagcgcggucuacaccggucacccuuuccaaggaccagcugagcgggaucaauaacauugccuuuucuaacugaggacuagugcaucacauuuaaaagcaucucagccuaccaugagaauaagagaaagaaaaugaagaucaauagcuuauucaucucuuuuucuuuuucguugguguaaagccaacacccugucuaaaaaacauaaauuucuuuaaucauuuugccucuuuucucugugcuucaauuaauaaaaaauggaaagaaccuagaucuaaaaaaaaaaaaaaaaaaaaaaaaaaaaaaaaaaaaaaaaaaaaaaaaaaaaaaaaaaaaaaaaugcaucccccccccccccccccccccccccccccccaaaggcucuuuucagagccaccagaauu

SEQ ID NO: 12823 - RNA, 2107 nt, Artificial Sequence
  mRNA product Design i-2 comprising derived and/or modified sequence from HRSV(Memphis-37)__AIY60640.1__F0_DSCav1 (opt6)
ggggcgcugccuacggagguggcagccaucuccuucucggcaucaagcuuaccauggaacucccaauccucaaaaccaaugccauaacaaccauacucgcugcaguaaccuuauguuucgcaaguagccaaaacauaaccgaagaauuuuaucaauccacaugcuccgcaguuucuaaaggauaucuaucagcauuaagaacuggaugguacacaucuguaauaacuauagaacuaagcaauauaaaagaaaacaaauguaacggaacugacgcuaaaguaaaacuuauaaaacaagaacuagauaaauacaaaaacgccguuaccgaacuacaacuauuaaugcaaucaacaccagccgcaaauaacagagcaagacgcgaauuaccaagauucaugaauuacacacuaaacaauacaaaaaauaacaauguaacacuaucaaaaaaaagaaaacgacgauucuuaggcuuccuacuaggagucggcucagcaauagcuuccggaauagccgucuguaaaguccuacaccuugaaggcgaaguaaacaaaaucaaaaacgcacuauuaucaacaaacaaagcagucguaucuuuauccaacggagucucaguccuaacauucaaaguacucgauuuaaaaaacuacaucgauaaacaacuccuucccauucuaaacaaacaauccugcucaauauccaacaucgaaacagucauagaauuucaacaaaaaaacaaccgccugcuagaaauaacaagagaauuuuccguaaaugccggcgucaccacaccaguaucaacauacaugcuaacaaacuccgaacuacucucccuaauaaacgauaugccaaucaccaacgaccaaaaaaaacuaaugucaaauaacguucaaauagucagacaacaaucauacagcauaaugugcauaauaaaagaagaagucuuagccuacguuguacaacucccauuauacggaguuaucgauacaccaugcuggaaauuacacacaucacccuuaugcaccacaaacacaaaagaaggauccaauauuugucuaacacgaacagacagaggaugguacugugauaacgcaggaucagugucauucuuuccacaagcagaaacauguaaaguucaaucuaacagaguauucugcgacaccaugaacucccuaaccuuacccucagaaguaaaucuaugcaacauagauaucuuuaacccaaaauacgacugcaaaaucaugacaucaaaaacugacguuucuucauccguuauaacuucccucggcgcuauaguguccugcuacggaaaaacuaaaugcacagcauccaacaaaaauagaggaauaauaaaaacauuuuccaacggcugcgacuauguuucaaacaaaggaguagauaccguaucagucggcaauacauuauauuauguuaacaaacaagaaggaaaaucccuauacguaaaaggagaaccuauaaucaacuucuacgacccacucguauuccccucagacgaauuugacgcaucuauaucucaaguaaaugaaaaaauaaaccaaucacucgcauuuauccgcaaaucugacgaauuacuccauaacgucaacgucggcaaaucaaccaccaacauaaugauaacaacaauuauaauaguaauaauugucauacuacuacuccuaauagcaguaggucuauuccuauacugcaaagcaagauccacccccguaacccuuuccaaagaucaacucucaggaauaaauaacauagccuuuucaaacuaaggacuagugcaucacauuuaaaagcaucucagccuaccaugagaauaagagaaagaaaaugaagaucaauagcuuauucaucucuuuuucuuuuucguugguguaaagccaacacccugucuaaaaaacauaaauuucuuuaaucauuuugccucuuuucucugugcuucaauuaauaaaaaauggaaagaaccuagaucuaaaaaaaaaaaaaaaaaaaaaaaaaaaaaaaaaaaaaaaaaaaaaaaaaaaaaaaaaaaaaaaaugcaucccccccccccccccccccccccccccccccaaaggcucuuuucagagccaccagaauu

SEQ ID NO: 12824 - RNA, 2107 nt, Artificial Sequence
  mRNA product Design i-2 comprising derived and/or modified sequence from HRSV(Memphis-37)__AIY60640.1__F0_DSCav1 (opt11)
ggggcgcugccuacggagguggcagccaucuccuucucggcaucaagcuuaccauggaacuccccauacucaagacuaaugccaucaccaccauccucgccgccgugacccucugcuucgcaucgucccaaaacauaacagaagaguucuaccaaagcacaugcuccgcagucuccaaaggauaccucuccgcacuacguaccggcugguacaccagcgucaucaccaucgaacuuuccaacaucaaagagaacaaaugcaacggcaccgacgccaaaguaaaacucauaaaacaagagcuagacaaauacaaaaacgccgucacagaacuccaacuacugaugcaauccacaccggccgccaacaaccgcgcucgacgugaacucccacgcuucaugaacuacacucuuaacaacaccaaaaauaacaacgucacccuauccaaaaagcgaaagcgcagauuccucggcuuccuacuuggcgucggcucggcgauagccucuggaaucgccguuugcaagguccuccaccuagaaggcgaaguaaacaaaaucaaaaacgcacuccuaagcaccaacaaagccgucgucucacuuuccaacggcgucucaguccucacauucaaaguucucgaccuaaagaacuacaucgacaagcaacuacuacccauacucaauaaacaauccugcuccaucagcaacaucgagacagucaucgaauuucaacaaaagaacaaccgccuccucgaaauuacacgcgaguucucagucaacgccggagucaccaccccagucucaacauacaugcucaccaacagcgaacuccugucucuaaucaacgacaugcccaucacuaacgaccagaagaaacucauguccaacaacguccaaaucgugcgacaacaaucauacucuaucaugugcaucaucaaagaagaaguccucgcauacgucguccagcucccacucuacggcguaaucgacacacccugcuggaaacuccacacaucaccccuaugcaccaccaacacaaaagaaggcuccaacaucugccuaacccgaaccgacagagguugguauugcgacaacgccggcucagucucauucuucccacaagccgaaaccuguaaaguccaaucaaaccgcgucuucugcgauaccaugaacucucucacacuccccuccgaagucaaucucugcaacauagacaucuucaauccaaaguacgacugcaaaauaaugaccucgaaaaccgacguaagcuccagcgucaucaccuccuuaggcgcaaucguauccugcuacggcaaaaccaaaugcaccgccucaaacaaaaacagaggcaucaucaaaacguucucgaacggaugcgacuacguuuccaauaaaggcguagauaccgucuccgucggcaacacacucuauuacgucaacaaacaagaaggcaaaucccucuacgucaaaggugaaccuaucaucaacuucuacgacccccucgucuuccccagcgacgaguucgaugccucaaucagccaagucaacgagaaaaucaaccaaucacuggcuuucauacgcaaauccgacgaacuccuccacaacgugaacgucggcaaauccacaaccaacaucaugauaaccacaauaaucaucgucauaaucguaauccuacuccuccuuauugccguaggacuauuccuauacugcaaagcccgauccacccccgucacccucucaaaagaccaacucuccggcaucaacaauauagccuucucuaacuaaggacuagugcaucacauuuaaaagcaucucagccuaccaugagaauaagagaaagaaaaugaagaucaauagcuuauucaucucuuuuucuuuuucguugguguaaagccaacacccugucuaaaaaacauaaauuucuuuaaucauuuugccucuuuucucugugcuucaauuaauaaaaaauggaaagaaccuagaucuaaaaaaaaaaaaaaaaaaaaaaaaaaaaaaaaaaaaaaaaaaaaaaaaaaaaaaaaaaaaaaaaugcaucccccccccccccccccccccccccccccccaaaggcucuuuucagagccaccagaauu

SEQ ID NO: 12825 - RNA, 1942 nt, Artificial Sequence
  mRNA product Design i-3 comprising derived and/or modified sequence from HRSV(Memphis-37)__AIY60640.1__F0_DSCav1 (opt1)
gggagaaagcuuaccauggagcugcccauccucaagaccaacgccaucaccacgauccuggccgcggugacccugugcuucgccagcucccagaacaucaccgaggaguucuaccagagcacgugcuccgccgucagcaagggcuaccucuccgcccugcgcaccgggugguacaccagcgugaucaccaucgagcuguccaacaucaaggagaacaagugcaacggcaccgacgccaaggugaagcucaucaagcaggagcuggacaaguacaagaacgcggucacggagcugcagcuccugaugcagagcaccccggccgccaacaaccgggcccgccgggagcugccccgcuucaugaacuacacccucaacaacaccaagaacaacaacgugacgcuguccaagaagcggaagcgccgguuccugggguuccuccugggcguggggagcgcgaucgccuccggcaucgccgucugcaaggugcugcaccucgagggcgaggugaacaagaucaagaacgcccugcuguccaccaacaaggccgucgugagccucuccaacggggugagcguccugaccuucaaggugcuggaccucaagaacuacaucgacaagcagcugcugcccauccugaacaagcagagcugcuccaucagcaacaucgagaccgucaucgaguuccagcagaagaacaaccgccuccuggagaucacgcgggaguucagcgugaacgcgggcgugaccacccccgucuccaccuacaugcugacgaacagcgagcuccugucccugaucaacgacaugccgaucaccaacgaccagaagaagcucaugagcaacaacgugcagaucgugcgccagcaguccuacagcaucaugugcaucaucaaggaggagguccuggccuacguggugcagcugccccucuacggggucaucgacacccccugcuggaagcugcacaccagcccccugugcacgaccaacaccaaggagggcuccaacaucugccucacccggacggaccgcgggugguacugcgacaacgccggcagcguguccuucuucccgcaggccgagaccugcaagguccagagcaaccggguguucugcgacaccaugaacucccugacccugcccagcgaggugaaccucugcaacaucgacaucuucaaccccaaguacgacugcaagaucaugacguccaagaccgacgucagcuccagcgugaucaccucccugggcgccaucgugagcugcuacgggaagaccaagugcacggcgagcaacaagaaccgcggcaucaucaagaccuucuccaacgggugcgacuacgucagcaacaagggcguggacaccguguccgucggcaacacccuguacuacgugaacaagcaggagggcaagagccucuacgugaagggggagcccaucaucaacuucuacgacccgcuggucuuccccuccgacgaguucgacgccagcaucucccaggugaacgagaagaucaaccagagccuggccuucauccggaaguccgacgagcuccugcacaacgugaacgucggcaagagcaccacgaacaucaugaucaccaccaucaucaucgugaucaucgugauccugcugcuccugaucgccgucgggcuguuccucuacugcaaggcccgcuccacccccgugacgcugagcaaggaccagcuguccgggaucaacaacaucgcguucagcaacugaggacuaguuauaagacugacuagcccgaugggccucccaacgggcccuccuccccuccuugcaccgagauuaauaaaaaaaaaaaaaaaaaaaaaaaaaaaaaaaaaaaaaaaaaaaaaaaaaaaaaaaaaaaaaaaaugcaucccccccccccccccccccccccccccccccaaaggcucuuuucagagccaccagaauu

SEQ ID NO: 12826 - RNA, 1942 nt, Artificial Sequence
  mRNA product Design i-3 comprising derived and/or modified sequence from HRSV(Memphis-37)__AIY60640.1__F0_DSCav1 (opt1)
gggagaaagcuuaccauggagcugcccauccucaagaccaacgccaucaccacgauccuggccgcggugacccugugcuucgccagcucccagaacaucaccgaggaguucuaccagagcacgugcuccgccgucagcaagggcuaccucuccgcccugcgcaccgggugguacaccagcgugaucaccaucgagcuguccaacaucaaggagaacaagugcaacggcaccgacgccaaggugaagcucaucaagcaggagcuggacaaguacaagaacgcggucacggagcugcagcuccugaugcagagcaccccggccgccaacaaccgggcccgccgggagcugccccgcuucaugaacuacacccucaacaacaccaagaacaacaacgugacgcuguccaagaagcggaagcgccgguuccugggguuccuccugggcguggggagcgcgaucgccuccggcaucgccgucugcaaggugcugcaccucgagggcgaggugaacaagaucaagaacgcccugcugagcaccaacaaggccgucgugucccucagcaacgggguguccguccugaccuucaaggugcuggaccucaagaacuacaucgacaagcagcugcugcccauccucaacaagcagagcugcuccaucagcaacaucgagaccgugaucgaguuccagcagaagaacaaccgccugcuggagaucacgcgggaguucuccgucaacgcgggcgugaccacccccgugagcaccuacaugcucacgaacagcgagcugcugucccucaucaacgacaugccgaucaccaacgaccagaagaagcugaugagcaacaacguccagaucgugcgccagcaguccuacagcaucaugugcaucaucaaggaggaggugcuggccuacgucgugcagcucccccuguacggggugaucgacacccccugcuggaagcugcacaccagcccccucugcacgaccaacaccaaggagggcagcaacaucugccugacccggacggaccgcgggugguacugcgacaacgccggcuccgucagcuucuucccgcaggccgagaccugcaaggugcaguccaaccgggucuucugcgacaccaugaacagccugacccuccccuccgaggugaaccugugcaacaucgacaucuucaaccccaaguacgacugcaagaucaugacgagcaagaccgacguguccagcuccgucaucaccagccugggcgccaucguguccugcuacgggaagaccaagugcacggcgagcaacaagaaccgcggcaucaucaagaccuucuccaacgggugcgacuacgugagcaacaagggcgucgacaccgugagcgugggcaacacccucuacuacgucaacaagcaggaggggaagucccuguacgugaagggcgagcccaucaucaacuucuacgacccgcugguguuccccagcgacgaguucgacgccuccaucagccaggucaacgagaagaucaaccagucccucgccuucauccggaaguccgacgagcugcugcacaacgugaacguggggaaguccaccacgaacaucaugaucaccaccaucaucaucgucaucaucgugauccugcuccugcugaucgccgugggccucuuccuguacugcaaggcccgcagcacccccgucacgcuguccaaggaccagcucagcgggaucaacaacaucgcguucuccaacugaggacuaguuauaagacugacuagcccgaugggccucccaacgggcccuccuccccuccuugcaccgagauuaauaaaaaaaaaaaaaaaaaaaaaaaaaaaaaaaaaaaaaaaaaaaaaaaaaaaaaaaaaaaaaaaaugcaucccccccccccccccccccccccccccccccaaaggcucuuuucagagccaccagaauu

SEQ ID NO: 12827 - RNA, 1942 nt, Artificial Sequence
  mRNA product Design i-3 comprising derived and/or modified sequence from HRSV(Memphis-37)__AIY60640.1__F0_DSCav1 (opt2)
gggagaaagcuuaccauggagcuccccauccucaagaccaacgccaucaccaccauccucgccgccgucacccucugcuucgccuccucccagaacaucaccgaggaguucuaccaguccaccugcuccgccgucuccaagggcuaccucuccgcccuccgcaccggcugguacaccuccgucaucaccaucgagcucuccaacaucaaggagaacaagugcaacggcaccgacgccaaggucaagcucaucaagcaggagcucgacaaguacaagaacgccgucaccgagcuccagcuccucaugcaguccacccccgccgccaacaaccgcgcccgccgcgagcucccccgcuucaugaacuacacccucaacaacaccaagaacaacaacgucacccucuccaagaagcgcaagcgccgcuuccucggcuuccuccucggcgucggcuccgccaucgccuccggcaucgccgucugcaagguccuccaccucgagggcgaggucaacaagaucaagaacgcccuccucuccaccaacaaggccgucgucucccucuccaacggcgucuccguccucaccuucaagguccucgaccucaagaacuacaucgacaagcagcuccuccccauccucaacaagcaguccugcuccaucuccaacaucgagaccgucaucgaguuccagcagaagaacaaccgccuccucgagaucacccgcgaguucuccgucaacgccggcgucaccacccccgucuccaccuacaugcucaccaacuccgagcuccucucccucaucaacgacaugcccaucaccaacgaccagaagaagcucauguccaacaacguccagaucguccgccagcaguccuacuccaucaugugcaucaucaaggaggagguccucgccuacgucguccagcucccccucuacggcgucaucgacacccccugcuggaagcuccacaccuccccccucugcaccaccaacaccaaggagggcuccaacaucugccucacccgcaccgaccgcggcugguacugcgacaacgccggcuccgucuccuucuucccccaggccgagaccugcaagguccaguccaaccgcgucuucugcgacaccaugaacucccucacccuccccuccgaggucaaccucugcaacaucgacaucuucaaccccaaguacgacugcaagaucaugaccuccaagaccgacgucuccuccuccgucaucaccucccucggcgccaucgucuccugcuacggcaagaccaagugcaccgccuccaacaagaaccgcggcaucaucaagaccuucuccaacggcugcgacuacgucuccaacaagggcgucgacaccgucuccgucggcaacacccucuacuacgucaacaagcaggagggcaagucccucuacgucaagggcgagcccaucaucaacuucuacgacccccucgucuuccccuccgacgaguucgacgccuccaucucccaggucaacgagaagaucaaccagucccucgccuucauccgcaaguccgacgagcuccuccacaacgucaacgucggcaaguccaccaccaacaucaugaucaccaccaucaucaucgucaucaucgucauccuccuccuccucaucgccgucggccucuuccucuacugcaaggcccgcuccacccccgucacccucuccaaggaccagcucuccggcaucaacaacaucgccuucuccaacugaggacuaguuauaagacugacuagcccgaugggccucccaacgggcccuccuccccuccuugcaccgagauuaauaaaaaaaaaaaaaaaaaaaaaaaaaaaaaaaaaaaaaaaaaaaaaaaaaaaaaaaaaaaaaaaaugcaucccccccccccccccccccccccccccccccaaaggcucuuuucagagccaccagaauu

SEQ ID NO: 12828 - RNA, 1942 nt, Artificial Sequence
  mRNA product Design i-3 comprising derived and/or modified sequence from HRSV(Memphis-37)__AIY60640.1__F0_DSCav1 (opt3)
gggagaaagcuuaccauggagcugcccauccucaagaccaacgccauuacaacuauacuugcugcagugacgcugugcuucgccagcucccagaauaucaccgaagaguuuuaccaaucuacauguucagcggucaguaaaggcuauuugagcgcuuuaagaacugggugguacaccuccguuauuacaaucgaacugucuaacauuaaggagaauaaaugcaacggaaccgacgccaaggugaaacuaaucaagcaggaacucgauaaguauaaaaaugcaguaacugagcugcagcuucugaugcagucgaccccugccgcuaacaauagggcacggcgcgaguugccacgauucaugaacuacacacucaauaacacgaagaauaacaaugugacucugagcaaaaagcguaaaagaagguuucuggguuuccucuuaggcgucgggucagccauagcuaguggaaucgccguguguaagguucugcaccuugaaggcgaggugaacaagauuaaaaaugcguugcuguccaccaacaaggcagucgugucucuaagcaacgguguauccguucucacauuuaaagugcuggaccuuaagaauuauaucgauaaacaacuguugccgauucucaacaagcagucaugcaguaucagcaauauagaaacugucauugaguuccagcagaaaaacaaucggcuguuagagaucacccgcgaauuuucugugaacgccggggugacaacccccgucuccacguacaugcugacuaauucagagcuccuuagccugauuaacgacaugccuaucacaaaugaucaaaagaaguugaugaguaacaauguucagaucgugagacagcagucuuauuccauuauguguauaaucaaagaagagguacuagcuuacgugguccaacugccacucuacggagugauugacacccccugcuggaagcugcauacuagcccucuuuguacaaccaacacgaaagaaggcucgaauaucugccugaccaggacagaucggggcugguauugugacaacgccgggucuguuuccuucuuuccacaggcagagacuugcaaggugcagucaaaucgcgucuucugugauaccaugaacaguuugacacuccccagcgaggugaaccugugcaauauagacauuuuuaacccuaaauacgauugcaagaucaugacuuccaagaccgacguaucuagcucaguuaucacaaguuuaggagcuauuguguccuguuaugguaaaaccaagugcacugccagcaauaaaaaccgaggcaucauuaagacguucucuaaugggugugauuacgucucaaacaaaggaguggacacagucagugugggcaauacccuguauuacguuaacaagcaagaagguaagagccuauaugugaaaggggagccaauaaucaauuuuuacgacccgcucguauuccccuccgaugaguucgacgcgucuauuucgcaggucaacgaaaagaucaaucagagccuggccuuuaucagaaaauccgaugaacuuuugcacaacgugaauguuggaaagucaacuaccaacauuaugauaacaaccaucauuaucgugauuaucgucauacugcuccugcuuaucgcagugggccuguucuuguacugcaaagcuaggaguacuccuguaacacucucuaaggaccagcugagcggcauuaauaacaucgccuuuuccaacugaggacuaguuauaagacugacuagcccgaugggccucccaacgggcccuccuccccuccuugcaccgagauuaauaaaaaaaaaaaaaaaaaaaaaaaaaaaaaaaaaaaaaaaaaaaaaaaaaaaaaaaaaaaaaaaaugcaucccccccccccccccccccccccccccccccaaaggcucuuuucagagccaccagaauu

SEQ ID NO: 12829 - RNA, 1942 nt, Artificial Sequence
  mRNA product Design i-3 comprising derived and/or modified sequence from HRSV(Memphis-37)__AIY60640.1__F0_DSCav1 (opt4)
gggagaaagcuuaccauggagcugcccauccugaagaccaacgccaucaccaccauccuggccgccgugacccugugcuucgccagcagccagaacaucaccgaggaguucuaccagagcaccugcagcgccgugagcaagggcuaccugagcgcccugagaaccggcugguacaccagcgugaucaccaucgagcugagcaacaucaaggagaacaagugcaacggcaccgacgccaaggugaagcugaucaagcaggagcuggacaaguacaagaacgccgugaccgagcugcagcugcugaugcagagcacccccgccgccaacaacagagccagaagagagcugcccagauucaugaacuacacccugaacaacaccaagaacaacaacgugacccugagcaagaagagaaagagaagauuccugggcuuccugcugggcgugggcagcgccaucgccagcggcaucgccgugugcaaggugcugcaccuggagggcgaggugaacaagaucaagaacgcccugcugagcaccaacaaggccguggugagccugagcaacggcgugagcgugcugaccuucaaggugcuggaccugaagaacuacaucgacaagcagcugcugcccauccugaacaagcagagcugcagcaucagcaacaucgagaccgugaucgaguuccagcagaagaacaacagacugcuggagaucaccagagaguucagcgugaacgccggcgugaccacccccgugagcaccuacaugcugaccaacagcgagcugcugagccugaucaacgacaugcccaucaccaacgaccagaagaagcugaugagcaacaacgugcagaucgugagacagcagagcuacagcaucaugugcaucaucaaggaggaggugcuggccuacguggugcagcugccccuguacggcgugaucgacacccccugcuggaagcugcacaccagcccccugugcaccaccaacaccaaggagggcagcaacaucugccugaccagaaccgacagaggcugguacugcgacaacgccggcagcgugagcuucuucccccaggccgagaccugcaaggugcagagcaacagaguguucugcgacaccaugaacagccugacccugcccagcgaggugaaccugugcaacaucgacaucuucaaccccaaguacgacugcaagaucaugaccagcaagaccgacgugagcagcagcgugaucaccagccugggcgccaucgugagcugcuacggcaagaccaagugcaccgccagcaacaagaacagaggcaucaucaagaccuucagcaacggcugcgacuacgugagcaacaagggcguggacaccgugagcgugggcaacacccuguacuacgugaacaagcaggagggcaagagccuguacgugaagggcgagcccaucaucaacuucuacgacccccugguguuccccagcgacgaguucgacgccagcaucagccaggugaacgagaagaucaaccagagccuggccuucaucagaaagagcgacgagcugcugcacaacgugaacgugggcaagagcaccaccaacaucaugaucaccaccaucaucaucgugaucaucgugauccugcugcugcugaucgccgugggccuguuccuguacugcaaggccagaagcacccccgugacccugagcaaggaccagcugagcggcaucaacaacaucgccuucagcaacugaggacuaguuauaagacugacuagcccgaugggccucccaacgggcccuccuccccuccuugcaccgagauuaauaaaaaaaaaaaaaaaaaaaaaaaaaaaaaaaaaaaaaaaaaaaaaaaaaaaaaaaaaaaaaaaaugcaucccccccccccccccccccccccccccccccaaaggcucuuuucagagccaccagaauu

SEQ ID NO: 12830 - RNA, 1942 nt, Artificial Sequence
  mRNA product Design i-3 comprising derived and/or modified sequence from HRSV(Memphis-37)__AIY60640.1__F0_DSCav1 (opt5)
gggagaaagcuuaccauggagcugcccauccucaagaccaacgccauuacaacgauccuggcugccgugacccuuugcuucgcgagcucccagaauauuacagaagaguuuuaccaaucuaccuguagcgcugucuccaaaggcuaucugucugcccucagaacagggugguacaccagcguuaucacaauugaacuguccaacaucaaggagaauaaaugcaacggaaccgacgccaaggugaaacuuaucaagcaggaacuggauaaguauaaaaaugcugugacggagcuccagcugcugaugcagucuaccccugccgcuaacaaucgggcccgcagagagcucccgcgguucaugaacuacacacugaauaacaccaagaauaacaaugucacacuuagcaaaaagcgcaaaagacgguuucugggcuuccuccugggggugggauccgcgauugccagcggcaucgcuguuuguaaggugcuucaccuggaaggggaggucaacaagauuaaaaaugcccuccugucuaccaacaaggcugugguuucccugagcaacggagugucuguccucacguuuaaagugcuggaccuuaagaauuauaucgauaaacaacugcuccccauucugaacaagcaguccugcagcaucucuaauauugaaacagugaucgaguuccagcagaaaaacaaucgccuucuggagaucaccagagaauuuuccgucaacgccggcguuacaaccccugugagcaccuacaugcucacaaauuccgagcugcugucucucauuaacgacaugcccaucacgaaugaucaaaagaagcugaugagcaacaaugugcagauuguccggcagcaguccuauagcaucauguguauuaucaaagaagaggugcuugcguacguugugcaacugccucucuacggcgucaucgacacccccugcuggaagcugcauacaucuccucuuuguaccacaaacaccaaagaaggguccaauauuugccugacgcgcacagauagaggaugguauugugacaacgccggcagcgugucuuucuuuccgcaggcugagaccugcaagguucagagcaaucggguguucugugauaccaugaacucccucacacugcccucugaggucaaccugugcaauaucgacauuuuuaacccuaaauacgauugcaagaucaugaccagcaagacagacguguccagcucugucauuacgucccucggggccaucgugagcuguuauggaaaaaccaagugcacagcuucuaauaaaaaccgcggcaucauuaagaccuucuccaaugggugugauuacguuagcaacaaaggaguggacacagucuccgugggcaauacccuguauuacguuaacaagcaagaaggcaagucucuuuaugugaaaggggagcccaucauuaauuuuuacgacccucuggucuuccccagcgaugaguucgacgccuccaucucucaggugaacgaaaagauuaaucagagccucgccuuuaucagaaaauccgaugaacugcugcacaacgugaauguuggaaagagcacgaccaacauuaugaucacaaccaucauuaucgucauuaucgugauucuucuccugcugaucgcugugggccucuuccuguacugcaaagcgcggucuacaccggucacccuuuccaaggaccagcugagcgggaucaauaacauugccuuuucuaacugaggacuaguuauaagacugacuagcccgaugggccucccaacgggcccuccuccccuccuugcaccgagauuaauaaaaaaaaaaaaaaaaaaaaaaaaaaaaaaaaaaaaaaaaaaaaaaaaaaaaaaaaaaaaaaaaugcaucccccccccccccccccccccccccccccccaaaggcucuuuucagagccaccagaauu

SEQ ID NO: 12831 - RNA, 1942 nt, Artificial Sequence
  mRNA product Design i-3 comprising derived and/or modified sequence from HRSV(Memphis-37)__AIY60640.1__F0_DSCav1 (opt6)
gggagaaagcuuaccauggaacucccaauccucaaaaccaaugccauaacaaccauacucgcugcaguaaccuuauguuucgcaaguagccaaaacauaaccgaagaauuuuaucaauccacaugcuccgcaguuucuaaaggauaucuaucagcauuaagaacuggaugguacacaucuguaauaacuauagaacuaagcaauauaaaagaaaacaaauguaacggaacugacgcuaaaguaaaacuuauaaaacaagaacuagauaaauacaaaaacgccguuaccgaacuacaacuauuaaugcaaucaacaccagccgcaaauaacagagcaagacgcgaauuaccaagauucaugaauuacacacuaaacaauacaaaaaauaacaauguaacacuaucaaaaaaaagaaaacgacgauucuuaggcuuccuacuaggagucggcucagcaauagcuuccggaauagccgucuguaaaguccuacaccuugaaggcgaaguaaacaaaaucaaaaacgcacuauuaucaacaaacaaagcagucguaucuuuauccaacggagucucaguccuaacauucaaaguacucgauuuaaaaaacuacaucgauaaacaacuccuucccauucuaaacaaacaauccugcucaauauccaacaucgaaacagucauagaauuucaacaaaaaaacaaccgccugcuagaaauaacaagagaauuuuccguaaaugccggcgucaccacaccaguaucaacauacaugcuaacaaacuccgaacuacucucccuaauaaacgauaugccaaucaccaacgaccaaaaaaaacuaaugucaaauaacguucaaauagucagacaacaaucauacagcauaaugugcauaauaaaagaagaagucuuagccuacguuguacaacucccauuauacggaguuaucgauacaccaugcuggaaauuacacacaucacccuuaugcaccacaaacacaaaagaaggauccaauauuugucuaacacgaacagacagaggaugguacugugauaacgcaggaucagugucauucuuuccacaagcagaaacauguaaaguucaaucuaacagaguauucugcgacaccaugaacucccuaaccuuacccucagaaguaaaucuaugcaacauagauaucuuuaacccaaaauacgacugcaaaaucaugacaucaaaaacugacguuucuucauccguuauaacuucccucggcgcuauaguguccugcuacggaaaaacuaaaugcacagcauccaacaaaaauagaggaauaauaaaaacauuuuccaacggcugcgacuauguuucaaacaaaggaguagauaccguaucagucggcaauacauuauauuauguuaacaaacaagaaggaaaaucccuauacguaaaaggagaaccuauaaucaacuucuacgacccacucguauuccccucagacgaauuugacgcaucuauaucucaaguaaaugaaaaaauaaaccaaucacucgcauuuauccgcaaaucugacgaauuacuccauaacgucaacgucggcaaaucaaccaccaacauaaugauaacaacaauuauaauaguaauaauugucauacuacuacuccuaauagcaguaggucuauuccuauacugcaaagcaagauccacccccguaacccuuuccaaagaucaacucucaggaauaaauaacauagccuuuucaaacuaaggacuaguuauaagacugacuagcccgaugggccucccaacgggcccuccuccccuccuugcaccgagauuaauaaaaaaaaaaaaaaaaaaaaaaaaaaaaaaaaaaaaaaaaaaaaaaaaaaaaaaaaaaaaaaaaugcaucccccccccccccccccccccccccccccccaaaggcucuuuucagagccaccagaauu

SEQ ID NO: 12832 - RNA, 1942 nt, Artificial Sequence
  mRNA product Design i-3 comprising derived and/or modified sequence from HRSV(Memphis-37)__AIY60640.1__F0_DSCav1 (opt11)
gggagaaagcuuaccauggaacuccccauacucaagacuaaugccaucaccaccauccucgccgccgugacccucugcuucgcaucgucccaaaacauaacagaagaguucuaccaaagcacaugcuccgcagucuccaaaggauaccucuccgcacuacguaccggcugguacaccagcgucaucaccaucgaacuuuccaacaucaaagagaacaaaugcaacggcaccgacgccaaaguaaaacucauaaaacaagagcuagacaaauacaaaaacgccgucacagaacuccaacuacugaugcaauccacaccggccgccaacaaccgcgcucgacgugaacucccacgcuucaugaacuacacucuuaacaacaccaaaaauaacaacgucacccuauccaaaaagcgaaagcgcagauuccucggcuuccuacuuggcgucggcucggcgauagccucuggaaucgccguuugcaagguccuccaccuagaaggcgaaguaaacaaaaucaaaaacgcacuccuaagcaccaacaaagccgucgucucacuuuccaacggcgucucaguccucacauucaaaguucucgaccuaaagaacuacaucgacaagcaacuacuacccauacucaauaaacaauccugcuccaucagcaacaucgagacagucaucgaauuucaacaaaagaacaaccgccuccucgaaauuacacgcgaguucucagucaacgccggagucaccaccccagucucaacauacaugcucaccaacagcgaacuccugucucuaaucaacgacaugcccaucacuaacgaccagaagaaacucauguccaacaacguccaaaucgugcgacaacaaucauacucuaucaugugcaucaucaaagaagaaguccucgcauacgucguccagcucccacucuacggcguaaucgacacacccugcuggaaacuccacacaucaccccuaugcaccaccaacacaaaagaaggcuccaacaucugccuaacccgaaccgacagagguugguauugcgacaacgccggcucagucucauucuucccacaagccgaaaccuguaaaguccaaucaaaccgcgucuucugcgauaccaugaacucucucacacuccccuccgaagucaaucucugcaacauagacaucuucaauccaaaguacgacugcaaaauaaugaccucgaaaaccgacguaagcuccagcgucaucaccuccuuaggcgcaaucguauccugcuacggcaaaaccaaaugcaccgccucaaacaaaaacagaggcaucaucaaaacguucucgaacggaugcgacuacguuuccaauaaaggcguagauaccgucuccgucggcaacacacucuauuacgucaacaaacaagaaggcaaaucccucuacgucaaaggugaaccuaucaucaacuucuacgacccccucgucuuccccagcgacgaguucgaugccucaaucagccaagucaacgagaaaaucaaccaaucacuggcuuucauacgcaaauccgacgaacuccuccacaacgugaacgucggcaaauccacaaccaacaucaugauaaccacaauaaucaucgucauaaucguaauccuacuccuccuuauugccguaggacuauuccuauacugcaaagcccgauccacccccgucacccucucaaaagaccaacucuccggcaucaacaauauagccuucucuaacuaaggacuaguuauaagacugacuagcccgaugggccucccaacgggcccuccuccccuccuugcaccgagauuaauaaaaaaaaaaaaaaaaaaaaaaaaaaaaaaaaaaaaaaaaaaaaaaaaaaaaaaaaaaaaaaaaugcaucccccccccccccccccccccccccccccccaaaggcucuuuucagagccaccagaauu

SEQ ID NO: 12833 - protein, 553 aa, Artificial Sequence
  derived and/or modified protein sequence (artificial) from HRSV(Memphis-37)__AIY60640.1__F-del_DSCav1
MELPILKTNAITTILAAVTLCFASSQNITEEFYQSTCSAVSKGYLSALRTGWYTSVITIELSNIKENKCNGTDAKVKLIKQELDKYKNAVTELQLLMQSTPAANNRARRELPRFMNYTLNNTKNNNVTLSKKRKRRFLGFLLGVGSAIASGIAVCKVLHLEGEVNKIKNALLSTNKAVVSLSNGVSVLTFKVLDLKNYIDKQLLPILNKQSCSISNIETVIEFQQKNNRLLEITREFSVNAGVTTPVSTYMLTNSELLSLINDMPITNDQKKLMSNNVQIVRQQSYSIMCIIKEEVLAYVVQLPLYGVIDTPCWKLHTSPLCTTNTKEGSNICLTRTDRGWYCDNAGSVSFFPQAETCKVQSNRVFCDTMNSLTLPSEVNLCNIDIFNPKYDCKIMTSKTDVSSSVITSLGAIVSCYGKTKCTASNKNRGIIKTFSNGCDYVSNKGVDTVSVGNTLYYVNKQEGKSLYVKGEPIINFYDPLVFPSDEFDASISQVNEKINQSLAFIRKSDELLHNVNVGKSTTNIMITTIIIVIIVILLLLIAVGLFLYCKAR

SEQ ID NO: 12834 - RNA, 1662 nt, Artificial Sequence
  derived and/or modified CDS sequence (opt1) from HRSV(Memphis-37)__AIY60640.1__F-del_DSCav1
auggagcugcccauccucaagaccaacgccaucaccacgauccuggccgcggugacccugugcuucgccagcucccagaacaucaccgaggaguucuaccagagcacgugcuccgccgucagcaagggcuaccucuccgcccugcgcaccgggugguacaccagcgugaucaccaucgagcuguccaacaucaaggagaacaagugcaacggcaccgacgccaaggugaagcucaucaagcaggagcuggacaaguacaagaacgcggucacggagcugcagcuccugaugcagagcaccccggccgccaacaaccgggcccgccgggagcugccccgcuucaugaacuacacccucaacaacaccaagaacaacaacgugacgcuguccaagaagcggaagcgccgguuccugggguuccuccugggcguggggagcgcgaucgccuccggcaucgccgucugcaaggugcugcaccucgagggcgaggugaacaagaucaagaacgcccugcuguccaccaacaaggccgucgugagccucuccaacggggugagcguccugaccuucaaggugcuggaccucaagaacuacaucgacaagcagcugcugcccauccugaacaagcagagcugcuccaucagcaacaucgagaccgucaucgaguuccagcagaagaacaaccgccuccuggagaucacgcgggaguucagcgugaacgcgggcgugaccacccccgucuccaccuacaugcugacgaacagcgagcuccugucccugaucaacgacaugccgaucaccaacgaccagaagaagcucaugagcaacaacgugcagaucgugcgccagcaguccuacagcaucaugugcaucaucaaggaggagguccuggccuacguggugcagcugccccucuacggggucaucgacacccccugcuggaagcugcacaccagcccccugugcacgaccaacaccaaggagggcuccaacaucugccucacccggacggaccgcgggugguacugcgacaacgccggcagcguguccuucuucccgcaggccgagaccugcaagguccagagcaaccggguguucugcgacaccaugaacucccugacccugcccagcgaggugaaccucugcaacaucgacaucuucaaccccaaguacgacugcaagaucaugacguccaagaccgacgucagcuccagcgugaucaccucccugggcgccaucgugagcugcuacgggaagaccaagugcacggcgagcaacaagaaccgcggcaucaucaagaccuucuccaacgggugcgacuacgucagcaacaagggcguggacaccguguccgucggcaacacccuguacuacgugaacaagcaggagggcaagagccucuacgugaagggggagcccaucaucaacuucuacgacccgcuggucuuccccuccgacgaguucgacgccagcaucucccaggugaacgagaagaucaaccagagccuggccuucauccggaaguccgacgagcuccugcacaacgugaacgucggcaagagcaccacgaacaucaugaucaccaccaucaucaucgugaucaucgugauccugcugcuccugaucgccgucgggcuguuccucuacugcaaggcccgcuga

SEQ ID NO: 12835 - RNA, 1662 nt, Artificial Sequence
  derived and/or modified CDS sequence (opt1) from HRSV(Memphis-37)__AIY60640.1__F-del_DSCav1
auggagcugcccauccucaagaccaacgccaucaccacgauccuggccgcggugacccugugcuucgccagcucccagaacaucaccgaggaguucuaccagagcacgugcuccgccgucagcaagggcuaccucuccgcccugcgcaccgggugguacaccagcgugaucaccaucgagcuguccaacaucaaggagaacaagugcaacggcaccgacgccaaggugaagcucaucaagcaggagcuggacaaguacaagaacgcggucacggagcugcagcuccugaugcagagcaccccggccgccaacaaccgggcccgccgggagcugccccgcuucaugaacuacacccucaacaacaccaagaacaacaacgugacgcuguccaagaagcggaagcgccgguuccugggguuccuccugggcguggggagcgcgaucgccuccggcaucgccgucugcaaggugcugcaccucgagggcgaggugaacaagaucaagaacgcccugcugagcaccaacaaggccgucgugucccucagcaacgggguguccguccugaccuucaaggugcuggaccucaagaacuacaucgacaagcagcugcugcccauccucaacaagcagagcugcuccaucagcaacaucgagaccgugaucgaguuccagcagaagaacaaccgccugcuggagaucacgcgggaguucuccgucaacgcgggcgugaccacccccgugagcaccuacaugcucacgaacagcgagcugcugucccucaucaacgacaugccgaucaccaacgaccagaagaagcugaugagcaacaacguccagaucgugcgccagcaguccuacagcaucaugugcaucaucaaggaggaggugcuggccuacgucgugcagcucccccuguacggggugaucgacacccccugcuggaagcugcacaccagcccccucugcacgaccaacaccaaggagggcagcaacaucugccugacccggacggaccgcgggugguacugcgacaacgccggcuccgucagcuucuucccgcaggccgagaccugcaaggugcaguccaaccgggucuucugcgacaccaugaacagccugacccuccccuccgaggugaaccugugcaacaucgacaucuucaaccccaaguacgacugcaagaucaugacgagcaagaccgacguguccagcuccgucaucaccagccugggcgccaucguguccugcuacgggaagaccaagugcacggcgagcaacaagaaccgcggcaucaucaagaccuucuccaacgggugcgacuacgugagcaacaagggcgucgacaccgugagcgugggcaacacccucuacuacgucaacaagcaggaggggaagucccuguacgugaagggcgagcccaucaucaacuucuacgacccgcugguguuccccagcgacgaguucgacgccuccaucagccaggucaacgagaagaucaaccagucccucgccuucauccggaaguccgacgagcugcugcacaacgugaacguggggaaguccaccacgaacaucaugaucaccaccaucaucaucgucaucaucgugauccugcuccugcugaucgccgugggccucuuccuguacugcaaggcccgcuga

SEQ ID NO: 12836 - RNA, 1662 nt, Artificial Sequence
  derived and/or modified CDS sequence (opt2) from HRSV(Memphis-37)__AIY60640.1__F-del_DSCav1
auggagcuccccauccucaagaccaacgccaucaccaccauccucgccgccgucacccucugcuucgccuccucccagaacaucaccgaggaguucuaccaguccaccugcuccgccgucuccaagggcuaccucuccgcccuccgcaccggcugguacaccuccgucaucaccaucgagcucuccaacaucaaggagaacaagugcaacggcaccgacgccaaggucaagcucaucaagcaggagcucgacaaguacaagaacgccgucaccgagcuccagcuccucaugcaguccacccccgccgccaacaaccgcgcccgccgcgagcucccccgcuucaugaacuacacccucaacaacaccaagaacaacaacgucacccucuccaagaagcgcaagcgccgcuuccucggcuuccuccucggcgucggcuccgccaucgccuccggcaucgccgucugcaagguccuccaccucgagggcgaggucaacaagaucaagaacgcccuccucuccaccaacaaggccgucgucucccucuccaacggcgucuccguccucaccuucaagguccucgaccucaagaacuacaucgacaagcagcuccuccccauccucaacaagcaguccugcuccaucuccaacaucgagaccgucaucgaguuccagcagaagaacaaccgccuccucgagaucacccgcgaguucuccgucaacgccggcgucaccacccccgucuccaccuacaugcucaccaacuccgagcuccucucccucaucaacgacaugcccaucaccaacgaccagaagaagcucauguccaacaacguccagaucguccgccagcaguccuacuccaucaugugcaucaucaaggaggagguccucgccuacgucguccagcucccccucuacggcgucaucgacacccccugcuggaagcuccacaccuccccccucugcaccaccaacaccaaggagggcuccaacaucugccucacccgcaccgaccgcggcugguacugcgacaacgccggcuccgucuccuucuucccccaggccgagaccugcaagguccaguccaaccgcgucuucugcgacaccaugaacucccucacccuccccuccgaggucaaccucugcaacaucgacaucuucaaccccaaguacgacugcaagaucaugaccuccaagaccgacgucuccuccuccgucaucaccucccucggcgccaucgucuccugcuacggcaagaccaagugcaccgccuccaacaagaaccgcggcaucaucaagaccuucuccaacggcugcgacuacgucuccaacaagggcgucgacaccgucuccgucggcaacacccucuacuacgucaacaagcaggagggcaagucccucuacgucaagggcgagcccaucaucaacuucuacgacccccucgucuuccccuccgacgaguucgacgccuccaucucccaggucaacgagaagaucaaccagucccucgccuucauccgcaaguccgacgagcuccuccacaacgucaacgucggcaaguccaccaccaacaucaugaucaccaccaucaucaucgucaucaucgucauccuccuccuccucaucgccgucggccucuuccucuacugcaaggcccgcuga

SEQ ID NO: 12837 - RNA, 1662 nt, Artificial Sequence
  derived and/or modified CDS sequence (opt3) from HRSV(Memphis-37)__AIY60640.1__F-del_DSCav1
auggagcugcccauccucaagaccaacgccauuacaacuauacuugcugcagugacgcugugcuucgccagcucccagaauaucaccgaagaguuuuaccaaucuacauguucagcggucaguaaaggcuauuugagcgcuuuaagaacugggugguacaccuccguuauuacaaucgaacugucuaacauuaaggagaauaaaugcaacggaaccgacgccaaggugaaacuaaucaagcaggaacucgauaaguauaaaaaugcaguaacugagcugcagcuucugaugcagucgaccccugccgcuaacaauagggcacggcgcgaguugccacgauucaugaacuacacacucaauaacacgaagaauaacaaugugacucugagcaaaaagcguaaaagaagguuucuggguuuccucuuaggcgucgggucagccauagcuaguggaaucgccguguguaagguucugcaccuugaaggcgaggugaacaagauuaaaaaugcguugcuguccaccaacaaggcagucgugucucuaagcaacgguguauccguucucacauuuaaagugcuggaccuuaagaauuauaucgauaaacaacuguugccgauucucaacaagcagucaugcaguaucagcaauauagaaacugucauugaguuccagcagaaaaacaaucggcuguuagagaucacccgcgaauuuucugugaacgccggggugacaacccccgucuccacguacaugcugacuaauucagagcuccuuagccugauuaacgacaugccuaucacaaaugaucaaaagaaguugaugaguaacaauguucagaucgugagacagcagucuuauuccauuauguguauaaucaaagaagagguacuagcuuacgugguccaacugccacucuacggagugauugacacccccugcuggaagcugcauacuagcccucuuuguacaaccaacacgaaagaaggcucgaauaucugccugaccaggacagaucggggcugguauugugacaacgccgggucuguuuccuucuuuccacaggcagagacuugcaaggugcagucaaaucgcgucuucugugauaccaugaacaguuugacacuccccagcgaggugaaccugugcaauauagacauuuuuaacccuaaauacgauugcaagaucaugacuuccaagaccgacguaucuagcucaguuaucacaaguuuaggagcuauuguguccuguuaugguaaaaccaagugcacugccagcaauaaaaaccgaggcaucauuaagacguucucuaaugggugugauuacgucucaaacaaaggaguggacacagucagugugggcaauacccuguauuacguuaacaagcaagaagguaagagccuauaugugaaaggggagccaauaaucaauuuuuacgacccgcucguauuccccuccgaugaguucgacgcgucuauuucgcaggucaacgaaaagaucaaucagagccuggccuuuaucagaaaauccgaugaacuuuugcacaacgugaauguuggaaagucaacuaccaacauuaugauaacaaccaucauuaucgugauuaucgucauacugcuccugcuuaucgcagugggccuguucuuguacugcaaagcuagguga

SEQ ID NO: 12838 - RNA, 1662 nt, Artificial Sequence
  derived and/or modified CDS sequence (opt4) from HRSV(Memphis-37)__AIY60640.1__F-del_DSCav1
auggagcugcccauccugaagaccaacgccaucaccaccauccuggccgccgugacccugugcuucgccagcagccagaacaucaccgaggaguucuaccagagcaccugcagcgccgugagcaagggcuaccugagcgcccugagaaccggcugguacaccagcgugaucaccaucgagcugagcaacaucaaggagaacaagugcaacggcaccgacgccaaggugaagcugaucaagcaggagcuggacaaguacaagaacgccgugaccgagcugcagcugcugaugcagagcacccccgccgccaacaacagagccagaagagagcugcccagauucaugaacuacacccugaacaacaccaagaacaacaacgugacccugagcaagaagagaaagagaagauuccugggcuuccugcugggcgugggcagcgccaucgccagcggcaucgccgugugcaaggugcugcaccuggagggcgaggugaacaagaucaagaacgcccugcugagcaccaacaaggccguggugagccugagcaacggcgugagcgugcugaccuucaaggugcuggaccugaagaacuacaucgacaagcagcugcugcccauccugaacaagcagagcugcagcaucagcaacaucgagaccgugaucgaguuccagcagaagaacaacagacugcuggagaucaccagagaguucagcgugaacgccggcgugaccacccccgugagcaccuacaugcugaccaacagcgagcugcugagccugaucaacgacaugcccaucaccaacgaccagaagaagcugaugagcaacaacgugcagaucgugagacagcagagcuacagcaucaugugcaucaucaaggaggaggugcuggccuacguggugcagcugccccuguacggcgugaucgacacccccugcuggaagcugcacaccagcccccugugcaccaccaacaccaaggagggcagcaacaucugccugaccagaaccgacagaggcugguacugcgacaacgccggcagcgugagcuucuucccccaggccgagaccugcaaggugcagagcaacagaguguucugcgacaccaugaacagccugacccugcccagcgaggugaaccugugcaacaucgacaucuucaaccccaaguacgacugcaagaucaugaccagcaagaccgacgugagcagcagcgugaucaccagccugggcgccaucgugagcugcuacggcaagaccaagugcaccgccagcaacaagaacagaggcaucaucaagaccuucagcaacggcugcgacuacgugagcaacaagggcguggacaccgugagcgugggcaacacccuguacuacgugaacaagcaggagggcaagagccuguacgugaagggcgagcccaucaucaacuucuacgacccccugguguuccccagcgacgaguucgacgccagcaucagccaggugaacgagaagaucaaccagagccuggccuucaucagaaagagcgacgagcugcugcacaacgugaacgugggcaagagcaccaccaacaucaugaucaccaccaucaucaucgugaucaucgugauccugcugcugcugaucgccgugggccuguuccuguacugcaaggccagauga

SEQ ID NO: 12839 - RNA, 1662 nt, Artificial Sequence
  derived and/or modified CDS sequence (opt5) from HRSV(Memphis-37)__AIY60640.1__F-del_DSCav1
auggagcugcccauccucaagaccaacgccauuacaacgauccuggcugccgugacccuuugcuucgcgagcucccagaauauuacagaagaguuuuaccaaucuaccuguagcgcugucuccaaaggcuaucugucugcccucagaacagggugguacaccagcguuaucacaauugaacuguccaacaucaaggagaauaaaugcaacggaaccgacgccaaggugaaacuuaucaagcaggaacuggauaaguauaaaaaugcugugacggagcuccagcugcugaugcagucuaccccugccgcuaacaaucgggcccgcagagagcucccgcgguucaugaacuacacacugaauaacaccaagaauaacaaugucacacuuagcaaaaagcgcaaaagacgguuucugggcuuccuccugggggugggauccgcgauugccagcggcaucgcuguuuguaaggugcuucaccuggaaggggaggucaacaagauuaaaaaugcccuccugucuaccaacaaggcugugguuucccugagcaacggagugucuguccucacguuuaaagugcuggaccuuaagaauuauaucgauaaacaacugcuccccauucugaacaagcaguccugcagcaucucuaauauugaaacagugaucgaguuccagcagaaaaacaaucgccuucuggagaucaccagagaauuuuccgucaacgccggcguuacaaccccugugagcaccuacaugcucacaaauuccgagcugcugucucucauuaacgacaugcccaucacgaaugaucaaaagaagcugaugagcaacaaugugcagauuguccggcagcaguccuauagcaucauguguauuaucaaagaagaggugcuugcguacguugugcaacugccucucuacggcgucaucgacacccccugcuggaagcugcauacaucuccucuuuguaccacaaacaccaaagaaggguccaauauuugccugacgcgcacagauagaggaugguauugugacaacgccggcagcgugucuuucuuuccgcaggcugagaccugcaagguucagagcaaucggguguucugugauaccaugaacucccucacacugcccucugaggucaaccugugcaauaucgacauuuuuaacccuaaauacgauugcaagaucaugaccagcaagacagacguguccagcucugucauuacgucccucggggccaucgugagcuguuauggaaaaaccaagugcacagcuucuaauaaaaaccgcggcaucauuaagaccuucuccaaugggugugauuacguuagcaacaaaggaguggacacagucuccgugggcaauacccuguauuacguuaacaagcaagaaggcaagucucuuuaugugaaaggggagcccaucauuaauuuuuacgacccucuggucuuccccagcgaugaguucgacgccuccaucucucaggugaacgaaaagauuaaucagagccucgccuuuaucagaaaauccgaugaacugcugcacaacgugaauguuggaaagagcacgaccaacauuaugaucacaaccaucauuaucgucauuaucgugauucuucuccugcugaucgcugugggccucuuccuguacugcaaagcgcgguga

SEQ ID NO: 12840 - RNA, 1662 nt, Artificial Sequence
  derived and/or modified CDS sequence (opt6) from HRSV(Memphis-37)__AIY60640.1__F-del_DSCav1
auggaauuaccaauccuuaaaacaaacgcaauaacaaccauccucgcagcaguaacucucugcuucgcuucaucucaaaacaucacagaagaauuuuaccaaagcacaugcucagcuguauccaaagguuaucuaucagccuugagaaccggaugguacacaucaguaauaacaauugaacuaucaaacauuaaagaaaacaaaugcaacggcaccgacgcaaaaguaaaacuaaucaaacaagaacuagacaaauauaaaaaugcaguaacagaauuacaauuauuaaugcaauccacaccagcugcaaacaaccgagcccgaagagaacuaccaagauucaugaacuacacacuaaacaacaccaaaaauaacaacgucacccuaucuaaaaaacguaaaagaagauucuuaggauuccucuuaggagucggauccgcaauagcaagcggcauagccguauguaaaguccuacacuuagaaggugaagugaauaaaauaaaaaacgcccuauuaagcacuaacaaagcaguagucucccuaucaaacggaguuucaguacucacauucaaaguacucgaccucaaaaacuacaucgacaaacaacuuuuaccaauucuaaacaaacaaucaugcuccauaucuaauaucgaaaccgucaucgaauuucaacaaaaaaacaauagacuacuagaaauaacuagagaauuuucaguaaacgccggcguuacgacaccagucucuacauacauguuaaccaauucagaacucuuaucauuaaucaacgacaugccaauaacaaacgaccaaaaaaaacuaauguccaauaacguacaaauagucagacaacaaucauacucaauuaugugcauaauaaaagaagaaguacuagcuuacguaguacaacucccccuauacggcguaauagacacuccauguuggaaauuacacacaucaccauuauguaccaccaauacaaaagaaggcucaaacauaugccuaacaagaacagauagaggaugguauugcgacaacgcaggcucaguuuccuuuuucccccaagcagaaaccugcaaaguacaaucaaaucguguuuuuugcgacaccaugaacucacucacauuaccaucagaaguaaaccuaugcaacauagacauauucaacccaaaauacgacugcaaaaucaugacaucaaaaacagacguauccucuucaguaauuacuagcuuaggagcaauagucucuuguuauggaaaaacaaaaugcacagccaguaacaaaaaccgcggaauaauaaaaaccuucucaaacgguugcgauuacgucucuaacaaaggagucgacacaguaucaguaggcaauacauuauacuacguuaacaaacaagaaggaaaaucuuuauacgucaaaggagaacccauuauaaacuuuuacgacccauuagucuucccuuccgacgaauuugacgccagcauuucacaaguaaacgaaaaaauaaaccaaucacucgcauuuauaagaaaaucugacgaauuacuccacaacguaaacguaggaaaauccacaacaaacauaaugauaacaaccauaaucaucgucauaauagucauacuucuccuauuaauugcaguaggcuuauuccuauacuguaaagcacgauaa

SEQ ID NO: 12841 - RNA, 1662 nt, Artificial Sequence
  derived and/or modified CDS sequence (opt11) from HRSV(Memphis-37)__AIY60640.1__F-del_DSCav1
auggaacuaccaauccuaaaaacuaacgcaaucaccacaauccucgccgccgucacccuuugcuuugcguccucccaaaacauuacugaagaguucuaccaauccacgugcuccgccgucuccaaagguuaccuauccgcccuuaggaccggcugguacaccagcgucaucaccaucgaacuuuccaacaucaaagaaaacaaauguaacggcaccgacgcaaaagucaaacuuauuaaacaggaacucgacaaauauaagaaugccgucaccgaauuacaacuccucaugcaauccacccccgccgccaacaaccgagcaaggcgcgaacucccucgauucaugaauuacacccucaacaauaccaaaaacaacaacgucacccuauccaagaaacgcaaaagacgcuucuugggcuuccuccucggcgugggcuccgcaauagccuccgguauugccgugugcaaagucuuacaccucgaaggcgaggucaacaaaaucaaaaacgcccuccucuccaccaacaaagccgucgucagccuauccaacggcguuuccguccucaccuucaaaguacucgaccucaaaaacuacaucgacaaacaacuccuacccauacuaaacaaacaauccugcuccauuuccaacaucgaaaccguaaucgaguuccaacagaaaaacaaucgccuccuagaaaucacacgugaauuuucaguuaacgccggaguaacaacuccuguaucuaccuacaugcucaccaauuccgaacuccucagccucauaaacgacaugccaauaacaaacgaccaaaagaaacucaugucuaacaacguacaaaucgucagacaacaaaguuacucaaucauguguaucaucaaagaggaaguccuagcauacgugguccaacucccccucuacggaguaaucgacaccccaugcuggaaacuacacaccagcccccucuguaccacaaacacgaaagaagguuccaacaucugccugacccgaaccgaccgcggcugguacugcgauaacgcuggcuccgucucauucuucccccaagcagaaaccugcaaaguacaauccaaccgaguauucugcgacaccaugaacucacucacccuccccagcgaaguaaaccucugcaacaucgacauauucaacccaaaauacgacugcaaaauuaugaccucuaaaacagacguauccuccucuguaaucacaucccucggggccaucgucuccugcuacggcaaaaccaaaugcaccgccuccaacaaaaaccgcggaaucauaaaaaccuucuccaacggaugcgacuacgucucaaauaaaggcgucgacaccgucuccgucggcaacacgcuauacuacgucaacaaacaagaaggcaaaucacucuacgucaaaggugagcccaucaucaauuucuacgauccccucgucuucccaagcgacgaguucgacgccagcauaucccaaguaaacgagaaaaucaaccaaagccuggccuucauccgcaaauccgacgaacuacuacacaacguaaacguaggcaaguccacuaccaacauaaugaucaccacaaucaucauagucauaaucguuauacuacuccugcucaucgccguaggccucuuccucuauugcaaagcccgauag

SEQ ID NO: 12842 - RNA, 1938 nt, Artificial Sequence
  mRNA product Design a-1 comprising derived and/or modified sequence from HRSV(Memphis-37)__AIY60640.1__F-del_DSCav1 (opt1)
gggagagucccgcagucggcguccagcggcucugcuuguucgugugugugucguugcaggccuuauucaagcuuaccauggagcugcccauccucaagaccaacgccaucaccacgauccuggccgcggugacccugugcuucgccagcucccagaacaucaccgaggaguucuaccagagcacgugcuccgccgucagcaagggcuaccucuccgcccugcgcaccgggugguacaccagcgugaucaccaucgagcuguccaacaucaaggagaacaagugcaacggcaccgacgccaaggugaagcucaucaagcaggagcuggacaaguacaagaacgcggucacggagcugcagcuccugaugcagagcaccccggccgccaacaaccgggcccgccgggagcugccccgcuucaugaacuacacccucaacaacaccaagaacaacaacgugacgcuguccaagaagcggaagcgccgguuccugggguuccuccugggcguggggagcgcgaucgccuccggcaucgccgucugcaaggugcugcaccucgagggcgaggugaacaagaucaagaacgcccugcuguccaccaacaaggccgucgugagccucuccaacggggugagcguccugaccuucaaggugcuggaccucaagaacuacaucgacaagcagcugcugcccauccugaacaagcagagcugcuccaucagcaacaucgagaccgucaucgaguuccagcagaagaacaaccgccuccuggagaucacgcgggaguucagcgugaacgcgggcgugaccacccccgucuccaccuacaugcugacgaacagcgagcuccugucccugaucaacgacaugccgaucaccaacgaccagaagaagcucaugagcaacaacgugcagaucgugcgccagcaguccuacagcaucaugugcaucaucaaggaggagguccuggccuacguggugcagcugccccucuacggggucaucgacacccccugcuggaagcugcacaccagcccccugugcacgaccaacaccaaggagggcuccaacaucugccucacccggacggaccgcgggugguacugcgacaacgccggcagcguguccuucuucccgcaggccgagaccugcaagguccagagcaaccggguguucugcgacaccaugaacucccugacccugcccagcgaggugaaccucugcaacaucgacaucuucaaccccaaguacgacugcaagaucaugacguccaagaccgacgucagcuccagcgugaucaccucccugggcgccaucgugagcugcuacgggaagaccaagugcacggcgagcaacaagaaccgcggcaucaucaagaccuucuccaacgggugcgacuacgucagcaacaagggcguggacaccguguccgucggcaacacccuguacuacgugaacaagcaggagggcaagagccucuacgugaagggggagcccaucaucaacuucuacgacccgcuggucuuccccuccgacgaguucgacgccagcaucucccaggugaacgagaagaucaaccagagccuggccuucauccggaaguccgacgagcuccugcacaacgugaacgucggcaagagcaccacgaacaucaugaucaccaccaucaucaucgugaucaucgugauccugcugcuccugaucgccgucgggcuguuccucuacugcaaggcccgcugaggacuagucccuguucccagagcccacuuuuuuuucuuuuuuugaaauaaaauagccugucuuucagaucuaaaaaaaaaaaaaaaaaaaaaaaaaaaaaaaaaaaaaaaaaaaaaaaaaaaaaaaaaaaaaaaaugcaucccccccccccccccccccccccccccccccaaaggcucuuuucagagccaccagaauu

SEQ ID NO: 12843 - RNA, 1938 nt, Artificial Sequence
  mRNA product Design a-1 comprising derived and/or modified sequence from HRSV(Memphis-37)__AIY60640.1__F-del_DSCav1 (opt1)
gggagagucccgcagucggcguccagcggcucugcuuguucgugugugugucguugcaggccuuauucaagcuuaccauggagcugcccauccucaagaccaacgccaucaccacgauccuggccgcggugacccugugcuucgccagcucccagaacaucaccgaggaguucuaccagagcacgugcuccgccgucagcaagggcuaccucuccgcccugcgcaccgggugguacaccagcgugaucaccaucgagcuguccaacaucaaggagaacaagugcaacggcaccgacgccaaggugaagcucaucaagcaggagcuggacaaguacaagaacgcggucacggagcugcagcuccugaugcagagcaccccggccgccaacaaccgggcccgccgggagcugccccgcuucaugaacuacacccucaacaacaccaagaacaacaacgugacgcuguccaagaagcggaagcgccgguuccugggguuccuccugggcguggggagcgcgaucgccuccggcaucgccgucugcaaggugcugcaccucgagggcgaggugaacaagaucaagaacgcccugcugagcaccaacaaggccgucgugucccucagcaacgggguguccguccugaccuucaaggugcuggaccucaagaacuacaucgacaagcagcugcugcccauccucaacaagcagagcugcuccaucagcaacaucgagaccgugaucgaguuccagcagaagaacaaccgccugcuggagaucacgcgggaguucuccgucaacgcgggcgugaccacccccgugagcaccuacaugcucacgaacagcgagcugcugucccucaucaacgacaugccgaucaccaacgaccagaagaagcugaugagcaacaacguccagaucgugcgccagcaguccuacagcaucaugugcaucaucaaggaggaggugcuggccuacgucgugcagcucccccuguacggggugaucgacacccccugcuggaagcugcacaccagcccccucugcacgaccaacaccaaggagggcagcaacaucugccugacccggacggaccgcgggugguacugcgacaacgccggcuccgucagcuucuucccgcaggccgagaccugcaaggugcaguccaaccgggucuucugcgacaccaugaacagccugacccuccccuccgaggugaaccugugcaacaucgacaucuucaaccccaaguacgacugcaagaucaugacgagcaagaccgacguguccagcuccgucaucaccagccugggcgccaucguguccugcuacgggaagaccaagugcacggcgagcaacaagaaccgcggcaucaucaagaccuucuccaacgggugcgacuacgugagcaacaagggcgucgacaccgugagcgugggcaacacccucuacuacgucaacaagcaggaggggaagucccuguacgugaagggcgagcccaucaucaacuucuacgacccgcugguguuccccagcgacgaguucgacgccuccaucagccaggucaacgagaagaucaaccagucccucgccuucauccggaaguccgacgagcugcugcacaacgugaacguggggaaguccaccacgaacaucaugaucaccaccaucaucaucgucaucaucgugauccugcuccugcugaucgccgugggccucuuccuguacugcaaggcccgcugaggacuagucccuguucccagagcccacuuuuuuuucuuuuuuugaaauaaaauagccugucuuucagaucuaaaaaaaaaaaaaaaaaaaaaaaaaaaaaaaaaaaaaaaaaaaaaaaaaaaaaaaaaaaaaaaaugcaucccccccccccccccccccccccccccccccaaaggcucuuuucagagccaccagaauu

SEQ ID NO: 12844 - RNA, 1938 nt, Artificial Sequence
  mRNA product Design a-1 comprising derived and/or modified sequence from HRSV(Memphis-37)__AIY60640.1__F-del_DSCav1 (opt2)
gggagagucccgcagucggcguccagcggcucugcuuguucgugugugugucguugcaggccuuauucaagcuuaccauggagcuccccauccucaagaccaacgccaucaccaccauccucgccgccgucacccucugcuucgccuccucccagaacaucaccgaggaguucuaccaguccaccugcuccgccgucuccaagggcuaccucuccgcccuccgcaccggcugguacaccuccgucaucaccaucgagcucuccaacaucaaggagaacaagugcaacggcaccgacgccaaggucaagcucaucaagcaggagcucgacaaguacaagaacgccgucaccgagcuccagcuccucaugcaguccacccccgccgccaacaaccgcgcccgccgcgagcucccccgcuucaugaacuacacccucaacaacaccaagaacaacaacgucacccucuccaagaagcgcaagcgccgcuuccucggcuuccuccucggcgucggcuccgccaucgccuccggcaucgccgucugcaagguccuccaccucgagggcgaggucaacaagaucaagaacgcccuccucuccaccaacaaggccgucgucucccucuccaacggcgucuccguccucaccuucaagguccucgaccucaagaacuacaucgacaagcagcuccuccccauccucaacaagcaguccugcuccaucuccaacaucgagaccgucaucgaguuccagcagaagaacaaccgccuccucgagaucacccgcgaguucuccgucaacgccggcgucaccacccccgucuccaccuacaugcucaccaacuccgagcuccucucccucaucaacgacaugcccaucaccaacgaccagaagaagcucauguccaacaacguccagaucguccgccagcaguccuacuccaucaugugcaucaucaaggaggagguccucgccuacgucguccagcucccccucuacggcgucaucgacacccccugcuggaagcuccacaccuccccccucugcaccaccaacaccaaggagggcuccaacaucugccucacccgcaccgaccgcggcugguacugcgacaacgccggcuccgucuccuucuucccccaggccgagaccugcaagguccaguccaaccgcgucuucugcgacaccaugaacucccucacccuccccuccgaggucaaccucugcaacaucgacaucuucaaccccaaguacgacugcaagaucaugaccuccaagaccgacgucuccuccuccgucaucaccucccucggcgccaucgucuccugcuacggcaagaccaagugcaccgccuccaacaagaaccgcggcaucaucaagaccuucuccaacggcugcgacuacgucuccaacaagggcgucgacaccgucuccgucggcaacacccucuacuacgucaacaagcaggagggcaagucccucuacgucaagggcgagcccaucaucaacuucuacgacccccucgucuuccccuccgacgaguucgacgccuccaucucccaggucaacgagaagaucaaccagucccucgccuucauccgcaaguccgacgagcuccuccacaacgucaacgucggcaaguccaccaccaacaucaugaucaccaccaucaucaucgucaucaucgucauccuccuccuccucaucgccgucggccucuuccucuacugcaaggcccgcugaggacuagucccuguucccagagcccacuuuuuuuucuuuuuuugaaauaaaauagccugucuuucagaucuaaaaaaaaaaaaaaaaaaaaaaaaaaaaaaaaaaaaaaaaaaaaaaaaaaaaaaaaaaaaaaaaugcaucccccccccccccccccccccccccccccccaaaggcucuuuucagagccaccagaauu

SEQ ID NO: 12845 - RNA, 1938 nt, Artificial Sequence
  mRNA product Design a-1 comprising derived and/or modified sequence from HRSV(Memphis-37)__AIY60640.1__F-del_DSCav1 (opt3)
gggagagucccgcagucggcguccagcggcucugcuuguucgugugugugucguugcaggccuuauucaagcuuaccauggagcugcccauccucaagaccaacgccauuacaacuauacuugcugcagugacgcugugcuucgccagcucccagaauaucaccgaagaguuuuaccaaucuacauguucagcggucaguaaaggcuauuugagcgcuuuaagaacugggugguacaccuccguuauuacaaucgaacugucuaacauuaaggagaauaaaugcaacggaaccgacgccaaggugaaacuaaucaagcaggaacucgauaaguauaaaaaugcaguaacugagcugcagcuucugaugcagucgaccccugccgcuaacaauagggcacggcgcgaguugccacgauucaugaacuacacacucaauaacacgaagaauaacaaugugacucugagcaaaaagcguaaaagaagguuucuggguuuccucuuaggcgucgggucagccauagcuaguggaaucgccguguguaagguucugcaccuugaaggcgaggugaacaagauuaaaaaugcguugcuguccaccaacaaggcagucgugucucuaagcaacgguguauccguucucacauuuaaagugcuggaccuuaagaauuauaucgauaaacaacuguugccgauucucaacaagcagucaugcaguaucagcaauauagaaacugucauugaguuccagcagaaaaacaaucggcuguuagagaucacccgcgaauuuucugugaacgccggggugacaacccccgucuccacguacaugcugacuaauucagagcuccuuagccugauuaacgacaugccuaucacaaaugaucaaaagaaguugaugaguaacaauguucagaucgugagacagcagucuuauuccauuauguguauaaucaaagaagagguacuagcuuacgugguccaacugccacucuacggagugauugacacccccugcuggaagcugcauacuagcccucuuuguacaaccaacacgaaagaaggcucgaauaucugccugaccaggacagaucggggcugguauugugacaacgccgggucuguuuccuucuuuccacaggcagagacuugcaaggugcagucaaaucgcgucuucugugauaccaugaacaguuugacacuccccagcgaggugaaccugugcaauauagacauuuuuaacccuaaauacgauugcaagaucaugacuuccaagaccgacguaucuagcucaguuaucacaaguuuaggagcuauuguguccuguuaugguaaaaccaagugcacugccagcaauaaaaaccgaggcaucauuaagacguucucuaaugggugugauuacgucucaaacaaaggaguggacacagucagugugggcaauacccuguauuacguuaacaagcaagaagguaagagccuauaugugaaaggggagccaauaaucaauuuuuacgacccgcucguauuccccuccgaugaguucgacgcgucuauuucgcaggucaacgaaaagaucaaucagagccuggccuuuaucagaaaauccgaugaacuuuugcacaacgugaauguuggaaagucaacuaccaacauuaugauaacaaccaucauuaucgugauuaucgucauacugcuccugcuuaucgcagugggccuguucuuguacugcaaagcuaggugaggacuagucccuguucccagagcccacuuuuuuuucuuuuuuugaaauaaaauagccugucuuucagaucuaaaaaaaaaaaaaaaaaaaaaaaaaaaaaaaaaaaaaaaaaaaaaaaaaaaaaaaaaaaaaaaaugcaucccccccccccccccccccccccccccccccaaaggcucuuuucagagccaccagaauu

SEQ ID NO: 12846 - RNA, 1938 nt, Artificial Sequence
  mRNA product Design a-1 comprising derived and/or modified sequence from HRSV(Memphis-37)__AIY60640.1__F-del_DSCav1 (opt4)
gggagagucccgcagucggcguccagcggcucugcuuguucgugugugugucguugcaggccuuauucaagcuuaccauggagcugcccauccugaagaccaacgccaucaccaccauccuggccgccgugacccugugcuucgccagcagccagaacaucaccgaggaguucuaccagagcaccugcagcgccgugagcaagggcuaccugagcgcccugagaaccggcugguacaccagcgugaucaccaucgagcugagcaacaucaaggagaacaagugcaacggcaccgacgccaaggugaagcugaucaagcaggagcuggacaaguacaagaacgccgugaccgagcugcagcugcugaugcagagcacccccgccgccaacaacagagccagaagagagcugcccagauucaugaacuacacccugaacaacaccaagaacaacaacgugacccugagcaagaagagaaagagaagauuccugggcuuccugcugggcgugggcagcgccaucgccagcggcaucgccgugugcaaggugcugcaccuggagggcgaggugaacaagaucaagaacgcccugcugagcaccaacaaggccguggugagccugagcaacggcgugagcgugcugaccuucaaggugcuggaccugaagaacuacaucgacaagcagcugcugcccauccugaacaagcagagcugcagcaucagcaacaucgagaccgugaucgaguuccagcagaagaacaacagacugcuggagaucaccagagaguucagcgugaacgccggcgugaccacccccgugagcaccuacaugcugaccaacagcgagcugcugagccugaucaacgacaugcccaucaccaacgaccagaagaagcugaugagcaacaacgugcagaucgugagacagcagagcuacagcaucaugugcaucaucaaggaggaggugcuggccuacguggugcagcugccccuguacggcgugaucgacacccccugcuggaagcugcacaccagcccccugugcaccaccaacaccaaggagggcagcaacaucugccugaccagaaccgacagaggcugguacugcgacaacgccggcagcgugagcuucuucccccaggccgagaccugcaaggugcagagcaacagaguguucugcgacaccaugaacagccugacccugcccagcgaggugaaccugugcaacaucgacaucuucaaccccaaguacgacugcaagaucaugaccagcaagaccgacgugagcagcagcgugaucaccagccugggcgccaucgugagcugcuacggcaagaccaagugcaccgccagcaacaagaacagaggcaucaucaagaccuucagcaacggcugcgacuacgugagcaacaagggcguggacaccgugagcgugggcaacacccuguacuacgugaacaagcaggagggcaagagccuguacgugaagggcgagcccaucaucaacuucuacgacccccugguguuccccagcgacgaguucgacgccagcaucagccaggugaacgagaagaucaaccagagccuggccuucaucagaaagagcgacgagcugcugcacaacgugaacgugggcaagagcaccaccaacaucaugaucaccaccaucaucaucgugaucaucgugauccugcugcugcugaucgccgugggccuguuccuguacugcaaggccagaugaggacuagucccuguucccagagcccacuuuuuuuucuuuuuuugaaauaaaauagccugucuuucagaucuaaaaaaaaaaaaaaaaaaaaaaaaaaaaaaaaaaaaaaaaaaaaaaaaaaaaaaaaaaaaaaaaugcaucccccccccccccccccccccccccccccccaaaggcucuuuucagagccaccagaauu

SEQ ID NO: 12847 - RNA, 1938 nt, Artificial Sequence
  mRNA product Design a-1 comprising derived and/or modified sequence from HRSV(Memphis-37)__AIY60640.1__F-del_DSCav1 (opt5)
gggagagucccgcagucggcguccagcggcucugcuuguucgugugugugucguugcaggccuuauucaagcuuaccauggagcugcccauccucaagaccaacgccauuacaacgauccuggcugccgugacccuuugcuucgcgagcucccagaauauuacagaagaguuuuaccaaucuaccuguagcgcugucuccaaaggcuaucugucugcccucagaacagggugguacaccagcguuaucacaauugaacuguccaacaucaaggagaauaaaugcaacggaaccgacgccaaggugaaacuuaucaagcaggaacuggauaaguauaaaaaugcugugacggagcuccagcugcugaugcagucuaccccugccgcuaacaaucgggcccgcagagagcucccgcgguucaugaacuacacacugaauaacaccaagaauaacaaugucacacuuagcaaaaagcgcaaaagacgguuucugggcuuccuccugggggugggauccgcgauugccagcggcaucgcuguuuguaaggugcuucaccuggaaggggaggucaacaagauuaaaaaugcccuccugucuaccaacaaggcugugguuucccugagcaacggagugucuguccucacguuuaaagugcuggaccuuaagaauuauaucgauaaacaacugcuccccauucugaacaagcaguccugcagcaucucuaauauugaaacagugaucgaguuccagcagaaaaacaaucgccuucuggagaucaccagagaauuuuccgucaacgccggcguuacaaccccugugagcaccuacaugcucacaaauuccgagcugcugucucucauuaacgacaugcccaucacgaaugaucaaaagaagcugaugagcaacaaugugcagauuguccggcagcaguccuauagcaucauguguauuaucaaagaagaggugcuugcguacguugugcaacugccucucuacggcgucaucgacacccccugcuggaagcugcauacaucuccucuuuguaccacaaacaccaaagaaggguccaauauuugccugacgcgcacagauagaggaugguauugugacaacgccggcagcgugucuuucuuuccgcaggcugagaccugcaagguucagagcaaucggguguucugugauaccaugaacucccucacacugcccucugaggucaaccugugcaauaucgacauuuuuaacccuaaauacgauugcaagaucaugaccagcaagacagacguguccagcucugucauuacgucccucggggccaucgugagcuguuauggaaaaaccaagugcacagcuucuaauaaaaaccgcggcaucauuaagaccuucuccaaugggugugauuacguuagcaacaaaggaguggacacagucuccgugggcaauacccuguauuacguuaacaagcaagaaggcaagucucuuuaugugaaaggggagcccaucauuaauuuuuacgacccucuggucuuccccagcgaugaguucgacgccuccaucucucaggugaacgaaaagauuaaucagagccucgccuuuaucagaaaauccgaugaacugcugcacaacgugaauguuggaaagagcacgaccaacauuaugaucacaaccaucauuaucgucauuaucgugauucuucuccugcugaucgcugugggccucuuccuguacugcaaagcgcggugaggacuagucccuguucccagagcccacuuuuuuuucuuuuuuugaaauaaaauagccugucuuucagaucuaaaaaaaaaaaaaaaaaaaaaaaaaaaaaaaaaaaaaaaaaaaaaaaaaaaaaaaaaaaaaaaaugcaucccccccccccccccccccccccccccccccaaaggcucuuuucagagccaccagaauu

SEQ ID NO: 12848 - RNA, 1938 nt, Artificial Sequence
  mRNA product Design a-1 comprising derived and/or modified sequence from HRSV(Memphis-37)__AIY60640.1__F-del_DSCav1 (opt6)
gggagagucccgcagucggcguccagcggcucugcuuguucgugugugugucguugcaggccuuauucaagcuuaccauggaauuaccaauccuuaaaacaaacgcaauaacaaccauccucgcagcaguaacucucugcuucgcuucaucucaaaacaucacagaagaauuuuaccaaagcacaugcucagcuguauccaaagguuaucuaucagccuugagaaccggaugguacacaucaguaauaacaauugaacuaucaaacauuaaagaaaacaaaugcaacggcaccgacgcaaaaguaaaacuaaucaaacaagaacuagacaaauauaaaaaugcaguaacagaauuacaauuauuaaugcaauccacaccagcugcaaacaaccgagcccgaagagaacuaccaagauucaugaacuacacacuaaacaacaccaaaaauaacaacgucacccuaucuaaaaaacguaaaagaagauucuuaggauuccucuuaggagucggauccgcaauagcaagcggcauagccguauguaaaguccuacacuuagaaggugaagugaauaaaauaaaaaacgcccuauuaagcacuaacaaagcaguagucucccuaucaaacggaguuucaguacucacauucaaaguacucgaccucaaaaacuacaucgacaaacaacuuuuaccaauucuaaacaaacaaucaugcuccauaucuaauaucgaaaccgucaucgaauuucaacaaaaaaacaauagacuacuagaaauaacuagagaauuuucaguaaacgccggcguuacgacaccagucucuacauacauguuaaccaauucagaacucuuaucauuaaucaacgacaugccaauaacaaacgaccaaaaaaaacuaauguccaauaacguacaaauagucagacaacaaucauacucaauuaugugcauaauaaaagaagaaguacuagcuuacguaguacaacucccccuauacggcguaauagacacuccauguuggaaauuacacacaucaccauuauguaccaccaauacaaaagaaggcucaaacauaugccuaacaagaacagauagaggaugguauugcgacaacgcaggcucaguuuccuuuuucccccaagcagaaaccugcaaaguacaaucaaaucguguuuuuugcgacaccaugaacucacucacauuaccaucagaaguaaaccuaugcaacauagacauauucaacccaaaauacgacugcaaaaucaugacaucaaaaacagacguauccucuucaguaauuacuagcuuaggagcaauagucucuuguuauggaaaaacaaaaugcacagccaguaacaaaaaccgcggaauaauaaaaaccuucucaaacgguugcgauuacgucucuaacaaaggagucgacacaguaucaguaggcaauacauuauacuacguuaacaaacaagaaggaaaaucuuuauacgucaaaggagaacccauuauaaacuuuuacgacccauuagucuucccuuccgacgaauuugacgccagcauuucacaaguaaacgaaaaaauaaaccaaucacucgcauuuauaagaaaaucugacgaauuacuccacaacguaaacguaggaaaauccacaacaaacauaaugauaacaaccauaaucaucgucauaauagucauacuucuccuauuaauugcaguaggcuuauuccuauacuguaaagcacgauaaggacuagucccuguucccagagcccacuuuuuuuucuuuuuuugaaauaaaauagccugucuuucagaucuaaaaaaaaaaaaaaaaaaaaaaaaaaaaaaaaaaaaaaaaaaaaaaaaaaaaaaaaaaaaaaaaugcaucccccccccccccccccccccccccccccccaaaggcucuuuucagagccaccagaauu

SEQ ID NO: 12849 - RNA, 1938 nt, Artificial Sequence
  mRNA product Design a-1 comprising derived and/or modified sequence from HRSV(Memphis-37)__AIY60640.1__F-del_DSCav1 (opt11)
gggagagucccgcagucggcguccagcggcucugcuuguucgugugugugucguugcaggccuuauucaagcuuaccauggaacuaccaauccuaaaaacuaacgcaaucaccacaauccucgccgccgucacccuuugcuuugcguccucccaaaacauuacugaagaguucuaccaauccacgugcuccgccgucuccaaagguuaccuauccgcccuuaggaccggcugguacaccagcgucaucaccaucgaacuuuccaacaucaaagaaaacaaauguaacggcaccgacgcaaaagucaaacuuauuaaacaggaacucgacaaauauaagaaugccgucaccgaauuacaacuccucaugcaauccacccccgccgccaacaaccgagcaaggcgcgaacucccucgauucaugaauuacacccucaacaauaccaaaaacaacaacgucacccuauccaagaaacgcaaaagacgcuucuugggcuuccuccucggcgugggcuccgcaauagccuccgguauugccgugugcaaagucuuacaccucgaaggcgaggucaacaaaaucaaaaacgcccuccucuccaccaacaaagccgucgucagccuauccaacggcguuuccguccucaccuucaaaguacucgaccucaaaaacuacaucgacaaacaacuccuacccauacuaaacaaacaauccugcuccauuuccaacaucgaaaccguaaucgaguuccaacagaaaaacaaucgccuccuagaaaucacacgugaauuuucaguuaacgccggaguaacaacuccuguaucuaccuacaugcucaccaauuccgaacuccucagccucauaaacgacaugccaauaacaaacgaccaaaagaaacucaugucuaacaacguacaaaucgucagacaacaaaguuacucaaucauguguaucaucaaagaggaaguccuagcauacgugguccaacucccccucuacggaguaaucgacaccccaugcuggaaacuacacaccagcccccucuguaccacaaacacgaaagaagguuccaacaucugccugacccgaaccgaccgcggcugguacugcgauaacgcuggcuccgucucauucuucccccaagcagaaaccugcaaaguacaauccaaccgaguauucugcgacaccaugaacucacucacccuccccagcgaaguaaaccucugcaacaucgacauauucaacccaaaauacgacugcaaaauuaugaccucuaaaacagacguauccuccucuguaaucacaucccucggggccaucgucuccugcuacggcaaaaccaaaugcaccgccuccaacaaaaaccgcggaaucauaaaaaccuucuccaacggaugcgacuacgucucaaauaaaggcgucgacaccgucuccgucggcaacacgcuauacuacgucaacaaacaagaaggcaaaucacucuacgucaaaggugagcccaucaucaauuucuacgauccccucgucuucccaagcgacgaguucgacgccagcauaucccaaguaaacgagaaaaucaaccaaagccuggccuucauccgcaaauccgacgaacuacuacacaacguaaacguaggcaaguccacuaccaacauaaugaucaccacaaucaucauagucauaaucguuauacuacuccugcucaucgccguaggccucuuccucuauugcaaagcccgauagggacuagucccuguucccagagcccacuuuuuuuucuuuuuuugaaauaaaauagccugucuuucagaucuaaaaaaaaaaaaaaaaaaaaaaaaaaaaaaaaaaaaaaaaaaaaaaaaaaaaaaaaaaaaaaaaugcaucccccccccccccccccccccccccccccccaaaggcucuuuucagagccaccagaauu

SEQ ID NO: 12850 - RNA, 1957 nt, Artificial Sequence
  mRNA product Design a-2 comprising derived and/or modified sequence from HRSV(Memphis-37)__AIY60640.1__F-del_DSCav1 (opt1)
gggagaguccgcucagccagguugcagaagcggcuuagcguguguccuaaucuucucucugcguguagguaggccugugccgcaaacaagcuuaccauggagcugcccauccucaagaccaacgccaucaccacgauccuggccgcggugacccugugcuucgccagcucccagaacaucaccgaggaguucuaccagagcacgugcuccgccgucagcaagggcuaccucuccgcccugcgcaccgggugguacaccagcgugaucaccaucgagcuguccaacaucaaggagaacaagugcaacggcaccgacgccaaggugaagcucaucaagcaggagcuggacaaguacaagaacgcggucacggagcugcagcuccugaugcagagcaccccggccgccaacaaccgggcccgccgggagcugccccgcuucaugaacuacacccucaacaacaccaagaacaacaacgugacgcuguccaagaagcggaagcgccgguuccugggguuccuccugggcguggggagcgcgaucgccuccggcaucgccgucugcaaggugcugcaccucgagggcgaggugaacaagaucaagaacgcccugcuguccaccaacaaggccgucgugagccucuccaacggggugagcguccugaccuucaaggugcuggaccucaagaacuacaucgacaagcagcugcugcccauccugaacaagcagagcugcuccaucagcaacaucgagaccgucaucgaguuccagcagaagaacaaccgccuccuggagaucacgcgggaguucagcgugaacgcgggcgugaccacccccgucuccaccuacaugcugacgaacagcgagcuccugucccugaucaacgacaugccgaucaccaacgaccagaagaagcucaugagcaacaacgugcagaucgugcgccagcaguccuacagcaucaugugcaucaucaaggaggagguccuggccuacguggugcagcugccccucuacggggucaucgacacccccugcuggaagcugcacaccagcccccugugcacgaccaacaccaaggagggcuccaacaucugccucacccggacggaccgcgggugguacugcgacaacgccggcagcguguccuucuucccgcaggccgagaccugcaagguccagagcaaccggguguucugcgacaccaugaacucccugacccugcccagcgaggugaaccucugcaacaucgacaucuucaaccccaaguacgacugcaagaucaugacguccaagaccgacgucagcuccagcgugaucaccucccugggcgccaucgugagcugcuacgggaagaccaagugcacggcgagcaacaagaaccgcggcaucaucaagaccuucuccaacgggugcgacuacgucagcaacaagggcguggacaccguguccgucggcaacacccuguacuacgugaacaagcaggagggcaagagccucuacgugaagggggagcccaucaucaacuucuacgacccgcuggucuuccccuccgacgaguucgacgccagcaucucccaggugaacgagaagaucaaccagagccuggccuucauccggaaguccgacgagcuccugcacaacgugaacgucggcaagagcaccacgaacaucaugaucaccaccaucaucaucgugaucaucgugauccugcugcuccugaucgccgucgggcuguuccucuacugcaaggcccgcugaggacuagucccuguucccagagcccacuuuuuuuucuuuuuuugaaauaaaauagccugucuuucagaucuaaaaaaaaaaaaaaaaaaaaaaaaaaaaaaaaaaaaaaaaaaaaaaaaaaaaaaaaaaaaaaaaugcaucccccccccccccccccccccccccccccccaaaggcucuuuucagagccaccagaauu

SEQ ID NO: 12851 - RNA, 1957 nt, Artificial Sequence
  mRNA product Design a-2 comprising derived and/or modified sequence from HRSV(Memphis-37)__AIY60640.1__F-del_DSCav1 (opt1)
gggagaguccgcucagccagguugcagaagcggcuuagcguguguccuaaucuucucucugcguguagguaggccugugccgcaaacaagcuuaccauggagcugcccauccucaagaccaacgccaucaccacgauccuggccgcggugacccugugcuucgccagcucccagaacaucaccgaggaguucuaccagagcacgugcuccgccgucagcaagggcuaccucuccgcccugcgcaccgggugguacaccagcgugaucaccaucgagcuguccaacaucaaggagaacaagugcaacggcaccgacgccaaggugaagcucaucaagcaggagcuggacaaguacaagaacgcggucacggagcugcagcuccugaugcagagcaccccggccgccaacaaccgggcccgccgggagcugccccgcuucaugaacuacacccucaacaacaccaagaacaacaacgugacgcuguccaagaagcggaagcgccgguuccugggguuccuccugggcguggggagcgcgaucgccuccggcaucgccgucugcaaggugcugcaccucgagggcgaggugaacaagaucaagaacgcccugcugagcaccaacaaggccgucgugucccucagcaacgggguguccguccugaccuucaaggugcuggaccucaagaacuacaucgacaagcagcugcugcccauccucaacaagcagagcugcuccaucagcaacaucgagaccgugaucgaguuccagcagaagaacaaccgccugcuggagaucacgcgggaguucuccgucaacgcgggcgugaccacccccgugagcaccuacaugcucacgaacagcgagcugcugucccucaucaacgacaugccgaucaccaacgaccagaagaagcugaugagcaacaacguccagaucgugcgccagcaguccuacagcaucaugugcaucaucaaggaggaggugcuggccuacgucgugcagcucccccuguacggggugaucgacacccccugcuggaagcugcacaccagcccccucugcacgaccaacaccaaggagggcagcaacaucugccugacccggacggaccgcgggugguacugcgacaacgccggcuccgucagcuucuucccgcaggccgagaccugcaaggugcaguccaaccgggucuucugcgacaccaugaacagccugacccuccccuccgaggugaaccugugcaacaucgacaucuucaaccccaaguacgacugcaagaucaugacgagcaagaccgacguguccagcuccgucaucaccagccugggcgccaucguguccugcuacgggaagaccaagugcacggcgagcaacaagaaccgcggcaucaucaagaccuucuccaacgggugcgacuacgugagcaacaagggcgucgacaccgugagcgugggcaacacccucuacuacgucaacaagcaggaggggaagucccuguacgugaagggcgagcccaucaucaacuucuacgacccgcugguguuccccagcgacgaguucgacgccuccaucagccaggucaacgagaagaucaaccagucccucgccuucauccggaaguccgacgagcugcugcacaacgugaacguggggaaguccaccacgaacaucaugaucaccaccaucaucaucgucaucaucgugauccugcuccugcugaucgccgugggccucuuccuguacugcaaggcccgcugaggacuagucccuguucccagagcccacuuuuuuuucuuuuuuugaaauaaaauagccugucuuucagaucuaaaaaaaaaaaaaaaaaaaaaaaaaaaaaaaaaaaaaaaaaaaaaaaaaaaaaaaaaaaaaaaaugcaucccccccccccccccccccccccccccccccaaaggcucuuuucagagccaccagaauu

SEQ ID NO: 12852 - RNA, 1957 nt, Artificial Sequence
  mRNA product Design a-2 comprising derived and/or modified sequence from HRSV(Memphis-37)__AIY60640.1__F-del_DSCav1 (opt2)
gggagaguccgcucagccagguugcagaagcggcuuagcguguguccuaaucuucucucugcguguagguaggccugugccgcaaacaagcuuaccauggagcuccccauccucaagaccaacgccaucaccaccauccucgccgccgucacccucugcuucgccuccucccagaacaucaccgaggaguucuaccaguccaccugcuccgccgucuccaagggcuaccucuccgcccuccgcaccggcugguacaccuccgucaucaccaucgagcucuccaacaucaaggagaacaagugcaacggcaccgacgccaaggucaagcucaucaagcaggagcucgacaaguacaagaacgccgucaccgagcuccagcuccucaugcaguccacccccgccgccaacaaccgcgcccgccgcgagcucccccgcuucaugaacuacacccucaacaacaccaagaacaacaacgucacccucuccaagaagcgcaagcgccgcuuccucggcuuccuccucggcgucggcuccgccaucgccuccggcaucgccgucugcaagguccuccaccucgagggcgaggucaacaagaucaagaacgcccuccucuccaccaacaaggccgucgucucccucuccaacggcgucuccguccucaccuucaagguccucgaccucaagaacuacaucgacaagcagcuccuccccauccucaacaagcaguccugcuccaucuccaacaucgagaccgucaucgaguuccagcagaagaacaaccgccuccucgagaucacccgcgaguucuccgucaacgccggcgucaccacccccgucuccaccuacaugcucaccaacuccgagcuccucucccucaucaacgacaugcccaucaccaacgaccagaagaagcucauguccaacaacguccagaucguccgccagcaguccuacuccaucaugugcaucaucaaggaggagguccucgccuacgucguccagcucccccucuacggcgucaucgacacccccugcuggaagcuccacaccuccccccucugcaccaccaacaccaaggagggcuccaacaucugccucacccgcaccgaccgcggcugguacugcgacaacgccggcuccgucuccuucuucccccaggccgagaccugcaagguccaguccaaccgcgucuucugcgacaccaugaacucccucacccuccccuccgaggucaaccucugcaacaucgacaucuucaaccccaaguacgacugcaagaucaugaccuccaagaccgacgucuccuccuccgucaucaccucccucggcgccaucgucuccugcuacggcaagaccaagugcaccgccuccaacaagaaccgcggcaucaucaagaccuucuccaacggcugcgacuacgucuccaacaagggcgucgacaccgucuccgucggcaacacccucuacuacgucaacaagcaggagggcaagucccucuacgucaagggcgagcccaucaucaacuucuacgacccccucgucuuccccuccgacgaguucgacgccuccaucucccaggucaacgagaagaucaaccagucccucgccuucauccgcaaguccgacgagcuccuccacaacgucaacgucggcaaguccaccaccaacaucaugaucaccaccaucaucaucgucaucaucgucauccuccuccuccucaucgccgucggccucuuccucuacugcaaggcccgcugaggacuagucccuguucccagagcccacuuuuuuuucuuuuuuugaaauaaaauagccugucuuucagaucuaaaaaaaaaaaaaaaaaaaaaaaaaaaaaaaaaaaaaaaaaaaaaaaaaaaaaaaaaaaaaaaaugcaucccccccccccccccccccccccccccccccaaaggcucuuuucagagccaccagaauu

SEQ ID NO: 12853 - RNA, 1957 nt, Artificial Sequence
  mRNA product Design a-2 comprising derived and/or modified sequence from HRSV(Memphis-37)__AIY60640.1__F-del_DSCav1 (opt3)
gggagaguccgcucagccagguugcagaagcggcuuagcguguguccuaaucuucucucugcguguagguaggccugugccgcaaacaagcuuaccauggagcugcccauccucaagaccaacgccauuacaacuauacuugcugcagugacgcugugcuucgccagcucccagaauaucaccgaagaguuuuaccaaucuacauguucagcggucaguaaaggcuauuugagcgcuuuaagaacugggugguacaccuccguuauuacaaucgaacugucuaacauuaaggagaauaaaugcaacggaaccgacgccaaggugaaacuaaucaagcaggaacucgauaaguauaaaaaugcaguaacugagcugcagcuucugaugcagucgaccccugccgcuaacaauagggcacggcgcgaguugccacgauucaugaacuacacacucaauaacacgaagaauaacaaugugacucugagcaaaaagcguaaaagaagguuucuggguuuccucuuaggcgucgggucagccauagcuaguggaaucgccguguguaagguucugcaccuugaaggcgaggugaacaagauuaaaaaugcguugcuguccaccaacaaggcagucgugucucuaagcaacgguguauccguucucacauuuaaagugcuggaccuuaagaauuauaucgauaaacaacuguugccgauucucaacaagcagucaugcaguaucagcaauauagaaacugucauugaguuccagcagaaaaacaaucggcuguuagagaucacccgcgaauuuucugugaacgccggggugacaacccccgucuccacguacaugcugacuaauucagagcuccuuagccugauuaacgacaugccuaucacaaaugaucaaaagaaguugaugaguaacaauguucagaucgugagacagcagucuuauuccauuauguguauaaucaaagaagagguacuagcuuacgugguccaacugccacucuacggagugauugacacccccugcuggaagcugcauacuagcccucuuuguacaaccaacacgaaagaaggcucgaauaucugccugaccaggacagaucggggcugguauugugacaacgccgggucuguuuccuucuuuccacaggcagagacuugcaaggugcagucaaaucgcgucuucugugauaccaugaacaguuugacacuccccagcgaggugaaccugugcaauauagacauuuuuaacccuaaauacgauugcaagaucaugacuuccaagaccgacguaucuagcucaguuaucacaaguuuaggagcuauuguguccuguuaugguaaaaccaagugcacugccagcaauaaaaaccgaggcaucauuaagacguucucuaaugggugugauuacgucucaaacaaaggaguggacacagucagugugggcaauacccuguauuacguuaacaagcaagaagguaagagccuauaugugaaaggggagccaauaaucaauuuuuacgacccgcucguauuccccuccgaugaguucgacgcgucuauuucgcaggucaacgaaaagaucaaucagagccuggccuuuaucagaaaauccgaugaacuuuugcacaacgugaauguuggaaagucaacuaccaacauuaugauaacaaccaucauuaucgugauuaucgucauacugcuccugcuuaucgcagugggccuguucuuguacugcaaagcuaggugaggacuagucccuguucccagagcccacuuuuuuuucuuuuuuugaaauaaaauagccugucuuucagaucuaaaaaaaaaaaaaaaaaaaaaaaaaaaaaaaaaaaaaaaaaaaaaaaaaaaaaaaaaaaaaaaaugcaucccccccccccccccccccccccccccccccaaaggcucuuuucagagccaccagaauu

SEQ ID NO: 12854 - RNA, 1957 nt, Artificial Sequence
  mRNA product Design a-2 comprising derived and/or modified sequence from HRSV(Memphis-37)__AIY60640.1__F-del_DSCav1 (opt4)
gggagaguccgcucagccagguugcagaagcggcuuagcguguguccuaaucuucucucugcguguagguaggccugugccgcaaacaagcuuaccauggagcugcccauccugaagaccaacgccaucaccaccauccuggccgccgugacccugugcuucgccagcagccagaacaucaccgaggaguucuaccagagcaccugcagcgccgugagcaagggcuaccugagcgcccugagaaccggcugguacaccagcgugaucaccaucgagcugagcaacaucaaggagaacaagugcaacggcaccgacgccaaggugaagcugaucaagcaggagcuggacaaguacaagaacgccgugaccgagcugcagcugcugaugcagagcacccccgccgccaacaacagagccagaagagagcugcccagauucaugaacuacacccugaacaacaccaagaacaacaacgugacccugagcaagaagagaaagagaagauuccugggcuuccugcugggcgugggcagcgccaucgccagcggcaucgccgugugcaaggugcugcaccuggagggcgaggugaacaagaucaagaacgcccugcugagcaccaacaaggccguggugagccugagcaacggcgugagcgugcugaccuucaaggugcuggaccugaagaacuacaucgacaagcagcugcugcccauccugaacaagcagagcugcagcaucagcaacaucgagaccgugaucgaguuccagcagaagaacaacagacugcuggagaucaccagagaguucagcgugaacgccggcgugaccacccccgugagcaccuacaugcugaccaacagcgagcugcugagccugaucaacgacaugcccaucaccaacgaccagaagaagcugaugagcaacaacgugcagaucgugagacagcagagcuacagcaucaugugcaucaucaaggaggaggugcuggccuacguggugcagcugccccuguacggcgugaucgacacccccugcuggaagcugcacaccagcccccugugcaccaccaacaccaaggagggcagcaacaucugccugaccagaaccgacagaggcugguacugcgacaacgccggcagcgugagcuucuucccccaggccgagaccugcaaggugcagagcaacagaguguucugcgacaccaugaacagccugacccugcccagcgaggugaaccugugcaacaucgacaucuucaaccccaaguacgacugcaagaucaugaccagcaagaccgacgugagcagcagcgugaucaccagccugggcgccaucgugagcugcuacggcaagaccaagugcaccgccagcaacaagaacagaggcaucaucaagaccuucagcaacggcugcgacuacgugagcaacaagggcguggacaccgugagcgugggcaacacccuguacuacgugaacaagcaggagggcaagagccuguacgugaagggcgagcccaucaucaacuucuacgacccccugguguuccccagcgacgaguucgacgccagcaucagccaggugaacgagaagaucaaccagagccuggccuucaucagaaagagcgacgagcugcugcacaacgugaacgugggcaagagcaccaccaacaucaugaucaccaccaucaucaucgugaucaucgugauccugcugcugcugaucgccgugggccuguuccuguacugcaaggccagaugaggacuagucccuguucccagagcccacuuuuuuuucuuuuuuugaaauaaaauagccugucuuucagaucuaaaaaaaaaaaaaaaaaaaaaaaaaaaaaaaaaaaaaaaaaaaaaaaaaaaaaaaaaaaaaaaaugcaucccccccccccccccccccccccccccccccaaaggcucuuuucagagccaccagaauu

SEQ ID NO: 12855 - RNA, 1957 nt, Artificial Sequence
  mRNA product Design a-2 comprising derived and/or modified sequence from HRSV(Memphis-37)__AIY60640.1__F-del_DSCav1 (opt5)
gggagaguccgcucagccagguugcagaagcggcuuagcguguguccuaaucuucucucugcguguagguaggccugugccgcaaacaagcuuaccauggagcugcccauccucaagaccaacgccauuacaacgauccuggcugccgugacccuuugcuucgcgagcucccagaauauuacagaagaguuuuaccaaucuaccuguagcgcugucuccaaaggcuaucugucugcccucagaacagggugguacaccagcguuaucacaauugaacuguccaacaucaaggagaauaaaugcaacggaaccgacgccaaggugaaacuuaucaagcaggaacuggauaaguauaaaaaugcugugacggagcuccagcugcugaugcagucuaccccugccgcuaacaaucgggcccgcagagagcucccgcgguucaugaacuacacacugaauaacaccaagaauaacaaugucacacuuagcaaaaagcgcaaaagacgguuucugggcuuccuccugggggugggauccgcgauugccagcggcaucgcuguuuguaaggugcuucaccuggaaggggaggucaacaagauuaaaaaugcccuccugucuaccaacaaggcugugguuucccugagcaacggagugucuguccucacguuuaaagugcuggaccuuaagaauuauaucgauaaacaacugcuccccauucugaacaagcaguccugcagcaucucuaauauugaaacagugaucgaguuccagcagaaaaacaaucgccuucuggagaucaccagagaauuuuccgucaacgccggcguuacaaccccugugagcaccuacaugcucacaaauuccgagcugcugucucucauuaacgacaugcccaucacgaaugaucaaaagaagcugaugagcaacaaugugcagauuguccggcagcaguccuauagcaucauguguauuaucaaagaagaggugcuugcguacguugugcaacugccucucuacggcgucaucgacacccccugcuggaagcugcauacaucuccucuuuguaccacaaacaccaaagaaggguccaauauuugccugacgcgcacagauagaggaugguauugugacaacgccggcagcgugucuuucuuuccgcaggcugagaccugcaagguucagagcaaucggguguucugugauaccaugaacucccucacacugcccucugaggucaaccugugcaauaucgacauuuuuaacccuaaauacgauugcaagaucaugaccagcaagacagacguguccagcucugucauuacgucccucggggccaucgugagcuguuauggaaaaaccaagugcacagcuucuaauaaaaaccgcggcaucauuaagaccuucuccaaugggugugauuacguuagcaacaaaggaguggacacagucuccgugggcaauacccuguauuacguuaacaagcaagaaggcaagucucuuuaugugaaaggggagcccaucauuaauuuuuacgacccucuggucuuccccagcgaugaguucgacgccuccaucucucaggugaacgaaaagauuaaucagagccucgccuuuaucagaaaauccgaugaacugcugcacaacgugaauguuggaaagagcacgaccaacauuaugaucacaaccaucauuaucgucauuaucgugauucuucuccugcugaucgcugugggccucuuccuguacugcaaagcgcggugaggacuagucccuguucccagagcccacuuuuuuuucuuuuuuugaaauaaaauagccugucuuucagaucuaaaaaaaaaaaaaaaaaaaaaaaaaaaaaaaaaaaaaaaaaaaaaaaaaaaaaaaaaaaaaaaaugcaucccccccccccccccccccccccccccccccaaaggcucuuuucagagccaccagaauu

SEQ ID NO: 12856 - RNA, 1957 nt, Artificial Sequence
  mRNA product Design a-2 comprising derived and/or modified sequence from HRSV(Memphis-37)__AIY60640.1__F-del_DSCav1 (opt6)
gggagaguccgcucagccagguugcagaagcggcuuagcguguguccuaaucuucucucugcguguagguaggccugugccgcaaacaagcuuaccauggaauuaccaauccuuaaaacaaacgcaauaacaaccauccucgcagcaguaacucucugcuucgcuucaucucaaaacaucacagaagaauuuuaccaaagcacaugcucagcuguauccaaagguuaucuaucagccuugagaaccggaugguacacaucaguaauaacaauugaacuaucaaacauuaaagaaaacaaaugcaacggcaccgacgcaaaaguaaaacuaaucaaacaagaacuagacaaauauaaaaaugcaguaacagaauuacaauuauuaaugcaauccacaccagcugcaaacaaccgagcccgaagagaacuaccaagauucaugaacuacacacuaaacaacaccaaaaauaacaacgucacccuaucuaaaaaacguaaaagaagauucuuaggauuccucuuaggagucggauccgcaauagcaagcggcauagccguauguaaaguccuacacuuagaaggugaagugaauaaaauaaaaaacgcccuauuaagcacuaacaaagcaguagucucccuaucaaacggaguuucaguacucacauucaaaguacucgaccucaaaaacuacaucgacaaacaacuuuuaccaauucuaaacaaacaaucaugcuccauaucuaauaucgaaaccgucaucgaauuucaacaaaaaaacaauagacuacuagaaauaacuagagaauuuucaguaaacgccggcguuacgacaccagucucuacauacauguuaaccaauucagaacucuuaucauuaaucaacgacaugccaauaacaaacgaccaaaaaaaacuaauguccaauaacguacaaauagucagacaacaaucauacucaauuaugugcauaauaaaagaagaaguacuagcuuacguaguacaacucccccuauacggcguaauagacacuccauguuggaaauuacacacaucaccauuauguaccaccaauacaaaagaaggcucaaacauaugccuaacaagaacagauagaggaugguauugcgacaacgcaggcucaguuuccuuuuucccccaagcagaaaccugcaaaguacaaucaaaucguguuuuuugcgacaccaugaacucacucacauuaccaucagaaguaaaccuaugcaacauagacauauucaacccaaaauacgacugcaaaaucaugacaucaaaaacagacguauccucuucaguaauuacuagcuuaggagcaauagucucuuguuauggaaaaacaaaaugcacagccaguaacaaaaaccgcggaauaauaaaaaccuucucaaacgguugcgauuacgucucuaacaaaggagucgacacaguaucaguaggcaauacauuauacuacguuaacaaacaagaaggaaaaucuuuauacgucaaaggagaacccauuauaaacuuuuacgacccauuagucuucccuuccgacgaauuugacgccagcauuucacaaguaaacgaaaaaauaaaccaaucacucgcauuuauaagaaaaucugacgaauuacuccacaacguaaacguaggaaaauccacaacaaacauaaugauaacaaccauaaucaucgucauaauagucauacuucuccuauuaauugcaguaggcuuauuccuauacuguaaagcacgauaaggacuagucccuguucccagagcccacuuuuuuuucuuuuuuugaaauaaaauagccugucuuucagaucuaaaaaaaaaaaaaaaaaaaaaaaaaaaaaaaaaaaaaaaaaaaaaaaaaaaaaaaaaaaaaaaaugcaucccccccccccccccccccccccccccccccaaaggcucuuuucagagccaccagaauu

SEQ ID NO: 12857 - RNA, 1957 nt, Artificial Sequence
  mRNA product Design a-2 comprising derived and/or modified sequence from HRSV(Memphis-37)__AIY60640.1__F-del_DSCav1 (opt11)
gggagaguccgcucagccagguugcagaagcggcuuagcguguguccuaaucuucucucugcguguagguaggccugugccgcaaacaagcuuaccauggaacuaccaauccuaaaaacuaacgcaaucaccacaauccucgccgccgucacccuuugcuuugcguccucccaaaacauuacugaagaguucuaccaauccacgugcuccgccgucuccaaagguuaccuauccgcccuuaggaccggcugguacaccagcgucaucaccaucgaacuuuccaacaucaaagaaaacaaauguaacggcaccgacgcaaaagucaaacuuauuaaacaggaacucgacaaauauaagaaugccgucaccgaauuacaacuccucaugcaauccacccccgccgccaacaaccgagcaaggcgcgaacucccucgauucaugaauuacacccucaacaauaccaaaaacaacaacgucacccuauccaagaaacgcaaaagacgcuucuugggcuuccuccucggcgugggcuccgcaauagccuccgguauugccgugugcaaagucuuacaccucgaaggcgaggucaacaaaaucaaaaacgcccuccucuccaccaacaaagccgucgucagccuauccaacggcguuuccguccucaccuucaaaguacucgaccucaaaaacuacaucgacaaacaacuccuacccauacuaaacaaacaauccugcuccauuuccaacaucgaaaccguaaucgaguuccaacagaaaaacaaucgccuccuagaaaucacacgugaauuuucaguuaacgccggaguaacaacuccuguaucuaccuacaugcucaccaauuccgaacuccucagccucauaaacgacaugccaauaacaaacgaccaaaagaaacucaugucuaacaacguacaaaucgucagacaacaaaguuacucaaucauguguaucaucaaagaggaaguccuagcauacgugguccaacucccccucuacggaguaaucgacaccccaugcuggaaacuacacaccagcccccucuguaccacaaacacgaaagaagguuccaacaucugccugacccgaaccgaccgcggcugguacugcgauaacgcuggcuccgucucauucuucccccaagcagaaaccugcaaaguacaauccaaccgaguauucugcgacaccaugaacucacucacccuccccagcgaaguaaaccucugcaacaucgacauauucaacccaaaauacgacugcaaaauuaugaccucuaaaacagacguauccuccucuguaaucacaucccucggggccaucgucuccugcuacggcaaaaccaaaugcaccgccuccaacaaaaaccgcggaaucauaaaaaccuucuccaacggaugcgacuacgucucaaauaaaggcgucgacaccgucuccgucggcaacacgcuauacuacgucaacaaacaagaaggcaaaucacucuacgucaaaggugagcccaucaucaauuucuacgauccccucgucuucccaagcgacgaguucgacgccagcauaucccaaguaaacgagaaaaucaaccaaagccuggccuucauccgcaaauccgacgaacuacuacacaacguaaacguaggcaaguccacuaccaacauaaugaucaccacaaucaucauagucauaaucguuauacuacuccugcucaucgccguaggccucuuccucuauugcaaagcccgauagggacuagucccuguucccagagcccacuuuuuuuucuuuuuuugaaauaaaauagccugucuuucagaucuaaaaaaaaaaaaaaaaaaaaaaaaaaaaaaaaaaaaaaaaaaaaaaaaaaaaaaaaaaaaaaaaugcaucccccccccccccccccccccccccccccccaaaggcucuuuucagagccaccagaauu

SEQ ID NO: 12858 - RNA, 2035 nt, Artificial Sequence
  mRNA product Design a-3 comprising derived and/or modified sequence from HRSV(Memphis-37)__AIY60640.1__F-del_DSCav1 (opt1)
gggagagggcgcuuggcuugcaaggacccugagcugcggcauugaagcacacccaacccaacucgacugaagucagccucacugaaccggaucugagaaucuucucucucugggcuugccagggcucuccgaaccuagcuagcauccucuucaauuccaacuagaaagcuuaccauggagcugcccauccucaagaccaacgccaucaccacgauccuggccgcggugacccugugcuucgccagcucccagaacaucaccgaggaguucuaccagagcacgugcuccgccgucagcaagggcuaccucuccgcccugcgcaccgggugguacaccagcgugaucaccaucgagcuguccaacaucaaggagaacaagugcaacggcaccgacgccaaggugaagcucaucaagcaggagcuggacaaguacaagaacgcggucacggagcugcagcuccugaugcagagcaccccggccgccaacaaccgggcccgccgggagcugccccgcuucaugaacuacacccucaacaacaccaagaacaacaacgugacgcuguccaagaagcggaagcgccgguuccugggguuccuccugggcguggggagcgcgaucgccuccggcaucgccgucugcaaggugcugcaccucgagggcgaggugaacaagaucaagaacgcccugcuguccaccaacaaggccgucgugagccucuccaacggggugagcguccugaccuucaaggugcuggaccucaagaacuacaucgacaagcagcugcugcccauccugaacaagcagagcugcuccaucagcaacaucgagaccgucaucgaguuccagcagaagaacaaccgccuccuggagaucacgcgggaguucagcgugaacgcgggcgugaccacccccgucuccaccuacaugcugacgaacagcgagcuccugucccugaucaacgacaugccgaucaccaacgaccagaagaagcucaugagcaacaacgugcagaucgugcgccagcaguccuacagcaucaugugcaucaucaaggaggagguccuggccuacguggugcagcugccccucuacggggucaucgacacccccugcuggaagcugcacaccagcccccugugcacgaccaacaccaaggagggcuccaacaucugccucacccggacggaccgcgggugguacugcgacaacgccggcagcguguccuucuucccgcaggccgagaccugcaagguccagagcaaccggguguucugcgacaccaugaacucccugacccugcccagcgaggugaaccucugcaacaucgacaucuucaaccccaaguacgacugcaagaucaugacguccaagaccgacgucagcuccagcgugaucaccucccugggcgccaucgugagcugcuacgggaagaccaagugcacggcgagcaacaagaaccgcggcaucaucaagaccuucuccaacgggugcgacuacgucagcaacaagggcguggacaccguguccgucggcaacacccuguacuacgugaacaagcaggagggcaagagccucuacgugaagggggagcccaucaucaacuucuacgacccgcuggucuuccccuccgacgaguucgacgccagcaucucccaggugaacgagaagaucaaccagagccuggccuucauccggaaguccgacgagcuccugcacaacgugaacgucggcaagagcaccacgaacaucaugaucaccaccaucaucaucgugaucaucgugauccugcugcuccugaucgccgucgggcuguuccucuacugcaaggcccgcugaggacuagucccuguucccagagcccacuuuuuuuucuuuuuuugaaauaaaauagccugucuuucagaucuaaaaaaaaaaaaaaaaaaaaaaaaaaaaaaaaaaaaaaaaaaaaaaaaaaaaaaaaaaaaaaaaugcaucccccccccccccccccccccccccccccccaaaggcucuuuucagagccaccagaauu

SEQ ID NO: 12859 - RNA, 2035 nt, Artificial Sequence
  mRNA product Design a-3 comprising derived and/or modified sequence from HRSV(Memphis-37)__AIY60640.1__F-del_DSCav1 (opt1)
gggagagggcgcuuggcuugcaaggacccugagcugcggcauugaagcacacccaacccaacucgacugaagucagccucacugaaccggaucugagaaucuucucucucugggcuugccagggcucuccgaaccuagcuagcauccucuucaauuccaacuagaaagcuuaccauggagcugcccauccucaagaccaacgccaucaccacgauccuggccgcggugacccugugcuucgccagcucccagaacaucaccgaggaguucuaccagagcacgugcuccgccgucagcaagggcuaccucuccgcccugcgcaccgggugguacaccagcgugaucaccaucgagcuguccaacaucaaggagaacaagugcaacggcaccgacgccaaggugaagcucaucaagcaggagcuggacaaguacaagaacgcggucacggagcugcagcuccugaugcagagcaccccggccgccaacaaccgggcccgccgggagcugccccgcuucaugaacuacacccucaacaacaccaagaacaacaacgugacgcuguccaagaagcggaagcgccgguuccugggguuccuccugggcguggggagcgcgaucgccuccggcaucgccgucugcaaggugcugcaccucgagggcgaggugaacaagaucaagaacgcccugcugagcaccaacaaggccgucgugucccucagcaacgggguguccguccugaccuucaaggugcuggaccucaagaacuacaucgacaagcagcugcugcccauccucaacaagcagagcugcuccaucagcaacaucgagaccgugaucgaguuccagcagaagaacaaccgccugcuggagaucacgcgggaguucuccgucaacgcgggcgugaccacccccgugagcaccuacaugcucacgaacagcgagcugcugucccucaucaacgacaugccgaucaccaacgaccagaagaagcugaugagcaacaacguccagaucgugcgccagcaguccuacagcaucaugugcaucaucaaggaggaggugcuggccuacgucgugcagcucccccuguacggggugaucgacacccccugcuggaagcugcacaccagcccccucugcacgaccaacaccaaggagggcagcaacaucugccugacccggacggaccgcgggugguacugcgacaacgccggcuccgucagcuucuucccgcaggccgagaccugcaaggugcaguccaaccgggucuucugcgacaccaugaacagccugacccuccccuccgaggugaaccugugcaacaucgacaucuucaaccccaaguacgacugcaagaucaugacgagcaagaccgacguguccagcuccgucaucaccagccugggcgccaucguguccugcuacgggaagaccaagugcacggcgagcaacaagaaccgcggcaucaucaagaccuucuccaacgggugcgacuacgugagcaacaagggcgucgacaccgugagcgugggcaacacccucuacuacgucaacaagcaggaggggaagucccuguacgugaagggcgagcccaucaucaacuucuacgacccgcugguguuccccagcgacgaguucgacgccuccaucagccaggucaacgagaagaucaaccagucccucgccuucauccggaaguccgacgagcugcugcacaacgugaacguggggaaguccaccacgaacaucaugaucaccaccaucaucaucgucaucaucgugauccugcuccugcugaucgccgugggccucuuccuguacugcaaggcccgcugaggacuagucccuguucccagagcccacuuuuuuuucuuuuuuugaaauaaaauagccugucuuucagaucuaaaaaaaaaaaaaaaaaaaaaaaaaaaaaaaaaaaaaaaaaaaaaaaaaaaaaaaaaaaaaaaaugcaucccccccccccccccccccccccccccccccaaaggcucuuuucagagccaccagaauu

SEQ ID NO: 12860 - RNA, 2035 nt, Artificial Sequence
  mRNA product Design a-3 comprising derived and/or modified sequence from HRSV(Memphis-37)__AIY60640.1__F-del_DSCav1 (opt2)
gggagagggcgcuuggcuugcaaggacccugagcugcggcauugaagcacacccaacccaacucgacugaagucagccucacugaaccggaucugagaaucuucucucucugggcuugccagggcucuccgaaccuagcuagcauccucuucaauuccaacuagaaagcuuaccauggagcuccccauccucaagaccaacgccaucaccaccauccucgccgccgucacccucugcuucgccuccucccagaacaucaccgaggaguucuaccaguccaccugcuccgccgucuccaagggcuaccucuccgcccuccgcaccggcugguacaccuccgucaucaccaucgagcucuccaacaucaaggagaacaagugcaacggcaccgacgccaaggucaagcucaucaagcaggagcucgacaaguacaagaacgccgucaccgagcuccagcuccucaugcaguccacccccgccgccaacaaccgcgcccgccgcgagcucccccgcuucaugaacuacacccucaacaacaccaagaacaacaacgucacccucuccaagaagcgcaagcgccgcuuccucggcuuccuccucggcgucggcuccgccaucgccuccggcaucgccgucugcaagguccuccaccucgagggcgaggucaacaagaucaagaacgcccuccucuccaccaacaaggccgucgucucccucuccaacggcgucuccguccucaccuucaagguccucgaccucaagaacuacaucgacaagcagcuccuccccauccucaacaagcaguccugcuccaucuccaacaucgagaccgucaucgaguuccagcagaagaacaaccgccuccucgagaucacccgcgaguucuccgucaacgccggcgucaccacccccgucuccaccuacaugcucaccaacuccgagcuccucucccucaucaacgacaugcccaucaccaacgaccagaagaagcucauguccaacaacguccagaucguccgccagcaguccuacuccaucaugugcaucaucaaggaggagguccucgccuacgucguccagcucccccucuacggcgucaucgacacccccugcuggaagcuccacaccuccccccucugcaccaccaacaccaaggagggcuccaacaucugccucacccgcaccgaccgcggcugguacugcgacaacgccggcuccgucuccuucuucccccaggccgagaccugcaagguccaguccaaccgcgucuucugcgacaccaugaacucccucacccuccccuccgaggucaaccucugcaacaucgacaucuucaaccccaaguacgacugcaagaucaugaccuccaagaccgacgucuccuccuccgucaucaccucccucggcgccaucgucuccugcuacggcaagaccaagugcaccgccuccaacaagaaccgcggcaucaucaagaccuucuccaacggcugcgacuacgucuccaacaagggcgucgacaccgucuccgucggcaacacccucuacuacgucaacaagcaggagggcaagucccucuacgucaagggcgagcccaucaucaacuucuacgacccccucgucuuccccuccgacgaguucgacgccuccaucucccaggucaacgagaagaucaaccagucccucgccuucauccgcaaguccgacgagcuccuccacaacgucaacgucggcaaguccaccaccaacaucaugaucaccaccaucaucaucgucaucaucgucauccuccuccuccucaucgccgucggccucuuccucuacugcaaggcccgcugaggacuagucccuguucccagagcccacuuuuuuuucuuuuuuugaaauaaaauagccugucuuucagaucuaaaaaaaaaaaaaaaaaaaaaaaaaaaaaaaaaaaaaaaaaaaaaaaaaaaaaaaaaaaaaaaaugcaucccccccccccccccccccccccccccccccaaaggcucuuuucagagccaccagaauu

SEQ ID NO: 12861 - RNA, 2035 nt, Artificial Sequence
  mRNA product Design a-3 comprising derived and/or modified sequence from HRSV(Memphis-37)__AIY60640.1__F-del_DSCav1 (opt3)
gggagagggcgcuuggcuugcaaggacccugagcugcggcauugaagcacacccaacccaacucgacugaagucagccucacugaaccggaucugagaaucuucucucucugggcuugccagggcucuccgaaccuagcuagcauccucuucaauuccaacuagaaagcuuaccauggagcugcccauccucaagaccaacgccauuacaacuauacuugcugcagugacgcugugcuucgccagcucccagaauaucaccgaagaguuuuaccaaucuacauguucagcggucaguaaaggcuauuugagcgcuuuaagaacugggugguacaccuccguuauuacaaucgaacugucuaacauuaaggagaauaaaugcaacggaaccgacgccaaggugaaacuaaucaagcaggaacucgauaaguauaaaaaugcaguaacugagcugcagcuucugaugcagucgaccccugccgcuaacaauagggcacggcgcgaguugccacgauucaugaacuacacacucaauaacacgaagaauaacaaugugacucugagcaaaaagcguaaaagaagguuucuggguuuccucuuaggcgucgggucagccauagcuaguggaaucgccguguguaagguucugcaccuugaaggcgaggugaacaagauuaaaaaugcguugcuguccaccaacaaggcagucgugucucuaagcaacgguguauccguucucacauuuaaagugcuggaccuuaagaauuauaucgauaaacaacuguugccgauucucaacaagcagucaugcaguaucagcaauauagaaacugucauugaguuccagcagaaaaacaaucggcuguuagagaucacccgcgaauuuucugugaacgccggggugacaacccccgucuccacguacaugcugacuaauucagagcuccuuagccugauuaacgacaugccuaucacaaaugaucaaaagaaguugaugaguaacaauguucagaucgugagacagcagucuuauuccauuauguguauaaucaaagaagagguacuagcuuacgugguccaacugccacucuacggagugauugacacccccugcuggaagcugcauacuagcccucuuuguacaaccaacacgaaagaaggcucgaauaucugccugaccaggacagaucggggcugguauugugacaacgccgggucuguuuccuucuuuccacaggcagagacuugcaaggugcagucaaaucgcgucuucugugauaccaugaacaguuugacacuccccagcgaggugaaccugugcaauauagacauuuuuaacccuaaauacgauugcaagaucaugacuuccaagaccgacguaucuagcucaguuaucacaaguuuaggagcuauuguguccuguuaugguaaaaccaagugcacugccagcaauaaaaaccgaggcaucauuaagacguucucuaaugggugugauuacgucucaaacaaaggaguggacacagucagugugggcaauacccuguauuacguuaacaagcaagaagguaagagccuauaugugaaaggggagccaauaaucaauuuuuacgacccgcucguauuccccuccgaugaguucgacgcgucuauuucgcaggucaacgaaaagaucaaucagagccuggccuuuaucagaaaauccgaugaacuuuugcacaacgugaauguuggaaagucaacuaccaacauuaugauaacaaccaucauuaucgugauuaucgucauacugcuccugcuuaucgcagugggccuguucuuguacugcaaagcuaggugaggacuagucccuguucccagagcccacuuuuuuuucuuuuuuugaaauaaaauagccugucuuucagaucuaaaaaaaaaaaaaaaaaaaaaaaaaaaaaaaaaaaaaaaaaaaaaaaaaaaaaaaaaaaaaaaaugcaucccccccccccccccccccccccccccccccaaaggcucuuuucagagccaccagaauu

SEQ ID NO: 12862 - RNA, 2035 nt, Artificial Sequence
  mRNA product Design a-3 comprising derived and/or modified sequence from HRSV(Memphis-37)__AIY60640.1__F-del_DSCav1 (opt4)
gggagagggcgcuuggcuugcaaggacccugagcugcggcauugaagcacacccaacccaacucgacugaagucagccucacugaaccggaucugagaaucuucucucucugggcuugccagggcucuccgaaccuagcuagcauccucuucaauuccaacuagaaagcuuaccauggagcugcccauccugaagaccaacgccaucaccaccauccuggccgccgugacccugugcuucgccagcagccagaacaucaccgaggaguucuaccagagcaccugcagcgccgugagcaagggcuaccugagcgcccugagaaccggcugguacaccagcgugaucaccaucgagcugagcaacaucaaggagaacaagugcaacggcaccgacgccaaggugaagcugaucaagcaggagcuggacaaguacaagaacgccgugaccgagcugcagcugcugaugcagagcacccccgccgccaacaacagagccagaagagagcugcccagauucaugaacuacacccugaacaacaccaagaacaacaacgugacccugagcaagaagagaaagagaagauuccugggcuuccugcugggcgugggcagcgccaucgccagcggcaucgccgugugcaaggugcugcaccuggagggcgaggugaacaagaucaagaacgcccugcugagcaccaacaaggccguggugagccugagcaacggcgugagcgugcugaccuucaaggugcuggaccugaagaacuacaucgacaagcagcugcugcccauccugaacaagcagagcugcagcaucagcaacaucgagaccgugaucgaguuccagcagaagaacaacagacugcuggagaucaccagagaguucagcgugaacgccggcgugaccacccccgugagcaccuacaugcugaccaacagcgagcugcugagccugaucaacgacaugcccaucaccaacgaccagaagaagcugaugagcaacaacgugcagaucgugagacagcagagcuacagcaucaugugcaucaucaaggaggaggugcuggccuacguggugcagcugccccuguacggcgugaucgacacccccugcuggaagcugcacaccagcccccugugcaccaccaacaccaaggagggcagcaacaucugccugaccagaaccgacagaggcugguacugcgacaacgccggcagcgugagcuucuucccccaggccgagaccugcaaggugcagagcaacagaguguucugcgacaccaugaacagccugacccugcccagcgaggugaaccugugcaacaucgacaucuucaaccccaaguacgacugcaagaucaugaccagcaagaccgacgugagcagcagcgugaucaccagccugggcgccaucgugagcugcuacggcaagaccaagugcaccgccagcaacaagaacagaggcaucaucaagaccuucagcaacggcugcgacuacgugagcaacaagggcguggacaccgugagcgugggcaacacccuguacuacgugaacaagcaggagggcaagagccuguacgugaagggcgagcccaucaucaacuucuacgacccccugguguuccccagcgacgaguucgacgccagcaucagccaggugaacgagaagaucaaccagagccuggccuucaucagaaagagcgacgagcugcugcacaacgugaacgugggcaagagcaccaccaacaucaugaucaccaccaucaucaucgugaucaucgugauccugcugcugcugaucgccgugggccuguuccuguacugcaaggccagaugaggacuagucccuguucccagagcccacuuuuuuuucuuuuuuugaaauaaaauagccugucuuucagaucuaaaaaaaaaaaaaaaaaaaaaaaaaaaaaaaaaaaaaaaaaaaaaaaaaaaaaaaaaaaaaaaaugcaucccccccccccccccccccccccccccccccaaaggcucuuuucagagccaccagaauu

SEQ ID NO: 12863 - RNA, 2035 nt, Artificial Sequence
  mRNA product Design a-3 comprising derived and/or modified sequence from HRSV(Memphis-37)__AIY60640.1__F-del_DSCav1 (opt5)
gggagagggcgcuuggcuugcaaggacccugagcugcggcauugaagcacacccaacccaacucgacugaagucagccucacugaaccggaucugagaaucuucucucucugggcuugccagggcucuccgaaccuagcuagcauccucuucaauuccaacuagaaagcuuaccauggagcugcccauccucaagaccaacgccauuacaacgauccuggcugccgugacccuuugcuucgcgagcucccagaauauuacagaagaguuuuaccaaucuaccuguagcgcugucuccaaaggcuaucugucugcccucagaacagggugguacaccagcguuaucacaauugaacuguccaacaucaaggagaauaaaugcaacggaaccgacgccaaggugaaacuuaucaagcaggaacuggauaaguauaaaaaugcugugacggagcuccagcugcugaugcagucuaccccugccgcuaacaaucgggcccgcagagagcucccgcgguucaugaacuacacacugaauaacaccaagaauaacaaugucacacuuagcaaaaagcgcaaaagacgguuucugggcuuccuccugggggugggauccgcgauugccagcggcaucgcuguuuguaaggugcuucaccuggaaggggaggucaacaagauuaaaaaugcccuccugucuaccaacaaggcugugguuucccugagcaacggagugucuguccucacguuuaaagugcuggaccuuaagaauuauaucgauaaacaacugcuccccauucugaacaagcaguccugcagcaucucuaauauugaaacagugaucgaguuccagcagaaaaacaaucgccuucuggagaucaccagagaauuuuccgucaacgccggcguuacaaccccugugagcaccuacaugcucacaaauuccgagcugcugucucucauuaacgacaugcccaucacgaaugaucaaaagaagcugaugagcaacaaugugcagauuguccggcagcaguccuauagcaucauguguauuaucaaagaagaggugcuugcguacguugugcaacugccucucuacggcgucaucgacacccccugcuggaagcugcauacaucuccucuuuguaccacaaacaccaaagaaggguccaauauuugccugacgcgcacagauagaggaugguauugugacaacgccggcagcgugucuuucuuuccgcaggcugagaccugcaagguucagagcaaucggguguucugugauaccaugaacucccucacacugcccucugaggucaaccugugcaauaucgacauuuuuaacccuaaauacgauugcaagaucaugaccagcaagacagacguguccagcucugucauuacgucccucggggccaucgugagcuguuauggaaaaaccaagugcacagcuucuaauaaaaaccgcggcaucauuaagaccuucuccaaugggugugauuacguuagcaacaaaggaguggacacagucuccgugggcaauacccuguauuacguuaacaagcaagaaggcaagucucuuuaugugaaaggggagcccaucauuaauuuuuacgacccucuggucuuccccagcgaugaguucgacgccuccaucucucaggugaacgaaaagauuaaucagagccucgccuuuaucagaaaauccgaugaacugcugcacaacgugaauguuggaaagagcacgaccaacauuaugaucacaaccaucauuaucgucauuaucgugauucuucuccugcugaucgcugugggccucuuccuguacugcaaagcgcggugaggacuagucccuguucccagagcccacuuuuuuuucuuuuuuugaaauaaaauagccugucuuucagaucuaaaaaaaaaaaaaaaaaaaaaaaaaaaaaaaaaaaaaaaaaaaaaaaaaaaaaaaaaaaaaaaaugcaucccccccccccccccccccccccccccccccaaaggcucuuuucagagccaccagaauu

SEQ ID NO: 12864 - RNA, 2035 nt, Artificial Sequence
  mRNA product Design a-3 comprising derived and/or modified sequence from HRSV(Memphis-37)__AIY60640.1__F-del_DSCav1 (opt6)
gggagagggcgcuuggcuugcaaggacccugagcugcggcauugaagcacacccaacccaacucgacugaagucagccucacugaaccggaucugagaaucuucucucucugggcuugccagggcucuccgaaccuagcuagcauccucuucaauuccaacuagaaagcuuaccauggaauuaccaauccuuaaaacaaacgcaauaacaaccauccucgcagcaguaacucucugcuucgcuucaucucaaaacaucacagaagaauuuuaccaaagcacaugcucagcuguauccaaagguuaucuaucagccuugagaaccggaugguacacaucaguaauaacaauugaacuaucaaacauuaaagaaaacaaaugcaacggcaccgacgcaaaaguaaaacuaaucaaacaagaacuagacaaauauaaaaaugcaguaacagaauuacaauuauuaaugcaauccacaccagcugcaaacaaccgagcccgaagagaacuaccaagauucaugaacuacacacuaaacaacaccaaaaauaacaacgucacccuaucuaaaaaacguaaaagaagauucuuaggauuccucuuaggagucggauccgcaauagcaagcggcauagccguauguaaaguccuacacuuagaaggugaagugaauaaaauaaaaaacgcccuauuaagcacuaacaaagcaguagucucccuaucaaacggaguuucaguacucacauucaaaguacucgaccucaaaaacuacaucgacaaacaacuuuuaccaauucuaaacaaacaaucaugcuccauaucuaauaucgaaaccgucaucgaauuucaacaaaaaaacaauagacuacuagaaauaacuagagaauuuucaguaaacgccggcguuacgacaccagucucuacauacauguuaaccaauucagaacucuuaucauuaaucaacgacaugccaauaacaaacgaccaaaaaaaacuaauguccaauaacguacaaauagucagacaacaaucauacucaauuaugugcauaauaaaagaagaaguacuagcuuacguaguacaacucccccuauacggcguaauagacacuccauguuggaaauuacacacaucaccauuauguaccaccaauacaaaagaaggcucaaacauaugccuaacaagaacagauagaggaugguauugcgacaacgcaggcucaguuuccuuuuucccccaagcagaaaccugcaaaguacaaucaaaucguguuuuuugcgacaccaugaacucacucacauuaccaucagaaguaaaccuaugcaacauagacauauucaacccaaaauacgacugcaaaaucaugacaucaaaaacagacguauccucuucaguaauuacuagcuuaggagcaauagucucuuguuauggaaaaacaaaaugcacagccaguaacaaaaaccgcggaauaauaaaaaccuucucaaacgguugcgauuacgucucuaacaaaggagucgacacaguaucaguaggcaauacauuauacuacguuaacaaacaagaaggaaaaucuuuauacgucaaaggagaacccauuauaaacuuuuacgacccauuagucuucccuuccgacgaauuugacgccagcauuucacaaguaaacgaaaaaauaaaccaaucacucgcauuuauaagaaaaucugacgaauuacuccacaacguaaacguaggaaaauccacaacaaacauaaugauaacaaccauaaucaucgucauaauagucauacuucuccuauuaauugcaguaggcuuauuccuauacuguaaagcacgauaaggacuagucccuguucccagagcccacuuuuuuuucuuuuuuugaaauaaaauagccugucuuucagaucuaaaaaaaaaaaaaaaaaaaaaaaaaaaaaaaaaaaaaaaaaaaaaaaaaaaaaaaaaaaaaaaaugcaucccccccccccccccccccccccccccccccaaaggcucuuuucagagccaccagaauu

SEQ ID NO: 12865 - RNA, 2035 nt, Artificial Sequence
  mRNA product Design a-3 comprising derived and/or modified sequence from HRSV(Memphis-37)__AIY60640.1__F-del_DSCav1 (opt11)
gggagagggcgcuuggcuugcaaggacccugagcugcggcauugaagcacacccaacccaacucgacugaagucagccucacugaaccggaucugagaaucuucucucucugggcuugccagggcucuccgaaccuagcuagcauccucuucaauuccaacuagaaagcuuaccauggaacuaccaauccuaaaaacuaacgcaaucaccacaauccucgccgccgucacccuuugcuuugcguccucccaaaacauuacugaagaguucuaccaauccacgugcuccgccgucuccaaagguuaccuauccgcccuuaggaccggcugguacaccagcgucaucaccaucgaacuuuccaacaucaaagaaaacaaauguaacggcaccgacgcaaaagucaaacuuauuaaacaggaacucgacaaauauaagaaugccgucaccgaauuacaacuccucaugcaauccacccccgccgccaacaaccgagcaaggcgcgaacucccucgauucaugaauuacacccucaacaauaccaaaaacaacaacgucacccuauccaagaaacgcaaaagacgcuucuugggcuuccuccucggcgugggcuccgcaauagccuccgguauugccgugugcaaagucuuacaccucgaaggcgaggucaacaaaaucaaaaacgcccuccucuccaccaacaaagccgucgucagccuauccaacggcguuuccguccucaccuucaaaguacucgaccucaaaaacuacaucgacaaacaacuccuacccauacuaaacaaacaauccugcuccauuuccaacaucgaaaccguaaucgaguuccaacagaaaaacaaucgccuccuagaaaucacacgugaauuuucaguuaacgccggaguaacaacuccuguaucuaccuacaugcucaccaauuccgaacuccucagccucauaaacgacaugccaauaacaaacgaccaaaagaaacucaugucuaacaacguacaaaucgucagacaacaaaguuacucaaucauguguaucaucaaagaggaaguccuagcauacgugguccaacucccccucuacggaguaaucgacaccccaugcuggaaacuacacaccagcccccucuguaccacaaacacgaaagaagguuccaacaucugccugacccgaaccgaccgcggcugguacugcgauaacgcuggcuccgucucauucuucccccaagcagaaaccugcaaaguacaauccaaccgaguauucugcgacaccaugaacucacucacccuccccagcgaaguaaaccucugcaacaucgacauauucaacccaaaauacgacugcaaaauuaugaccucuaaaacagacguauccuccucuguaaucacaucccucggggccaucgucuccugcuacggcaaaaccaaaugcaccgccuccaacaaaaaccgcggaaucauaaaaaccuucuccaacggaugcgacuacgucucaaauaaaggcgucgacaccgucuccgucggcaacacgcuauacuacgucaacaaacaagaaggcaaaucacucuacgucaaaggugagcccaucaucaauuucuacgauccccucgucuucccaagcgacgaguucgacgccagcauaucccaaguaaacgagaaaaucaaccaaagccuggccuucauccgcaaauccgacgaacuacuacacaacguaaacguaggcaaguccacuaccaacauaaugaucaccacaaucaucauagucauaaucguuauacuacuccugcucaucgccguaggccucuuccucuauugcaaagcccgauagggacuagucccuguucccagagcccacuuuuuuuucuuuuuuugaaauaaaauagccugucuuucagaucuaaaaaaaaaaaaaaaaaaaaaaaaaaaaaaaaaaaaaaaaaaaaaaaaaaaaaaaaaaaaaaaaugcaucccccccccccccccccccccccccccccccaaaggcucuuuucagagccaccagaauu

SEQ ID NO: 12866 - RNA, 1984 nt, Artificial Sequence
  mRNA product Design a-4 comprising derived and/or modified sequence from HRSV(Memphis-37)__AIY60640.1__F-del_DSCav1 (opt1)
gggagacuccugucgggcggaaguaggaggaguagaguuuaaaaacaguacucuuuuuccgguucgggacguaguugaagcaacgacaagccggauaaccgcucuugagacaggaagcuuaccauggagcugcccauccucaagaccaacgccaucaccacgauccuggccgcggugacccugugcuucgccagcucccagaacaucaccgaggaguucuaccagagcacgugcuccgccgucagcaagggcuaccucuccgcccugcgcaccgggugguacaccagcgugaucaccaucgagcuguccaacaucaaggagaacaagugcaacggcaccgacgccaaggugaagcucaucaagcaggagcuggacaaguacaagaacgcggucacggagcugcagcuccugaugcagagcaccccggccgccaacaaccgggcccgccgggagcugccccgcuucaugaacuacacccucaacaacaccaagaacaacaacgugacgcuguccaagaagcggaagcgccgguuccugggguuccuccugggcguggggagcgcgaucgccuccggcaucgccgucugcaaggugcugcaccucgagggcgaggugaacaagaucaagaacgcccugcuguccaccaacaaggccgucgugagccucuccaacggggugagcguccugaccuucaaggugcuggaccucaagaacuacaucgacaagcagcugcugcccauccugaacaagcagagcugcuccaucagcaacaucgagaccgucaucgaguuccagcagaagaacaaccgccuccuggagaucacgcgggaguucagcgugaacgcgggcgugaccacccccgucuccaccuacaugcugacgaacagcgagcuccugucccugaucaacgacaugccgaucaccaacgaccagaagaagcucaugagcaacaacgugcagaucgugcgccagcaguccuacagcaucaugugcaucaucaaggaggagguccuggccuacguggugcagcugccccucuacggggucaucgacacccccugcuggaagcugcacaccagcccccugugcacgaccaacaccaaggagggcuccaacaucugccucacccggacggaccgcgggugguacugcgacaacgccggcagcguguccuucuucccgcaggccgagaccugcaagguccagagcaaccggguguucugcgacaccaugaacucccugacccugcccagcgaggugaaccucugcaacaucgacaucuucaaccccaaguacgacugcaagaucaugacguccaagaccgacgucagcuccagcgugaucaccucccugggcgccaucgugagcugcuacgggaagaccaagugcacggcgagcaacaagaaccgcggcaucaucaagaccuucuccaacgggugcgacuacgucagcaacaagggcguggacaccguguccgucggcaacacccuguacuacgugaacaagcaggagggcaagagccucuacgugaagggggagcccaucaucaacuucuacgacccgcuggucuuccccuccgacgaguucgacgccagcaucucccaggugaacgagaagaucaaccagagccuggccuucauccggaaguccgacgagcuccugcacaacgugaacgucggcaagagcaccacgaacaucaugaucaccaccaucaucaucgugaucaucgugauccugcugcuccugaucgccgucgggcuguuccucuacugcaaggcccgcugaggacuagucccuguucccagagcccacuuuuuuuucuuuuuuugaaauaaaauagccugucuuucagaucuaaaaaaaaaaaaaaaaaaaaaaaaaaaaaaaaaaaaaaaaaaaaaaaaaaaaaaaaaaaaaaaaugcaucccccccccccccccccccccccccccccccaaaggcucuuuucagagccaccagaauu

SEQ ID NO: 12867 - RNA, 1984 nt, Artificial Sequence
  mRNA product Design a-4 comprising derived and/or modified sequence from HRSV(Memphis-37)__AIY60640.1__F-del_DSCav1 (opt1)
gggagacuccugucgggcggaaguaggaggaguagaguuuaaaaacaguacucuuuuuccgguucgggacguaguugaagcaacgacaagccggauaaccgcucuugagacaggaagcuuaccauggagcugcccauccucaagaccaacgccaucaccacgauccuggccgcggugacccugugcuucgccagcucccagaacaucaccgaggaguucuaccagagcacgugcuccgccgucagcaagggcuaccucuccgcccugcgcaccgggugguacaccagcgugaucaccaucgagcuguccaacaucaaggagaacaagugcaacggcaccgacgccaaggugaagcucaucaagcaggagcuggacaaguacaagaacgcggucacggagcugcagcuccugaugcagagcaccccggccgccaacaaccgggcccgccgggagcugccccgcuucaugaacuacacccucaacaacaccaagaacaacaacgugacgcuguccaagaagcggaagcgccgguuccugggguuccuccugggcguggggagcgcgaucgccuccggcaucgccgucugcaaggugcugcaccucgagggcgaggugaacaagaucaagaacgcccugcugagcaccaacaaggccgucgugucccucagcaacgggguguccguccugaccuucaaggugcuggaccucaagaacuacaucgacaagcagcugcugcccauccucaacaagcagagcugcuccaucagcaacaucgagaccgugaucgaguuccagcagaagaacaaccgccugcuggagaucacgcgggaguucuccgucaacgcgggcgugaccacccccgugagcaccuacaugcucacgaacagcgagcugcugucccucaucaacgacaugccgaucaccaacgaccagaagaagcugaugagcaacaacguccagaucgugcgccagcaguccuacagcaucaugugcaucaucaaggaggaggugcuggccuacgucgugcagcucccccuguacggggugaucgacacccccugcuggaagcugcacaccagcccccucugcacgaccaacaccaaggagggcagcaacaucugccugacccggacggaccgcgggugguacugcgacaacgccggcuccgucagcuucuucccgcaggccgagaccugcaaggugcaguccaaccgggucuucugcgacaccaugaacagccugacccuccccuccgaggugaaccugugcaacaucgacaucuucaaccccaaguacgacugcaagaucaugacgagcaagaccgacguguccagcuccgucaucaccagccugggcgccaucguguccugcuacgggaagaccaagugcacggcgagcaacaagaaccgcggcaucaucaagaccuucuccaacgggugcgacuacgugagcaacaagggcgucgacaccgugagcgugggcaacacccucuacuacgucaacaagcaggaggggaagucccuguacgugaagggcgagcccaucaucaacuucuacgacccgcugguguuccccagcgacgaguucgacgccuccaucagccaggucaacgagaagaucaaccagucccucgccuucauccggaaguccgacgagcugcugcacaacgugaacguggggaaguccaccacgaacaucaugaucaccaccaucaucaucgucaucaucgugauccugcuccugcugaucgccgugggccucuuccuguacugcaaggcccgcugaggacuagucccuguucccagagcccacuuuuuuuucuuuuuuugaaauaaaauagccugucuuucagaucuaaaaaaaaaaaaaaaaaaaaaaaaaaaaaaaaaaaaaaaaaaaaaaaaaaaaaaaaaaaaaaaaugcaucccccccccccccccccccccccccccccccaaaggcucuuuucagagccaccagaauu

SEQ ID NO: 12868 - RNA, 1984 nt, Artificial Sequence
  mRNA product Design a-4 comprising derived and/or modified sequence from HRSV(Memphis-37)__AIY60640.1__F-del_DSCav1 (opt2)
gggagacuccugucgggcggaaguaggaggaguagaguuuaaaaacaguacucuuuuuccgguucgggacguaguugaagcaacgacaagccggauaaccgcucuugagacaggaagcuuaccauggagcuccccauccucaagaccaacgccaucaccaccauccucgccgccgucacccucugcuucgccuccucccagaacaucaccgaggaguucuaccaguccaccugcuccgccgucuccaagggcuaccucuccgcccuccgcaccggcugguacaccuccgucaucaccaucgagcucuccaacaucaaggagaacaagugcaacggcaccgacgccaaggucaagcucaucaagcaggagcucgacaaguacaagaacgccgucaccgagcuccagcuccucaugcaguccacccccgccgccaacaaccgcgcccgccgcgagcucccccgcuucaugaacuacacccucaacaacaccaagaacaacaacgucacccucuccaagaagcgcaagcgccgcuuccucggcuuccuccucggcgucggcuccgccaucgccuccggcaucgccgucugcaagguccuccaccucgagggcgaggucaacaagaucaagaacgcccuccucuccaccaacaaggccgucgucucccucuccaacggcgucuccguccucaccuucaagguccucgaccucaagaacuacaucgacaagcagcuccuccccauccucaacaagcaguccugcuccaucuccaacaucgagaccgucaucgaguuccagcagaagaacaaccgccuccucgagaucacccgcgaguucuccgucaacgccggcgucaccacccccgucuccaccuacaugcucaccaacuccgagcuccucucccucaucaacgacaugcccaucaccaacgaccagaagaagcucauguccaacaacguccagaucguccgccagcaguccuacuccaucaugugcaucaucaaggaggagguccucgccuacgucguccagcucccccucuacggcgucaucgacacccccugcuggaagcuccacaccuccccccucugcaccaccaacaccaaggagggcuccaacaucugccucacccgcaccgaccgcggcugguacugcgacaacgccggcuccgucuccuucuucccccaggccgagaccugcaagguccaguccaaccgcgucuucugcgacaccaugaacucccucacccuccccuccgaggucaaccucugcaacaucgacaucuucaaccccaaguacgacugcaagaucaugaccuccaagaccgacgucuccuccuccgucaucaccucccucggcgccaucgucuccugcuacggcaagaccaagugcaccgccuccaacaagaaccgcggcaucaucaagaccuucuccaacggcugcgacuacgucuccaacaagggcgucgacaccgucuccgucggcaacacccucuacuacgucaacaagcaggagggcaagucccucuacgucaagggcgagcccaucaucaacuucuacgacccccucgucuuccccuccgacgaguucgacgccuccaucucccaggucaacgagaagaucaaccagucccucgccuucauccgcaaguccgacgagcuccuccacaacgucaacgucggcaaguccaccaccaacaucaugaucaccaccaucaucaucgucaucaucgucauccuccuccuccucaucgccgucggccucuuccucuacugcaaggcccgcugaggacuagucccuguucccagagcccacuuuuuuuucuuuuuuugaaauaaaauagccugucuuucagaucuaaaaaaaaaaaaaaaaaaaaaaaaaaaaaaaaaaaaaaaaaaaaaaaaaaaaaaaaaaaaaaaaugcaucccccccccccccccccccccccccccccccaaaggcucuuuucagagccaccagaauu

SEQ ID NO: 12869 - RNA, 1984 nt, Artificial Sequence
  mRNA product Design a-4 comprising derived and/or modified sequence from HRSV(Memphis-37)__AIY60640.1__F-del_DSCav1 (opt3)
gggagacuccugucgggcggaaguaggaggaguagaguuuaaaaacaguacucuuuuuccgguucgggacguaguugaagcaacgacaagccggauaaccgcucuugagacaggaagcuuaccauggagcugcccauccucaagaccaacgccauuacaacuauacuugcugcagugacgcugugcuucgccagcucccagaauaucaccgaagaguuuuaccaaucuacauguucagcggucaguaaaggcuauuugagcgcuuuaagaacugggugguacaccuccguuauuacaaucgaacugucuaacauuaaggagaauaaaugcaacggaaccgacgccaaggugaaacuaaucaagcaggaacucgauaaguauaaaaaugcaguaacugagcugcagcuucugaugcagucgaccccugccgcuaacaauagggcacggcgcgaguugccacgauucaugaacuacacacucaauaacacgaagaauaacaaugugacucugagcaaaaagcguaaaagaagguuucuggguuuccucuuaggcgucgggucagccauagcuaguggaaucgccguguguaagguucugcaccuugaaggcgaggugaacaagauuaaaaaugcguugcuguccaccaacaaggcagucgugucucuaagcaacgguguauccguucucacauuuaaagugcuggaccuuaagaauuauaucgauaaacaacuguugccgauucucaacaagcagucaugcaguaucagcaauauagaaacugucauugaguuccagcagaaaaacaaucggcuguuagagaucacccgcgaauuuucugugaacgccggggugacaacccccgucuccacguacaugcugacuaauucagagcuccuuagccugauuaacgacaugccuaucacaaaugaucaaaagaaguugaugaguaacaauguucagaucgugagacagcagucuuauuccauuauguguauaaucaaagaagagguacuagcuuacgugguccaacugccacucuacggagugauugacacccccugcuggaagcugcauacuagcccucuuuguacaaccaacacgaaagaaggcucgaauaucugccugaccaggacagaucggggcugguauugugacaacgccgggucuguuuccuucuuuccacaggcagagacuugcaaggugcagucaaaucgcgucuucugugauaccaugaacaguuugacacuccccagcgaggugaaccugugcaauauagacauuuuuaacccuaaauacgauugcaagaucaugacuuccaagaccgacguaucuagcucaguuaucacaaguuuaggagcuauuguguccuguuaugguaaaaccaagugcacugccagcaauaaaaaccgaggcaucauuaagacguucucuaaugggugugauuacgucucaaacaaaggaguggacacagucagugugggcaauacccuguauuacguuaacaagcaagaagguaagagccuauaugugaaaggggagccaauaaucaauuuuuacgacccgcucguauuccccuccgaugaguucgacgcgucuauuucgcaggucaacgaaaagaucaaucagagccuggccuuuaucagaaaauccgaugaacuuuugcacaacgugaauguuggaaagucaacuaccaacauuaugauaacaaccaucauuaucgugauuaucgucauacugcuccugcuuaucgcagugggccuguucuuguacugcaaagcuaggugaggacuagucccuguucccagagcccacuuuuuuuucuuuuuuugaaauaaaauagccugucuuucagaucuaaaaaaaaaaaaaaaaaaaaaaaaaaaaaaaaaaaaaaaaaaaaaaaaaaaaaaaaaaaaaaaaugcaucccccccccccccccccccccccccccccccaaaggcucuuuucagagccaccagaauu

SEQ ID NO: 12870 - RNA, 1984 nt, Artificial Sequence
  mRNA product Design a-4 comprising derived and/or modified sequence from HRSV(Memphis-37)__AIY60640.1__F-del_DSCav1 (opt4)
gggagacuccugucgggcggaaguaggaggaguagaguuuaaaaacaguacucuuuuuccgguucgggacguaguugaagcaacgacaagccggauaaccgcucuugagacaggaagcuuaccauggagcugcccauccugaagaccaacgccaucaccaccauccuggccgccgugacccugugcuucgccagcagccagaacaucaccgaggaguucuaccagagcaccugcagcgccgugagcaagggcuaccugagcgcccugagaaccggcugguacaccagcgugaucaccaucgagcugagcaacaucaaggagaacaagugcaacggcaccgacgccaaggugaagcugaucaagcaggagcuggacaaguacaagaacgccgugaccgagcugcagcugcugaugcagagcacccccgccgccaacaacagagccagaagagagcugcccagauucaugaacuacacccugaacaacaccaagaacaacaacgugacccugagcaagaagagaaagagaagauuccugggcuuccugcugggcgugggcagcgccaucgccagcggcaucgccgugugcaaggugcugcaccuggagggcgaggugaacaagaucaagaacgcccugcugagcaccaacaaggccguggugagccugagcaacggcgugagcgugcugaccuucaaggugcuggaccugaagaacuacaucgacaagcagcugcugcccauccugaacaagcagagcugcagcaucagcaacaucgagaccgugaucgaguuccagcagaagaacaacagacugcuggagaucaccagagaguucagcgugaacgccggcgugaccacccccgugagcaccuacaugcugaccaacagcgagcugcugagccugaucaacgacaugcccaucaccaacgaccagaagaagcugaugagcaacaacgugcagaucgugagacagcagagcuacagcaucaugugcaucaucaaggaggaggugcuggccuacguggugcagcugccccuguacggcgugaucgacacccccugcuggaagcugcacaccagcccccugugcaccaccaacaccaaggagggcagcaacaucugccugaccagaaccgacagaggcugguacugcgacaacgccggcagcgugagcuucuucccccaggccgagaccugcaaggugcagagcaacagaguguucugcgacaccaugaacagccugacccugcccagcgaggugaaccugugcaacaucgacaucuucaaccccaaguacgacugcaagaucaugaccagcaagaccgacgugagcagcagcgugaucaccagccugggcgccaucgugagcugcuacggcaagaccaagugcaccgccagcaacaagaacagaggcaucaucaagaccuucagcaacggcugcgacuacgugagcaacaagggcguggacaccgugagcgugggcaacacccuguacuacgugaacaagcaggagggcaagagccuguacgugaagggcgagcccaucaucaacuucuacgacccccugguguuccccagcgacgaguucgacgccagcaucagccaggugaacgagaagaucaaccagagccuggccuucaucagaaagagcgacgagcugcugcacaacgugaacgugggcaagagcaccaccaacaucaugaucaccaccaucaucaucgugaucaucgugauccugcugcugcugaucgccgugggccuguuccuguacugcaaggccagaugaggacuagucccuguucccagagcccacuuuuuuuucuuuuuuugaaauaaaauagccugucuuucagaucuaaaaaaaaaaaaaaaaaaaaaaaaaaaaaaaaaaaaaaaaaaaaaaaaaaaaaaaaaaaaaaaaugcaucccccccccccccccccccccccccccccccaaaggcucuuuucagagccaccagaauu

SEQ ID NO: 12871 - RNA, 1984 nt, Artificial Sequence
  mRNA product Design a-4 comprising derived and/or modified sequence from HRSV(Memphis-37)__AIY60640.1__F-del_DSCav1 (opt5)
gggagacuccugucgggcggaaguaggaggaguagaguuuaaaaacaguacucuuuuuccgguucgggacguaguugaagcaacgacaagccggauaaccgcucuugagacaggaagcuuaccauggagcugcccauccucaagaccaacgccauuacaacgauccuggcugccgugacccuuugcuucgcgagcucccagaauauuacagaagaguuuuaccaaucuaccuguagcgcugucuccaaaggcuaucugucugcccucagaacagggugguacaccagcguuaucacaauugaacuguccaacaucaaggagaauaaaugcaacggaaccgacgccaaggugaaacuuaucaagcaggaacuggauaaguauaaaaaugcugugacggagcuccagcugcugaugcagucuaccccugccgcuaacaaucgggcccgcagagagcucccgcgguucaugaacuacacacugaauaacaccaagaauaacaaugucacacuuagcaaaaagcgcaaaagacgguuucugggcuuccuccugggggugggauccgcgauugccagcggcaucgcuguuuguaaggugcuucaccuggaaggggaggucaacaagauuaaaaaugcccuccugucuaccaacaaggcugugguuucccugagcaacggagugucuguccucacguuuaaagugcuggaccuuaagaauuauaucgauaaacaacugcuccccauucugaacaagcaguccugcagcaucucuaauauugaaacagugaucgaguuccagcagaaaaacaaucgccuucuggagaucaccagagaauuuuccgucaacgccggcguuacaaccccugugagcaccuacaugcucacaaauuccgagcugcugucucucauuaacgacaugcccaucacgaaugaucaaaagaagcugaugagcaacaaugugcagauuguccggcagcaguccuauagcaucauguguauuaucaaagaagaggugcuugcguacguugugcaacugccucucuacggcgucaucgacacccccugcuggaagcugcauacaucuccucuuuguaccacaaacaccaaagaaggguccaauauuugccugacgcgcacagauagaggaugguauugugacaacgccggcagcgugucuuucuuuccgcaggcugagaccugcaagguucagagcaaucggguguucugugauaccaugaacucccucacacugcccucugaggucaaccugugcaauaucgacauuuuuaacccuaaauacgauugcaagaucaugaccagcaagacagacguguccagcucugucauuacgucccucggggccaucgugagcuguuauggaaaaaccaagugcacagcuucuaauaaaaaccgcggcaucauuaagaccuucuccaaugggugugauuacguuagcaacaaaggaguggacacagucuccgugggcaauacccuguauuacguuaacaagcaagaaggcaagucucuuuaugugaaaggggagcccaucauuaauuuuuacgacccucuggucuuccccagcgaugaguucgacgccuccaucucucaggugaacgaaaagauuaaucagagccucgccuuuaucagaaaauccgaugaacugcugcacaacgugaauguuggaaagagcacgaccaacauuaugaucacaaccaucauuaucgucauuaucgugauucuucuccugcugaucgcugugggccucuuccuguacugcaaagcgcggugaggacuagucccuguucccagagcccacuuuuuuuucuuuuuuugaaauaaaauagccugucuuucagaucuaaaaaaaaaaaaaaaaaaaaaaaaaaaaaaaaaaaaaaaaaaaaaaaaaaaaaaaaaaaaaaaaugcaucccccccccccccccccccccccccccccccaaaggcucuuuucagagccaccagaauu

SEQ ID NO: 12872 - RNA, 1984 nt, Artificial Sequence
  mRNA product Design a-4 comprising derived and/or modified sequence from HRSV(Memphis-37)__AIY60640.1__F-del_DSCav1 (opt6)
gggagacuccugucgggcggaaguaggaggaguagaguuuaaaaacaguacucuuuuuccgguucgggacguaguugaagcaacgacaagccggauaaccgcucuugagacaggaagcuuaccauggaauuaccaauccuuaaaacaaacgcaauaacaaccauccucgcagcaguaacucucugcuucgcuucaucucaaaacaucacagaagaauuuuaccaaagcacaugcucagcuguauccaaagguuaucuaucagccuugagaaccggaugguacacaucaguaauaacaauugaacuaucaaacauuaaagaaaacaaaugcaacggcaccgacgcaaaaguaaaacuaaucaaacaagaacuagacaaauauaaaaaugcaguaacagaauuacaauuauuaaugcaauccacaccagcugcaaacaaccgagcccgaagagaacuaccaagauucaugaacuacacacuaaacaacaccaaaaauaacaacgucacccuaucuaaaaaacguaaaagaagauucuuaggauuccucuuaggagucggauccgcaauagcaagcggcauagccguauguaaaguccuacacuuagaaggugaagugaauaaaauaaaaaacgcccuauuaagcacuaacaaagcaguagucucccuaucaaacggaguuucaguacucacauucaaaguacucgaccucaaaaacuacaucgacaaacaacuuuuaccaauucuaaacaaacaaucaugcuccauaucuaauaucgaaaccgucaucgaauuucaacaaaaaaacaauagacuacuagaaauaacuagagaauuuucaguaaacgccggcguuacgacaccagucucuacauacauguuaaccaauucagaacucuuaucauuaaucaacgacaugccaauaacaaacgaccaaaaaaaacuaauguccaauaacguacaaauagucagacaacaaucauacucaauuaugugcauaauaaaagaagaaguacuagcuuacguaguacaacucccccuauacggcguaauagacacuccauguuggaaauuacacacaucaccauuauguaccaccaauacaaaagaaggcucaaacauaugccuaacaagaacagauagaggaugguauugcgacaacgcaggcucaguuuccuuuuucccccaagcagaaaccugcaaaguacaaucaaaucguguuuuuugcgacaccaugaacucacucacauuaccaucagaaguaaaccuaugcaacauagacauauucaacccaaaauacgacugcaaaaucaugacaucaaaaacagacguauccucuucaguaauuacuagcuuaggagcaauagucucuuguuauggaaaaacaaaaugcacagccaguaacaaaaaccgcggaauaauaaaaaccuucucaaacgguugcgauuacgucucuaacaaaggagucgacacaguaucaguaggcaauacauuauacuacguuaacaaacaagaaggaaaaucuuuauacgucaaaggagaacccauuauaaacuuuuacgacccauuagucuucccuuccgacgaauuugacgccagcauuucacaaguaaacgaaaaaauaaaccaaucacucgcauuuauaagaaaaucugacgaauuacuccacaacguaaacguaggaaaauccacaacaaacauaaugauaacaaccauaaucaucgucauaauagucauacuucuccuauuaauugcaguaggcuuauuccuauacuguaaagcacgauaaggacuagucccuguucccagagcccacuuuuuuuucuuuuuuugaaauaaaauagccugucuuucagaucuaaaaaaaaaaaaaaaaaaaaaaaaaaaaaaaaaaaaaaaaaaaaaaaaaaaaaaaaaaaaaaaaugcaucccccccccccccccccccccccccccccccaaaggcucuuuucagagccaccagaauu

SEQ ID NO: 12873 - RNA, 1984 nt, Artificial Sequence
  mRNA product Design a-4 comprising derived and/or modified sequence from HRSV(Memphis-37)__AIY60640.1__F-del_DSCav1 (opt11)
gggagacuccugucgggcggaaguaggaggaguagaguuuaaaaacaguacucuuuuuccgguucgggacguaguugaagcaacgacaagccggauaaccgcucuugagacaggaagcuuaccauggaacuaccaauccuaaaaacuaacgcaaucaccacaauccucgccgccgucacccuuugcuuugcguccucccaaaacauuacugaagaguucuaccaauccacgugcuccgccgucuccaaagguuaccuauccgcccuuaggaccggcugguacaccagcgucaucaccaucgaacuuuccaacaucaaagaaaacaaauguaacggcaccgacgcaaaagucaaacuuauuaaacaggaacucgacaaauauaagaaugccgucaccgaauuacaacuccucaugcaauccacccccgccgccaacaaccgagcaaggcgcgaacucccucgauucaugaauuacacccucaacaauaccaaaaacaacaacgucacccuauccaagaaacgcaaaagacgcuucuugggcuuccuccucggcgugggcuccgcaauagccuccgguauugccgugugcaaagucuuacaccucgaaggcgaggucaacaaaaucaaaaacgcccuccucuccaccaacaaagccgucgucagccuauccaacggcguuuccguccucaccuucaaaguacucgaccucaaaaacuacaucgacaaacaacuccuacccauacuaaacaaacaauccugcuccauuuccaacaucgaaaccguaaucgaguuccaacagaaaaacaaucgccuccuagaaaucacacgugaauuuucaguuaacgccggaguaacaacuccuguaucuaccuacaugcucaccaauuccgaacuccucagccucauaaacgacaugccaauaacaaacgaccaaaagaaacucaugucuaacaacguacaaaucgucagacaacaaaguuacucaaucauguguaucaucaaagaggaaguccuagcauacgugguccaacucccccucuacggaguaaucgacaccccaugcuggaaacuacacaccagcccccucuguaccacaaacacgaaagaagguuccaacaucugccugacccgaaccgaccgcggcugguacugcgauaacgcuggcuccgucucauucuucccccaagcagaaaccugcaaaguacaauccaaccgaguauucugcgacaccaugaacucacucacccuccccagcgaaguaaaccucugcaacaucgacauauucaacccaaaauacgacugcaaaauuaugaccucuaaaacagacguauccuccucuguaaucacaucccucggggccaucgucuccugcuacggcaaaaccaaaugcaccgccuccaacaaaaaccgcggaaucauaaaaaccuucuccaacggaugcgacuacgucucaaauaaaggcgucgacaccgucuccgucggcaacacgcuauacuacgucaacaaacaagaaggcaaaucacucuacgucaaaggugagcccaucaucaauuucuacgauccccucgucuucccaagcgacgaguucgacgccagcauaucccaaguaaacgagaaaaucaaccaaagccuggccuucauccgcaaauccgacgaacuacuacacaacguaaacguaggcaaguccacuaccaacauaaugaucaccacaaucaucauagucauaaucguuauacuacuccugcucaucgccguaggccucuuccucuauugcaaagcccgauagggacuagucccuguucccagagcccacuuuuuuuucuuuuuuugaaauaaaauagccugucuuucagaucuaaaaaaaaaaaaaaaaaaaaaaaaaaaaaaaaaaaaaaaaaaaaaaaaaaaaaaaaaaaaaaaaugcaucccccccccccccccccccccccccccccccaaaggcucuuuucagagccaccagaauu

SEQ ID NO: 12874 - RNA, 1930 nt, Artificial Sequence
  mRNA product Design a-5 comprising derived and/or modified sequence from HRSV(Memphis-37)__AIY60640.1__F-del_DSCav1 (opt1)
gggagacuuucccauucuguagcagaauuugguguugccuguggucuuggucccgcggagaagcuuaccauggagcugcccauccucaagaccaacgccaucaccacgauccuggccgcggugacccugugcuucgccagcucccagaacaucaccgaggaguucuaccagagcacgugcuccgccgucagcaagggcuaccucuccgcccugcgcaccgggugguacaccagcgugaucaccaucgagcuguccaacaucaaggagaacaagugcaacggcaccgacgccaaggugaagcucaucaagcaggagcuggacaaguacaagaacgcggucacggagcugcagcuccugaugcagagcaccccggccgccaacaaccgggcccgccgggagcugccccgcuucaugaacuacacccucaacaacaccaagaacaacaacgugacgcuguccaagaagcggaagcgccgguuccugggguuccuccugggcguggggagcgcgaucgccuccggcaucgccgucugcaaggugcugcaccucgagggcgaggugaacaagaucaagaacgcccugcuguccaccaacaaggccgucgugagccucuccaacggggugagcguccugaccuucaaggugcuggaccucaagaacuacaucgacaagcagcugcugcccauccugaacaagcagagcugcuccaucagcaacaucgagaccgucaucgaguuccagcagaagaacaaccgccuccuggagaucacgcgggaguucagcgugaacgcgggcgugaccacccccgucuccaccuacaugcugacgaacagcgagcuccugucccugaucaacgacaugccgaucaccaacgaccagaagaagcucaugagcaacaacgugcagaucgugcgccagcaguccuacagcaucaugugcaucaucaaggaggagguccuggccuacguggugcagcugccccucuacggggucaucgacacccccugcuggaagcugcacaccagcccccugugcacgaccaacaccaaggagggcuccaacaucugccucacccggacggaccgcgggugguacugcgacaacgccggcagcguguccuucuucccgcaggccgagaccugcaagguccagagcaaccggguguucugcgacaccaugaacucccugacccugcccagcgaggugaaccucugcaacaucgacaucuucaaccccaaguacgacugcaagaucaugacguccaagaccgacgucagcuccagcgugaucaccucccugggcgccaucgugagcugcuacgggaagaccaagugcacggcgagcaacaagaaccgcggcaucaucaagaccuucuccaacgggugcgacuacgucagcaacaagggcguggacaccguguccgucggcaacacccuguacuacgugaacaagcaggagggcaagagccucuacgugaagggggagcccaucaucaacuucuacgacccgcuggucuuccccuccgacgaguucgacgccagcaucucccaggugaacgagaagaucaaccagagccuggccuucauccggaaguccgacgagcuccugcacaacgugaacgucggcaagagcaccacgaacaucaugaucaccaccaucaucaucgugaucaucgugauccugcugcuccugaucgccgucgggcuguuccucuacugcaaggcccgcugaggacuagucccuguucccagagcccacuuuuuuuucuuuuuuugaaauaaaauagccugucuuucagaucuaaaaaaaaaaaaaaaaaaaaaaaaaaaaaaaaaaaaaaaaaaaaaaaaaaaaaaaaaaaaaaaaugcaucccccccccccccccccccccccccccccccaaaggcucuuuucagagccaccagaauu

SEQ ID NO: 12875 - RNA, 1930 nt, Artificial Sequence
  mRNA product Design a-5 comprising derived and/or modified sequence from HRSV(Memphis-37)__AIY60640.1__F-del_DSCav1 (opt1)
gggagacuuucccauucuguagcagaauuugguguugccuguggucuuggucccgcggagaagcuuaccauggagcugcccauccucaagaccaacgccaucaccacgauccuggccgcggugacccugugcuucgccagcucccagaacaucaccgaggaguucuaccagagcacgugcuccgccgucagcaagggcuaccucuccgcccugcgcaccgggugguacaccagcgugaucaccaucgagcuguccaacaucaaggagaacaagugcaacggcaccgacgccaaggugaagcucaucaagcaggagcuggacaaguacaagaacgcggucacggagcugcagcuccugaugcagagcaccccggccgccaacaaccgggcccgccgggagcugccccgcuucaugaacuacacccucaacaacaccaagaacaacaacgugacgcuguccaagaagcggaagcgccgguuccugggguuccuccugggcguggggagcgcgaucgccuccggcaucgccgucugcaaggugcugcaccucgagggcgaggugaacaagaucaagaacgcccugcugagcaccaacaaggccgucgugucccucagcaacgggguguccguccugaccuucaaggugcuggaccucaagaacuacaucgacaagcagcugcugcccauccucaacaagcagagcugcuccaucagcaacaucgagaccgugaucgaguuccagcagaagaacaaccgccugcuggagaucacgcgggaguucuccgucaacgcgggcgugaccacccccgugagcaccuacaugcucacgaacagcgagcugcugucccucaucaacgacaugccgaucaccaacgaccagaagaagcugaugagcaacaacguccagaucgugcgccagcaguccuacagcaucaugugcaucaucaaggaggaggugcuggccuacgucgugcagcucccccuguacggggugaucgacacccccugcuggaagcugcacaccagcccccucugcacgaccaacaccaaggagggcagcaacaucugccugacccggacggaccgcgggugguacugcgacaacgccggcuccgucagcuucuucccgcaggccgagaccugcaaggugcaguccaaccgggucuucugcgacaccaugaacagccugacccuccccuccgaggugaaccugugcaacaucgacaucuucaaccccaaguacgacugcaagaucaugacgagcaagaccgacguguccagcuccgucaucaccagccugggcgccaucguguccugcuacgggaagaccaagugcacggcgagcaacaagaaccgcggcaucaucaagaccuucuccaacgggugcgacuacgugagcaacaagggcgucgacaccgugagcgugggcaacacccucuacuacgucaacaagcaggaggggaagucccuguacgugaagggcgagcccaucaucaacuucuacgacccgcugguguuccccagcgacgaguucgacgccuccaucagccaggucaacgagaagaucaaccagucccucgccuucauccggaaguccgacgagcugcugcacaacgugaacguggggaaguccaccacgaacaucaugaucaccaccaucaucaucgucaucaucgugauccugcuccugcugaucgccgugggccucuuccuguacugcaaggcccgcugaggacuagucccuguucccagagcccacuuuuuuuucuuuuuuugaaauaaaauagccugucuuucagaucuaaaaaaaaaaaaaaaaaaaaaaaaaaaaaaaaaaaaaaaaaaaaaaaaaaaaaaaaaaaaaaaaugcaucccccccccccccccccccccccccccccccaaaggcucuuuucagagccaccagaauu

SEQ ID NO: 12876 - RNA, 1930 nt, Artificial Sequence
  mRNA product Design a-5 comprising derived and/or modified sequence from HRSV(Memphis-37)__AIY60640.1__F-del_DSCav1 (opt2)
gggagacuuucccauucuguagcagaauuugguguugccuguggucuuggucccgcggagaagcuuaccauggagcuccccauccucaagaccaacgccaucaccaccauccucgccgccgucacccucugcuucgccuccucccagaacaucaccgaggaguucuaccaguccaccugcuccgccgucuccaagggcuaccucuccgcccuccgcaccggcugguacaccuccgucaucaccaucgagcucuccaacaucaaggagaacaagugcaacggcaccgacgccaaggucaagcucaucaagcaggagcucgacaaguacaagaacgccgucaccgagcuccagcuccucaugcaguccacccccgccgccaacaaccgcgcccgccgcgagcucccccgcuucaugaacuacacccucaacaacaccaagaacaacaacgucacccucuccaagaagcgcaagcgccgcuuccucggcuuccuccucggcgucggcuccgccaucgccuccggcaucgccgucugcaagguccuccaccucgagggcgaggucaacaagaucaagaacgcccuccucuccaccaacaaggccgucgucucccucuccaacggcgucuccguccucaccuucaagguccucgaccucaagaacuacaucgacaagcagcuccuccccauccucaacaagcaguccugcuccaucuccaacaucgagaccgucaucgaguuccagcagaagaacaaccgccuccucgagaucacccgcgaguucuccgucaacgccggcgucaccacccccgucuccaccuacaugcucaccaacuccgagcuccucucccucaucaacgacaugcccaucaccaacgaccagaagaagcucauguccaacaacguccagaucguccgccagcaguccuacuccaucaugugcaucaucaaggaggagguccucgccuacgucguccagcucccccucuacggcgucaucgacacccccugcuggaagcuccacaccuccccccucugcaccaccaacaccaaggagggcuccaacaucugccucacccgcaccgaccgcggcugguacugcgacaacgccggcuccgucuccuucuucccccaggccgagaccugcaagguccaguccaaccgcgucuucugcgacaccaugaacucccucacccuccccuccgaggucaaccucugcaacaucgacaucuucaaccccaaguacgacugcaagaucaugaccuccaagaccgacgucuccuccuccgucaucaccucccucggcgccaucgucuccugcuacggcaagaccaagugcaccgccuccaacaagaaccgcggcaucaucaagaccuucuccaacggcugcgacuacgucuccaacaagggcgucgacaccgucuccgucggcaacacccucuacuacgucaacaagcaggagggcaagucccucuacgucaagggcgagcccaucaucaacuucuacgacccccucgucuuccccuccgacgaguucgacgccuccaucucccaggucaacgagaagaucaaccagucccucgccuucauccgcaaguccgacgagcuccuccacaacgucaacgucggcaaguccaccaccaacaucaugaucaccaccaucaucaucgucaucaucgucauccuccuccuccucaucgccgucggccucuuccucuacugcaaggcccgcugaggacuagucccuguucccagagcccacuuuuuuuucuuuuuuugaaauaaaauagccugucuuucagaucuaaaaaaaaaaaaaaaaaaaaaaaaaaaaaaaaaaaaaaaaaaaaaaaaaaaaaaaaaaaaaaaaugcaucccccccccccccccccccccccccccccccaaaggcucuuuucagagccaccagaauu

SEQ ID NO: 12877 - RNA, 1930 nt, Artificial Sequence
  mRNA product Design a-5 comprising derived and/or modified sequence from HRSV(Memphis-37)__AIY60640.1__F-del_DSCav1 (opt3)
gggagacuuucccauucuguagcagaauuugguguugccuguggucuuggucccgcggagaagcuuaccauggagcugcccauccucaagaccaacgccauuacaacuauacuugcugcagugacgcugugcuucgccagcucccagaauaucaccgaagaguuuuaccaaucuacauguucagcggucaguaaaggcuauuugagcgcuuuaagaacugggugguacaccuccguuauuacaaucgaacugucuaacauuaaggagaauaaaugcaacggaaccgacgccaaggugaaacuaaucaagcaggaacucgauaaguauaaaaaugcaguaacugagcugcagcuucugaugcagucgaccccugccgcuaacaauagggcacggcgcgaguugccacgauucaugaacuacacacucaauaacacgaagaauaacaaugugacucugagcaaaaagcguaaaagaagguuucuggguuuccucuuaggcgucgggucagccauagcuaguggaaucgccguguguaagguucugcaccuugaaggcgaggugaacaagauuaaaaaugcguugcuguccaccaacaaggcagucgugucucuaagcaacgguguauccguucucacauuuaaagugcuggaccuuaagaauuauaucgauaaacaacuguugccgauucucaacaagcagucaugcaguaucagcaauauagaaacugucauugaguuccagcagaaaaacaaucggcuguuagagaucacccgcgaauuuucugugaacgccggggugacaacccccgucuccacguacaugcugacuaauucagagcuccuuagccugauuaacgacaugccuaucacaaaugaucaaaagaaguugaugaguaacaauguucagaucgugagacagcagucuuauuccauuauguguauaaucaaagaagagguacuagcuuacgugguccaacugccacucuacggagugauugacacccccugcuggaagcugcauacuagcccucuuuguacaaccaacacgaaagaaggcucgaauaucugccugaccaggacagaucggggcugguauugugacaacgccgggucuguuuccuucuuuccacaggcagagacuugcaaggugcagucaaaucgcgucuucugugauaccaugaacaguuugacacuccccagcgaggugaaccugugcaauauagacauuuuuaacccuaaauacgauugcaagaucaugacuuccaagaccgacguaucuagcucaguuaucacaaguuuaggagcuauuguguccuguuaugguaaaaccaagugcacugccagcaauaaaaaccgaggcaucauuaagacguucucuaaugggugugauuacgucucaaacaaaggaguggacacagucagugugggcaauacccuguauuacguuaacaagcaagaagguaagagccuauaugugaaaggggagccaauaaucaauuuuuacgacccgcucguauuccccuccgaugaguucgacgcgucuauuucgcaggucaacgaaaagaucaaucagagccuggccuuuaucagaaaauccgaugaacuuuugcacaacgugaauguuggaaagucaacuaccaacauuaugauaacaaccaucauuaucgugauuaucgucauacugcuccugcuuaucgcagugggccuguucuuguacugcaaagcuaggugaggacuagucccuguucccagagcccacuuuuuuuucuuuuuuugaaauaaaauagccugucuuucagaucuaaaaaaaaaaaaaaaaaaaaaaaaaaaaaaaaaaaaaaaaaaaaaaaaaaaaaaaaaaaaaaaaugcaucccccccccccccccccccccccccccccccaaaggcucuuuucagagccaccagaauu

SEQ ID NO: 12878 - RNA, 1930 nt, Artificial Sequence
  mRNA product Design a-5 comprising derived and/or modified sequence from HRSV(Memphis-37)__AIY60640.1__F-del_DSCav1 (opt4)
gggagacuuucccauucuguagcagaauuugguguugccuguggucuuggucccgcggagaagcuuaccauggagcugcccauccugaagaccaacgccaucaccaccauccuggccgccgugacccugugcuucgccagcagccagaacaucaccgaggaguucuaccagagcaccugcagcgccgugagcaagggcuaccugagcgcccugagaaccggcugguacaccagcgugaucaccaucgagcugagcaacaucaaggagaacaagugcaacggcaccgacgccaaggugaagcugaucaagcaggagcuggacaaguacaagaacgccgugaccgagcugcagcugcugaugcagagcacccccgccgccaacaacagagccagaagagagcugcccagauucaugaacuacacccugaacaacaccaagaacaacaacgugacccugagcaagaagagaaagagaagauuccugggcuuccugcugggcgugggcagcgccaucgccagcggcaucgccgugugcaaggugcugcaccuggagggcgaggugaacaagaucaagaacgcccugcugagcaccaacaaggccguggugagccugagcaacggcgugagcgugcugaccuucaaggugcuggaccugaagaacuacaucgacaagcagcugcugcccauccugaacaagcagagcugcagcaucagcaacaucgagaccgugaucgaguuccagcagaagaacaacagacugcuggagaucaccagagaguucagcgugaacgccggcgugaccacccccgugagcaccuacaugcugaccaacagcgagcugcugagccugaucaacgacaugcccaucaccaacgaccagaagaagcugaugagcaacaacgugcagaucgugagacagcagagcuacagcaucaugugcaucaucaaggaggaggugcuggccuacguggugcagcugccccuguacggcgugaucgacacccccugcuggaagcugcacaccagcccccugugcaccaccaacaccaaggagggcagcaacaucugccugaccagaaccgacagaggcugguacugcgacaacgccggcagcgugagcuucuucccccaggccgagaccugcaaggugcagagcaacagaguguucugcgacaccaugaacagccugacccugcccagcgaggugaaccugugcaacaucgacaucuucaaccccaaguacgacugcaagaucaugaccagcaagaccgacgugagcagcagcgugaucaccagccugggcgccaucgugagcugcuacggcaagaccaagugcaccgccagcaacaagaacagaggcaucaucaagaccuucagcaacggcugcgacuacgugagcaacaagggcguggacaccgugagcgugggcaacacccuguacuacgugaacaagcaggagggcaagagccuguacgugaagggcgagcccaucaucaacuucuacgacccccugguguuccccagcgacgaguucgacgccagcaucagccaggugaacgagaagaucaaccagagccuggccuucaucagaaagagcgacgagcugcugcacaacgugaacgugggcaagagcaccaccaacaucaugaucaccaccaucaucaucgugaucaucgugauccugcugcugcugaucgccgugggccuguuccuguacugcaaggccagaugaggacuagucccuguucccagagcccacuuuuuuuucuuuuuuugaaauaaaauagccugucuuucagaucuaaaaaaaaaaaaaaaaaaaaaaaaaaaaaaaaaaaaaaaaaaaaaaaaaaaaaaaaaaaaaaaaugcaucccccccccccccccccccccccccccccccaaaggcucuuuucagagccaccagaauu

SEQ ID NO: 12879 - RNA, 1930 nt, Artificial Sequence
  mRNA product Design a-5 comprising derived and/or modified sequence from HRSV(Memphis-37)__AIY60640.1__F-del_DSCav1 (opt5)
gggagacuuucccauucuguagcagaauuugguguugccuguggucuuggucccgcggagaagcuuaccauggagcugcccauccucaagaccaacgccauuacaacgauccuggcugccgugacccuuugcuucgcgagcucccagaauauuacagaagaguuuuaccaaucuaccuguagcgcugucuccaaaggcuaucugucugcccucagaacagggugguacaccagcguuaucacaauugaacuguccaacaucaaggagaauaaaugcaacggaaccgacgccaaggugaaacuuaucaagcaggaacuggauaaguauaaaaaugcugugacggagcuccagcugcugaugcagucuaccccugccgcuaacaaucgggcccgcagagagcucccgcgguucaugaacuacacacugaauaacaccaagaauaacaaugucacacuuagcaaaaagcgcaaaagacgguuucugggcuuccuccugggggugggauccgcgauugccagcggcaucgcuguuuguaaggugcuucaccuggaaggggaggucaacaagauuaaaaaugcccuccugucuaccaacaaggcugugguuucccugagcaacggagugucuguccucacguuuaaagugcuggaccuuaagaauuauaucgauaaacaacugcuccccauucugaacaagcaguccugcagcaucucuaauauugaaacagugaucgaguuccagcagaaaaacaaucgccuucuggagaucaccagagaauuuuccgucaacgccggcguuacaaccccugugagcaccuacaugcucacaaauuccgagcugcugucucucauuaacgacaugcccaucacgaaugaucaaaagaagcugaugagcaacaaugugcagauuguccggcagcaguccuauagcaucauguguauuaucaaagaagaggugcuugcguacguugugcaacugccucucuacggcgucaucgacacccccugcuggaagcugcauacaucuccucuuuguaccacaaacaccaaagaaggguccaauauuugccugacgcgcacagauagaggaugguauugugacaacgccggcagcgugucuuucuuuccgcaggcugagaccugcaagguucagagcaaucggguguucugugauaccaugaacucccucacacugcccucugaggucaaccugugcaauaucgacauuuuuaacccuaaauacgauugcaagaucaugaccagcaagacagacguguccagcucugucauuacgucccucggggccaucgugagcuguuauggaaaaaccaagugcacagcuucuaauaaaaaccgcggcaucauuaagaccuucuccaaugggugugauuacguuagcaacaaaggaguggacacagucuccgugggcaauacccuguauuacguuaacaagcaagaaggcaagucucuuuaugugaaaggggagcccaucauuaauuuuuacgacccucuggucuuccccagcgaugaguucgacgccuccaucucucaggugaacgaaaagauuaaucagagccucgccuuuaucagaaaauccgaugaacugcugcacaacgugaauguuggaaagagcacgaccaacauuaugaucacaaccaucauuaucgucauuaucgugauucuucuccugcugaucgcugugggccucuuccuguacugcaaagcgcggugaggacuagucccuguucccagagcccacuuuuuuuucuuuuuuugaaauaaaauagccugucuuucagaucuaaaaaaaaaaaaaaaaaaaaaaaaaaaaaaaaaaaaaaaaaaaaaaaaaaaaaaaaaaaaaaaaugcaucccccccccccccccccccccccccccccccaaaggcucuuuucagagccaccagaauu

SEQ ID NO: 12880 - RNA, 1930 nt, Artificial Sequence
  mRNA product Design a-5 comprising derived and/or modified sequence from HRSV(Memphis-37)__AIY60640.1__F-del_DSCav1 (opt6)
gggagacuuucccauucuguagcagaauuugguguugccuguggucuuggucccgcggagaagcuuaccauggaauuaccaauccuuaaaacaaacgcaauaacaaccauccucgcagcaguaacucucugcuucgcuucaucucaaaacaucacagaagaauuuuaccaaagcacaugcucagcuguauccaaagguuaucuaucagccuugagaaccggaugguacacaucaguaauaacaauugaacuaucaaacauuaaagaaaacaaaugcaacggcaccgacgcaaaaguaaaacuaaucaaacaagaacuagacaaauauaaaaaugcaguaacagaauuacaauuauuaaugcaauccacaccagcugcaaacaaccgagcccgaagagaacuaccaagauucaugaacuacacacuaaacaacaccaaaaauaacaacgucacccuaucuaaaaaacguaaaagaagauucuuaggauuccucuuaggagucggauccgcaauagcaagcggcauagccguauguaaaguccuacacuuagaaggugaagugaauaaaauaaaaaacgcccuauuaagcacuaacaaagcaguagucucccuaucaaacggaguuucaguacucacauucaaaguacucgaccucaaaaacuacaucgacaaacaacuuuuaccaauucuaaacaaacaaucaugcuccauaucuaauaucgaaaccgucaucgaauuucaacaaaaaaacaauagacuacuagaaauaacuagagaauuuucaguaaacgccggcguuacgacaccagucucuacauacauguuaaccaauucagaacucuuaucauuaaucaacgacaugccaauaacaaacgaccaaaaaaaacuaauguccaauaacguacaaauagucagacaacaaucauacucaauuaugugcauaauaaaagaagaaguacuagcuuacguaguacaacucccccuauacggcguaauagacacuccauguuggaaauuacacacaucaccauuauguaccaccaauacaaaagaaggcucaaacauaugccuaacaagaacagauagaggaugguauugcgacaacgcaggcucaguuuccuuuuucccccaagcagaaaccugcaaaguacaaucaaaucguguuuuuugcgacaccaugaacucacucacauuaccaucagaaguaaaccuaugcaacauagacauauucaacccaaaauacgacugcaaaaucaugacaucaaaaacagacguauccucuucaguaauuacuagcuuaggagcaauagucucuuguuauggaaaaacaaaaugcacagccaguaacaaaaaccgcggaauaauaaaaaccuucucaaacgguugcgauuacgucucuaacaaaggagucgacacaguaucaguaggcaauacauuauacuacguuaacaaacaagaaggaaaaucuuuauacgucaaaggagaacccauuauaaacuuuuacgacccauuagucuucccuuccgacgaauuugacgccagcauuucacaaguaaacgaaaaaauaaaccaaucacucgcauuuauaagaaaaucugacgaauuacuccacaacguaaacguaggaaaauccacaacaaacauaaugauaacaaccauaaucaucgucauaauagucauacuucuccuauuaauugcaguaggcuuauuccuauacuguaaagcacgauaaggacuagucccuguucccagagcccacuuuuuuuucuuuuuuugaaauaaaauagccugucuuucagaucuaaaaaaaaaaaaaaaaaaaaaaaaaaaaaaaaaaaaaaaaaaaaaaaaaaaaaaaaaaaaaaaaugcaucccccccccccccccccccccccccccccccaaaggcucuuuucagagccaccagaauu

SEQ ID NO: 12881 - RNA, 1930 nt, Artificial Sequence
  mRNA product Design a-5 comprising derived and/or modified sequence from HRSV(Memphis-37)__AIY60640.1__F-del_DSCav1 (opt11)
gggagacuuucccauucuguagcagaauuugguguugccuguggucuuggucccgcggagaagcuuaccauggaacuaccaauccuaaaaacuaacgcaaucaccacaauccucgccgccgucacccuuugcuuugcguccucccaaaacauuacugaagaguucuaccaauccacgugcuccgccgucuccaaagguuaccuauccgcccuuaggaccggcugguacaccagcgucaucaccaucgaacuuuccaacaucaaagaaaacaaauguaacggcaccgacgcaaaagucaaacuuauuaaacaggaacucgacaaauauaagaaugccgucaccgaauuacaacuccucaugcaauccacccccgccgccaacaaccgagcaaggcgcgaacucccucgauucaugaauuacacccucaacaauaccaaaaacaacaacgucacccuauccaagaaacgcaaaagacgcuucuugggcuuccuccucggcgugggcuccgcaauagccuccgguauugccgugugcaaagucuuacaccucgaaggcgaggucaacaaaaucaaaaacgcccuccucuccaccaacaaagccgucgucagccuauccaacggcguuuccguccucaccuucaaaguacucgaccucaaaaacuacaucgacaaacaacuccuacccauacuaaacaaacaauccugcuccauuuccaacaucgaaaccguaaucgaguuccaacagaaaaacaaucgccuccuagaaaucacacgugaauuuucaguuaacgccggaguaacaacuccuguaucuaccuacaugcucaccaauuccgaacuccucagccucauaaacgacaugccaauaacaaacgaccaaaagaaacucaugucuaacaacguacaaaucgucagacaacaaaguuacucaaucauguguaucaucaaagaggaaguccuagcauacgugguccaacucccccucuacggaguaaucgacaccccaugcuggaaacuacacaccagcccccucuguaccacaaacacgaaagaagguuccaacaucugccugacccgaaccgaccgcggcugguacugcgauaacgcuggcuccgucucauucuucccccaagcagaaaccugcaaaguacaauccaaccgaguauucugcgacaccaugaacucacucacccuccccagcgaaguaaaccucugcaacaucgacauauucaacccaaaauacgacugcaaaauuaugaccucuaaaacagacguauccuccucuguaaucacaucccucggggccaucgucuccugcuacggcaaaaccaaaugcaccgccuccaacaaaaaccgcggaaucauaaaaaccuucuccaacggaugcgacuacgucucaaauaaaggcgucgacaccgucuccgucggcaacacgcuauacuacgucaacaaacaagaaggcaaaucacucuacgucaaaggugagcccaucaucaauuucuacgauccccucgucuucccaagcgacgaguucgacgccagcauaucccaaguaaacgagaaaaucaaccaaagccuggccuucauccgcaaauccgacgaacuacuacacaacguaaacguaggcaaguccacuaccaacauaaugaucaccacaaucaucauagucauaaucguuauacuacuccugcucaucgccguaggccucuuccucuauugcaaagcccgauagggacuagucccuguucccagagcccacuuuuuuuucuuuuuuugaaauaaaauagccugucuuucagaucuaaaaaaaaaaaaaaaaaaaaaaaaaaaaaaaaaaaaaaaaaaaaaaaaaaaaaaaaaaaaaaaaugcaucccccccccccccccccccccccccccccccaaaggcucuuuucagagccaccagaauu

SEQ ID NO: 12882 - RNA, 2111 nt, Artificial Sequence
  mRNA product Design b-1 comprising derived and/or modified sequence from HRSV(Memphis-37)__AIY60640.1__F-del_DSCav1 (opt1)
gggagacggagacggccugcaggaccugcucucucagcccucagccgaggccuacgccgagccgagugcgcagccgacgaccgggaggagccgcagccuucaacucugagguacugugauccgcgcugcccgccgggccgccccaguccgcugcugcggcaccuccuucccucgcgcccucuucgcucgccagcgccuucccugugagccugcgucaccgcggccgccaagcuuaccauggagcugcccauccucaagaccaacgccaucaccacgauccuggccgcggugacccugugcuucgccagcucccagaacaucaccgaggaguucuaccagagcacgugcuccgccgucagcaagggcuaccucuccgcccugcgcaccgggugguacaccagcgugaucaccaucgagcuguccaacaucaaggagaacaagugcaacggcaccgacgccaaggugaagcucaucaagcaggagcuggacaaguacaagaacgcggucacggagcugcagcuccugaugcagagcaccccggccgccaacaaccgggcccgccgggagcugccccgcuucaugaacuacacccucaacaacaccaagaacaacaacgugacgcuguccaagaagcggaagcgccgguuccugggguuccuccugggcguggggagcgcgaucgccuccggcaucgccgucugcaaggugcugcaccucgagggcgaggugaacaagaucaagaacgcccugcuguccaccaacaaggccgucgugagccucuccaacggggugagcguccugaccuucaaggugcuggaccucaagaacuacaucgacaagcagcugcugcccauccugaacaagcagagcugcuccaucagcaacaucgagaccgucaucgaguuccagcagaagaacaaccgccuccuggagaucacgcgggaguucagcgugaacgcgggcgugaccacccccgucuccaccuacaugcugacgaacagcgagcuccugucccugaucaacgacaugccgaucaccaacgaccagaagaagcucaugagcaacaacgugcagaucgugcgccagcaguccuacagcaucaugugcaucaucaaggaggagguccuggccuacguggugcagcugccccucuacggggucaucgacacccccugcuggaagcugcacaccagcccccugugcacgaccaacaccaaggagggcuccaacaucugccucacccggacggaccgcgggugguacugcgacaacgccggcagcguguccuucuucccgcaggccgagaccugcaagguccagagcaaccggguguucugcgacaccaugaacucccugacccugcccagcgaggugaaccucugcaacaucgacaucuucaaccccaaguacgacugcaagaucaugacguccaagaccgacgucagcuccagcgugaucaccucccugggcgccaucgugagcugcuacgggaagaccaagugcacggcgagcaacaagaaccgcggcaucaucaagaccuucuccaacgggugcgacuacgucagcaacaagggcguggacaccguguccgucggcaacacccuguacuacgugaacaagcaggagggcaagagccucuacgugaagggggagcccaucaucaacuucuacgacccgcuggucuuccccuccgacgaguucgacgccagcaucucccaggugaacgagaagaucaaccagagccuggccuucauccggaaguccgacgagcuccugcacaacgugaacgucggcaagagcaccacgaacaucaugaucaccaccaucaucaucgugaucaucgugauccugcugcuccugaucgccgucgggcuguuccucuacugcaaggcccgcugaggacuaguguccaccugucccuccugggcugcuggauugucucguuuuccugccaaauaaacaggaucagcgcuuuacagaucuaaaaaaaaaaaaaaaaaaaaaaaaaaaaaaaaaaaaaaaaaaaaaaaaaaaaaaaaaaaaaaaaugcaucccccccccccccccccccccccccccccccaaaggcucuuuucagagccaccagaauu

SEQ ID NO: 12883 - RNA, 2111 nt, Artificial Sequence
  mRNA product Design b-1 comprising derived and/or modified sequence from HRSV(Memphis-37)__AIY60640.1__F-del_DSCav1 (opt1)
gggagacggagacggccugcaggaccugcucucucagcccucagccgaggccuacgccgagccgagugcgcagccgacgaccgggaggagccgcagccuucaacucugagguacugugauccgcgcugcccgccgggccgccccaguccgcugcugcggcaccuccuucccucgcgcccucuucgcucgccagcgccuucccugugagccugcgucaccgcggccgccaagcuuaccauggagcugcccauccucaagaccaacgccaucaccacgauccuggccgcggugacccugugcuucgccagcucccagaacaucaccgaggaguucuaccagagcacgugcuccgccgucagcaagggcuaccucuccgcccugcgcaccgggugguacaccagcgugaucaccaucgagcuguccaacaucaaggagaacaagugcaacggcaccgacgccaaggugaagcucaucaagcaggagcuggacaaguacaagaacgcggucacggagcugcagcuccugaugcagagcaccccggccgccaacaaccgggcccgccgggagcugccccgcuucaugaacuacacccucaacaacaccaagaacaacaacgugacgcuguccaagaagcggaagcgccgguuccugggguuccuccugggcguggggagcgcgaucgccuccggcaucgccgucugcaaggugcugcaccucgagggcgaggugaacaagaucaagaacgcccugcugagcaccaacaaggccgucgugucccucagcaacgggguguccguccugaccuucaaggugcuggaccucaagaacuacaucgacaagcagcugcugcccauccucaacaagcagagcugcuccaucagcaacaucgagaccgugaucgaguuccagcagaagaacaaccgccugcuggagaucacgcgggaguucuccgucaacgcgggcgugaccacccccgugagcaccuacaugcucacgaacagcgagcugcugucccucaucaacgacaugccgaucaccaacgaccagaagaagcugaugagcaacaacguccagaucgugcgccagcaguccuacagcaucaugugcaucaucaaggaggaggugcuggccuacgucgugcagcucccccuguacggggugaucgacacccccugcuggaagcugcacaccagcccccucugcacgaccaacaccaaggagggcagcaacaucugccugacccggacggaccgcgggugguacugcgacaacgccggcuccgucagcuucuucccgcaggccgagaccugcaaggugcaguccaaccgggucuucugcgacaccaugaacagccugacccuccccuccgaggugaaccugugcaacaucgacaucuucaaccccaaguacgacugcaagaucaugacgagcaagaccgacguguccagcuccgucaucaccagccugggcgccaucguguccugcuacgggaagaccaagugcacggcgagcaacaagaaccgcggcaucaucaagaccuucuccaacgggugcgacuacgugagcaacaagggcgucgacaccgugagcgugggcaacacccucuacuacgucaacaagcaggaggggaagucccuguacgugaagggcgagcccaucaucaacuucuacgacccgcugguguuccccagcgacgaguucgacgccuccaucagccaggucaacgagaagaucaaccagucccucgccuucauccggaaguccgacgagcugcugcacaacgugaacguggggaaguccaccacgaacaucaugaucaccaccaucaucaucgucaucaucgugauccugcuccugcugaucgccgugggccucuuccuguacugcaaggcccgcugaggacuaguguccaccugucccuccugggcugcuggauugucucguuuuccugccaaauaaacaggaucagcgcuuuacagaucuaaaaaaaaaaaaaaaaaaaaaaaaaaaaaaaaaaaaaaaaaaaaaaaaaaaaaaaaaaaaaaaaugcaucccccccccccccccccccccccccccccccaaaggcucuuuucagagccaccagaauu

SEQ ID NO: 12884 - RNA, 2111 nt, Artificial Sequence
  mRNA product Design b-1 comprising derived and/or modified sequence from HRSV(Memphis-37)__AIY60640.1__F-del_DSCav1 (opt2)
gggagacggagacggccugcaggaccugcucucucagcccucagccgaggccuacgccgagccgagugcgcagccgacgaccgggaggagccgcagccuucaacucugagguacugugauccgcgcugcccgccgggccgccccaguccgcugcugcggcaccuccuucccucgcgcccucuucgcucgccagcgccuucccugugagccugcgucaccgcggccgccaagcuuaccauggagcuccccauccucaagaccaacgccaucaccaccauccucgccgccgucacccucugcuucgccuccucccagaacaucaccgaggaguucuaccaguccaccugcuccgccgucuccaagggcuaccucuccgcccuccgcaccggcugguacaccuccgucaucaccaucgagcucuccaacaucaaggagaacaagugcaacggcaccgacgccaaggucaagcucaucaagcaggagcucgacaaguacaagaacgccgucaccgagcuccagcuccucaugcaguccacccccgccgccaacaaccgcgcccgccgcgagcucccccgcuucaugaacuacacccucaacaacaccaagaacaacaacgucacccucuccaagaagcgcaagcgccgcuuccucggcuuccuccucggcgucggcuccgccaucgccuccggcaucgccgucugcaagguccuccaccucgagggcgaggucaacaagaucaagaacgcccuccucuccaccaacaaggccgucgucucccucuccaacggcgucuccguccucaccuucaagguccucgaccucaagaacuacaucgacaagcagcuccuccccauccucaacaagcaguccugcuccaucuccaacaucgagaccgucaucgaguuccagcagaagaacaaccgccuccucgagaucacccgcgaguucuccgucaacgccggcgucaccacccccgucuccaccuacaugcucaccaacuccgagcuccucucccucaucaacgacaugcccaucaccaacgaccagaagaagcucauguccaacaacguccagaucguccgccagcaguccuacuccaucaugugcaucaucaaggaggagguccucgccuacgucguccagcucccccucuacggcgucaucgacacccccugcuggaagcuccacaccuccccccucugcaccaccaacaccaaggagggcuccaacaucugccucacccgcaccgaccgcggcugguacugcgacaacgccggcuccgucuccuucuucccccaggccgagaccugcaagguccaguccaaccgcgucuucugcgacaccaugaacucccucacccuccccuccgaggucaaccucugcaacaucgacaucuucaaccccaaguacgacugcaagaucaugaccuccaagaccgacgucuccuccuccgucaucaccucccucggcgccaucgucuccugcuacggcaagaccaagugcaccgccuccaacaagaaccgcggcaucaucaagaccuucuccaacggcugcgacuacgucuccaacaagggcgucgacaccgucuccgucggcaacacccucuacuacgucaacaagcaggagggcaagucccucuacgucaagggcgagcccaucaucaacuucuacgacccccucgucuuccccuccgacgaguucgacgccuccaucucccaggucaacgagaagaucaaccagucccucgccuucauccgcaaguccgacgagcuccuccacaacgucaacgucggcaaguccaccaccaacaucaugaucaccaccaucaucaucgucaucaucgucauccuccuccuccucaucgccgucggccucuuccucuacugcaaggcccgcugaggacuaguguccaccugucccuccugggcugcuggauugucucguuuuccugccaaauaaacaggaucagcgcuuuacagaucuaaaaaaaaaaaaaaaaaaaaaaaaaaaaaaaaaaaaaaaaaaaaaaaaaaaaaaaaaaaaaaaaugcaucccccccccccccccccccccccccccccccaaaggcucuuuucagagccaccagaauu

SEQ ID NO: 12885 - RNA, 2111 nt, Artificial Sequence
  mRNA product Design b-1 comprising derived and/or modified sequence from HRSV(Memphis-37)__AIY60640.1__F-del_DSCav1 (opt3)
gggagacggagacggccugcaggaccugcucucucagcccucagccgaggccuacgccgagccgagugcgcagccgacgaccgggaggagccgcagccuucaacucugagguacugugauccgcgcugcccgccgggccgccccaguccgcugcugcggcaccuccuucccucgcgcccucuucgcucgccagcgccuucccugugagccugcgucaccgcggccgccaagcuuaccauggagcugcccauccucaagaccaacgccauuacaacuauacuugcugcagugacgcugugcuucgccagcucccagaauaucaccgaagaguuuuaccaaucuacauguucagcggucaguaaaggcuauuugagcgcuuuaagaacugggugguacaccuccguuauuacaaucgaacugucuaacauuaaggagaauaaaugcaacggaaccgacgccaaggugaaacuaaucaagcaggaacucgauaaguauaaaaaugcaguaacugagcugcagcuucugaugcagucgaccccugccgcuaacaauagggcacggcgcgaguugccacgauucaugaacuacacacucaauaacacgaagaauaacaaugugacucugagcaaaaagcguaaaagaagguuucuggguuuccucuuaggcgucgggucagccauagcuaguggaaucgccguguguaagguucugcaccuugaaggcgaggugaacaagauuaaaaaugcguugcuguccaccaacaaggcagucgugucucuaagcaacgguguauccguucucacauuuaaagugcuggaccuuaagaauuauaucgauaaacaacuguugccgauucucaacaagcagucaugcaguaucagcaauauagaaacugucauugaguuccagcagaaaaacaaucggcuguuagagaucacccgcgaauuuucugugaacgccggggugacaacccccgucuccacguacaugcugacuaauucagagcuccuuagccugauuaacgacaugccuaucacaaaugaucaaaagaaguugaugaguaacaauguucagaucgugagacagcagucuuauuccauuauguguauaaucaaagaagagguacuagcuuacgugguccaacugccacucuacggagugauugacacccccugcuggaagcugcauacuagcccucuuuguacaaccaacacgaaagaaggcucgaauaucugccugaccaggacagaucggggcugguauugugacaacgccgggucuguuuccuucuuuccacaggcagagacuugcaaggugcagucaaaucgcgucuucugugauaccaugaacaguuugacacuccccagcgaggugaaccugugcaauauagacauuuuuaacccuaaauacgauugcaagaucaugacuuccaagaccgacguaucuagcucaguuaucacaaguuuaggagcuauuguguccuguuaugguaaaaccaagugcacugccagcaauaaaaaccgaggcaucauuaagacguucucuaaugggugugauuacgucucaaacaaaggaguggacacagucagugugggcaauacccuguauuacguuaacaagcaagaagguaagagccuauaugugaaaggggagccaauaaucaauuuuuacgacccgcucguauuccccuccgaugaguucgacgcgucuauuucgcaggucaacgaaaagaucaaucagagccuggccuuuaucagaaaauccgaugaacuuuugcacaacgugaauguuggaaagucaacuaccaacauuaugauaacaaccaucauuaucgugauuaucgucauacugcuccugcuuaucgcagugggccuguucuuguacugcaaagcuaggugaggacuaguguccaccugucccuccugggcugcuggauugucucguuuuccugccaaauaaacaggaucagcgcuuuacagaucuaaaaaaaaaaaaaaaaaaaaaaaaaaaaaaaaaaaaaaaaaaaaaaaaaaaaaaaaaaaaaaaaugcaucccccccccccccccccccccccccccccccaaaggcucuuuucagagccaccagaauu

SEQ ID NO: 12886 - RNA, 2111 nt, Artificial Sequence
  mRNA product Design b-1 comprising derived and/or modified sequence from HRSV(Memphis-37)__AIY60640.1__F-del_DSCav1 (opt4)
gggagacggagacggccugcaggaccugcucucucagcccucagccgaggccuacgccgagccgagugcgcagccgacgaccgggaggagccgcagccuucaacucugagguacugugauccgcgcugcccgccgggccgccccaguccgcugcugcggcaccuccuucccucgcgcccucuucgcucgccagcgccuucccugugagccugcgucaccgcggccgccaagcuuaccauggagcugcccauccugaagaccaacgccaucaccaccauccuggccgccgugacccugugcuucgccagcagccagaacaucaccgaggaguucuaccagagcaccugcagcgccgugagcaagggcuaccugagcgcccugagaaccggcugguacaccagcgugaucaccaucgagcugagcaacaucaaggagaacaagugcaacggcaccgacgccaaggugaagcugaucaagcaggagcuggacaaguacaagaacgccgugaccgagcugcagcugcugaugcagagcacccccgccgccaacaacagagccagaagagagcugcccagauucaugaacuacacccugaacaacaccaagaacaacaacgugacccugagcaagaagagaaagagaagauuccugggcuuccugcugggcgugggcagcgccaucgccagcggcaucgccgugugcaaggugcugcaccuggagggcgaggugaacaagaucaagaacgcccugcugagcaccaacaaggccguggugagccugagcaacggcgugagcgugcugaccuucaaggugcuggaccugaagaacuacaucgacaagcagcugcugcccauccugaacaagcagagcugcagcaucagcaacaucgagaccgugaucgaguuccagcagaagaacaacagacugcuggagaucaccagagaguucagcgugaacgccggcgugaccacccccgugagcaccuacaugcugaccaacagcgagcugcugagccugaucaacgacaugcccaucaccaacgaccagaagaagcugaugagcaacaacgugcagaucgugagacagcagagcuacagcaucaugugcaucaucaaggaggaggugcuggccuacguggugcagcugccccuguacggcgugaucgacacccccugcuggaagcugcacaccagcccccugugcaccaccaacaccaaggagggcagcaacaucugccugaccagaaccgacagaggcugguacugcgacaacgccggcagcgugagcuucuucccccaggccgagaccugcaaggugcagagcaacagaguguucugcgacaccaugaacagccugacccugcccagcgaggugaaccugugcaacaucgacaucuucaaccccaaguacgacugcaagaucaugaccagcaagaccgacgugagcagcagcgugaucaccagccugggcgccaucgugagcugcuacggcaagaccaagugcaccgccagcaacaagaacagaggcaucaucaagaccuucagcaacggcugcgacuacgugagcaacaagggcguggacaccgugagcgugggcaacacccuguacuacgugaacaagcaggagggcaagagccuguacgugaagggcgagcccaucaucaacuucuacgacccccugguguuccccagcgacgaguucgacgccagcaucagccaggugaacgagaagaucaaccagagccuggccuucaucagaaagagcgacgagcugcugcacaacgugaacgugggcaagagcaccaccaacaucaugaucaccaccaucaucaucgugaucaucgugauccugcugcugcugaucgccgugggccuguuccuguacugcaaggccagaugaggacuaguguccaccugucccuccugggcugcuggauugucucguuuuccugccaaauaaacaggaucagcgcuuuacagaucuaaaaaaaaaaaaaaaaaaaaaaaaaaaaaaaaaaaaaaaaaaaaaaaaaaaaaaaaaaaaaaaaugcaucccccccccccccccccccccccccccccccaaaggcucuuuucagagccaccagaauu

SEQ ID NO: 12887 - RNA, 2111 nt, Artificial Sequence
  mRNA product Design b-1 comprising derived and/or modified sequence from HRSV(Memphis-37)__AIY60640.1__F-del_DSCav1 (opt5)
gggagacggagacggccugcaggaccugcucucucagcccucagccgaggccuacgccgagccgagugcgcagccgacgaccgggaggagccgcagccuucaacucugagguacugugauccgcgcugcccgccgggccgccccaguccgcugcugcggcaccuccuucccucgcgcccucuucgcucgccagcgccuucccugugagccugcgucaccgcggccgccaagcuuaccauggagcugcccauccucaagaccaacgccauuacaacgauccuggcugccgugacccuuugcuucgcgagcucccagaauauuacagaagaguuuuaccaaucuaccuguagcgcugucuccaaaggcuaucugucugcccucagaacagggugguacaccagcguuaucacaauugaacuguccaacaucaaggagaauaaaugcaacggaaccgacgccaaggugaaacuuaucaagcaggaacuggauaaguauaaaaaugcugugacggagcuccagcugcugaugcagucuaccccugccgcuaacaaucgggcccgcagagagcucccgcgguucaugaacuacacacugaauaacaccaagaauaacaaugucacacuuagcaaaaagcgcaaaagacgguuucugggcuuccuccugggggugggauccgcgauugccagcggcaucgcuguuuguaaggugcuucaccuggaaggggaggucaacaagauuaaaaaugcccuccugucuaccaacaaggcugugguuucccugagcaacggagugucuguccucacguuuaaagugcuggaccuuaagaauuauaucgauaaacaacugcuccccauucugaacaagcaguccugcagcaucucuaauauugaaacagugaucgaguuccagcagaaaaacaaucgccuucuggagaucaccagagaauuuuccgucaacgccggcguuacaaccccugugagcaccuacaugcucacaaauuccgagcugcugucucucauuaacgacaugcccaucacgaaugaucaaaagaagcugaugagcaacaaugugcagauuguccggcagcaguccuauagcaucauguguauuaucaaagaagaggugcuugcguacguugugcaacugccucucuacggcgucaucgacacccccugcuggaagcugcauacaucuccucuuuguaccacaaacaccaaagaaggguccaauauuugccugacgcgcacagauagaggaugguauugugacaacgccggcagcgugucuuucuuuccgcaggcugagaccugcaagguucagagcaaucggguguucugugauaccaugaacucccucacacugcccucugaggucaaccugugcaauaucgacauuuuuaacccuaaauacgauugcaagaucaugaccagcaagacagacguguccagcucugucauuacgucccucggggccaucgugagcuguuauggaaaaaccaagugcacagcuucuaauaaaaaccgcggcaucauuaagaccuucuccaaugggugugauuacguuagcaacaaaggaguggacacagucuccgugggcaauacccuguauuacguuaacaagcaagaaggcaagucucuuuaugugaaaggggagcccaucauuaauuuuuacgacccucuggucuuccccagcgaugaguucgacgccuccaucucucaggugaacgaaaagauuaaucagagccucgccuuuaucagaaaauccgaugaacugcugcacaacgugaauguuggaaagagcacgaccaacauuaugaucacaaccaucauuaucgucauuaucgugauucuucuccugcugaucgcugugggccucuuccuguacugcaaagcgcggugaggacuaguguccaccugucccuccugggcugcuggauugucucguuuuccugccaaauaaacaggaucagcgcuuuacagaucuaaaaaaaaaaaaaaaaaaaaaaaaaaaaaaaaaaaaaaaaaaaaaaaaaaaaaaaaaaaaaaaaugcaucccccccccccccccccccccccccccccccaaaggcucuuuucagagccaccagaauu

SEQ ID NO: 12888 - RNA, 2111 nt, Artificial Sequence
  mRNA product Design b-1 comprising derived and/or modified sequence from HRSV(Memphis-37)__AIY60640.1__F-del_DSCav1 (opt6)
gggagacggagacggccugcaggaccugcucucucagcccucagccgaggccuacgccgagccgagugcgcagccgacgaccgggaggagccgcagccuucaacucugagguacugugauccgcgcugcccgccgggccgccccaguccgcugcugcggcaccuccuucccucgcgcccucuucgcucgccagcgccuucccugugagccugcgucaccgcggccgccaagcuuaccauggaauuaccaauccuuaaaacaaacgcaauaacaaccauccucgcagcaguaacucucugcuucgcuucaucucaaaacaucacagaagaauuuuaccaaagcacaugcucagcuguauccaaagguuaucuaucagccuugagaaccggaugguacacaucaguaauaacaauugaacuaucaaacauuaaagaaaacaaaugcaacggcaccgacgcaaaaguaaaacuaaucaaacaagaacuagacaaauauaaaaaugcaguaacagaauuacaauuauuaaugcaauccacaccagcugcaaacaaccgagcccgaagagaacuaccaagauucaugaacuacacacuaaacaacaccaaaaauaacaacgucacccuaucuaaaaaacguaaaagaagauucuuaggauuccucuuaggagucggauccgcaauagcaagcggcauagccguauguaaaguccuacacuuagaaggugaagugaauaaaauaaaaaacgcccuauuaagcacuaacaaagcaguagucucccuaucaaacggaguuucaguacucacauucaaaguacucgaccucaaaaacuacaucgacaaacaacuuuuaccaauucuaaacaaacaaucaugcuccauaucuaauaucgaaaccgucaucgaauuucaacaaaaaaacaauagacuacuagaaauaacuagagaauuuucaguaaacgccggcguuacgacaccagucucuacauacauguuaaccaauucagaacucuuaucauuaaucaacgacaugccaauaacaaacgaccaaaaaaaacuaauguccaauaacguacaaauagucagacaacaaucauacucaauuaugugcauaauaaaagaagaaguacuagcuuacguaguacaacucccccuauacggcguaauagacacuccauguuggaaauuacacacaucaccauuauguaccaccaauacaaaagaaggcucaaacauaugccuaacaagaacagauagaggaugguauugcgacaacgcaggcucaguuuccuuuuucccccaagcagaaaccugcaaaguacaaucaaaucguguuuuuugcgacaccaugaacucacucacauuaccaucagaaguaaaccuaugcaacauagacauauucaacccaaaauacgacugcaaaaucaugacaucaaaaacagacguauccucuucaguaauuacuagcuuaggagcaauagucucuuguuauggaaaaacaaaaugcacagccaguaacaaaaaccgcggaauaauaaaaaccuucucaaacgguugcgauuacgucucuaacaaaggagucgacacaguaucaguaggcaauacauuauacuacguuaacaaacaagaaggaaaaucuuuauacgucaaaggagaacccauuauaaacuuuuacgacccauuagucuucccuuccgacgaauuugacgccagcauuucacaaguaaacgaaaaaauaaaccaaucacucgcauuuauaagaaaaucugacgaauuacuccacaacguaaacguaggaaaauccacaacaaacauaaugauaacaaccauaaucaucgucauaauagucauacuucuccuauuaauugcaguaggcuuauuccuauacuguaaagcacgauaaggacuaguguccaccugucccuccugggcugcuggauugucucguuuuccugccaaauaaacaggaucagcgcuuuacagaucuaaaaaaaaaaaaaaaaaaaaaaaaaaaaaaaaaaaaaaaaaaaaaaaaaaaaaaaaaaaaaaaaugcaucccccccccccccccccccccccccccccccaaaggcucuuuucagagccaccagaauu

SEQ ID NO: 12889 - RNA, 2111 nt, Artificial Sequence
  mRNA product Design b-1 comprising derived and/or modified sequence from HRSV(Memphis-37)__AIY60640.1__F-del_DSCav1 (opt11)
gggagacggagacggccugcaggaccugcucucucagcccucagccgaggccuacgccgagccgagugcgcagccgacgaccgggaggagccgcagccuucaacucugagguacugugauccgcgcugcccgccgggccgccccaguccgcugcugcggcaccuccuucccucgcgcccucuucgcucgccagcgccuucccugugagccugcgucaccgcggccgccaagcuuaccauggaacuaccaauccuaaaaacuaacgcaaucaccacaauccucgccgccgucacccuuugcuuugcguccucccaaaacauuacugaagaguucuaccaauccacgugcuccgccgucuccaaagguuaccuauccgcccuuaggaccggcugguacaccagcgucaucaccaucgaacuuuccaacaucaaagaaaacaaauguaacggcaccgacgcaaaagucaaacuuauuaaacaggaacucgacaaauauaagaaugccgucaccgaauuacaacuccucaugcaauccacccccgccgccaacaaccgagcaaggcgcgaacucccucgauucaugaauuacacccucaacaauaccaaaaacaacaacgucacccuauccaagaaacgcaaaagacgcuucuugggcuuccuccucggcgugggcuccgcaauagccuccgguauugccgugugcaaagucuuacaccucgaaggcgaggucaacaaaaucaaaaacgcccuccucuccaccaacaaagccgucgucagccuauccaacggcguuuccguccucaccuucaaaguacucgaccucaaaaacuacaucgacaaacaacuccuacccauacuaaacaaacaauccugcuccauuuccaacaucgaaaccguaaucgaguuccaacagaaaaacaaucgccuccuagaaaucacacgugaauuuucaguuaacgccggaguaacaacuccuguaucuaccuacaugcucaccaauuccgaacuccucagccucauaaacgacaugccaauaacaaacgaccaaaagaaacucaugucuaacaacguacaaaucgucagacaacaaaguuacucaaucauguguaucaucaaagaggaaguccuagcauacgugguccaacucccccucuacggaguaaucgacaccccaugcuggaaacuacacaccagcccccucuguaccacaaacacgaaagaagguuccaacaucugccugacccgaaccgaccgcggcugguacugcgauaacgcuggcuccgucucauucuucccccaagcagaaaccugcaaaguacaauccaaccgaguauucugcgacaccaugaacucacucacccuccccagcgaaguaaaccucugcaacaucgacauauucaacccaaaauacgacugcaaaauuaugaccucuaaaacagacguauccuccucuguaaucacaucccucggggccaucgucuccugcuacggcaaaaccaaaugcaccgccuccaacaaaaaccgcggaaucauaaaaaccuucuccaacggaugcgacuacgucucaaauaaaggcgucgacaccgucuccgucggcaacacgcuauacuacgucaacaaacaagaaggcaaaucacucuacgucaaaggugagcccaucaucaauuucuacgauccccucgucuucccaagcgacgaguucgacgccagcauaucccaaguaaacgagaaaaucaaccaaagccuggccuucauccgcaaauccgacgaacuacuacacaacguaaacguaggcaaguccacuaccaacauaaugaucaccacaaucaucauagucauaaucguuauacuacuccugcucaucgccguaggccucuuccucuauugcaaagcccgauagggacuaguguccaccugucccuccugggcugcuggauugucucguuuuccugccaaauaaacaggaucagcgcuuuacagaucuaaaaaaaaaaaaaaaaaaaaaaaaaaaaaaaaaaaaaaaaaaaaaaaaaaaaaaaaaaaaaaaaugcaucccccccccccccccccccccccccccccccaaaggcucuuuucagagccaccagaauu

SEQ ID NO: 12890 - RNA, 1931 nt, Artificial Sequence
  mRNA product Design b-2 comprising derived and/or modified sequence from HRSV(Memphis-37)__AIY60640.1__F-del_DSCav1 (opt1)
gggagagccucugcuggaguccggggaguggcguuggcugcuagagcgaagcuuaccauggagcugcccauccucaagaccaacgccaucaccacgauccuggccgcggugacccugugcuucgccagcucccagaacaucaccgaggaguucuaccagagcacgugcuccgccgucagcaagggcuaccucuccgcccugcgcaccgggugguacaccagcgugaucaccaucgagcuguccaacaucaaggagaacaagugcaacggcaccgacgccaaggugaagcucaucaagcaggagcuggacaaguacaagaacgcggucacggagcugcagcuccugaugcagagcaccccggccgccaacaaccgggcccgccgggagcugccccgcuucaugaacuacacccucaacaacaccaagaacaacaacgugacgcuguccaagaagcggaagcgccgguuccugggguuccuccugggcguggggagcgcgaucgccuccggcaucgccgucugcaaggugcugcaccucgagggcgaggugaacaagaucaagaacgcccugcuguccaccaacaaggccgucgugagccucuccaacggggugagcguccugaccuucaaggugcuggaccucaagaacuacaucgacaagcagcugcugcccauccugaacaagcagagcugcuccaucagcaacaucgagaccgucaucgaguuccagcagaagaacaaccgccuccuggagaucacgcgggaguucagcgugaacgcgggcgugaccacccccgucuccaccuacaugcugacgaacagcgagcuccugucccugaucaacgacaugccgaucaccaacgaccagaagaagcucaugagcaacaacgugcagaucgugcgccagcaguccuacagcaucaugugcaucaucaaggaggagguccuggccuacguggugcagcugccccucuacggggucaucgacacccccugcuggaagcugcacaccagcccccugugcacgaccaacaccaaggagggcuccaacaucugccucacccggacggaccgcgggugguacugcgacaacgccggcagcguguccuucuucccgcaggccgagaccugcaagguccagagcaaccggguguucugcgacaccaugaacucccugacccugcccagcgaggugaaccucugcaacaucgacaucuucaaccccaaguacgacugcaagaucaugacguccaagaccgacgucagcuccagcgugaucaccucccugggcgccaucgugagcugcuacgggaagaccaagugcacggcgagcaacaagaaccgcggcaucaucaagaccuucuccaacgggugcgacuacgucagcaacaagggcguggacaccguguccgucggcaacacccuguacuacgugaacaagcaggagggcaagagccucuacgugaagggggagcccaucaucaacuucuacgacccgcuggucuuccccuccgacgaguucgacgccagcaucucccaggugaacgagaagaucaaccagagccuggccuucauccggaaguccgacgagcuccugcacaacgugaacgucggcaagagcaccacgaacaucaugaucaccaccaucaucaucgugaucaucgugauccugcugcuccugaucgccgucgggcuguuccucuacugcaaggcccgcugaggacuaguguccaccugucccuccugggcugcuggauugucucguuuuccugccaaauaaacaggaucagcgcuuuacagaucuaaaaaaaaaaaaaaaaaaaaaaaaaaaaaaaaaaaaaaaaaaaaaaaaaaaaaaaaaaaaaaaaugcaucccccccccccccccccccccccccccccccaaaggcucuuuucagagccaccagaauu

SEQ ID NO: 12891 - RNA, 1931 nt, Artificial Sequence
  mRNA product Design b-2 comprising derived and/or modified sequence from HRSV(Memphis-37)__AIY60640.1__F-del_DSCav1 (opt1)
gggagagccucugcuggaguccggggaguggcguuggcugcuagagcgaagcuuaccauggagcugcccauccucaagaccaacgccaucaccacgauccuggccgcggugacccugugcuucgccagcucccagaacaucaccgaggaguucuaccagagcacgugcuccgccgucagcaagggcuaccucuccgcccugcgcaccgggugguacaccagcgugaucaccaucgagcuguccaacaucaaggagaacaagugcaacggcaccgacgccaaggugaagcucaucaagcaggagcuggacaaguacaagaacgcggucacggagcugcagcuccugaugcagagcaccccggccgccaacaaccgggcccgccgggagcugccccgcuucaugaacuacacccucaacaacaccaagaacaacaacgugacgcuguccaagaagcggaagcgccgguuccugggguuccuccugggcguggggagcgcgaucgccuccggcaucgccgucugcaaggugcugcaccucgagggcgaggugaacaagaucaagaacgcccugcugagcaccaacaaggccgucgugucccucagcaacgggguguccguccugaccuucaaggugcuggaccucaagaacuacaucgacaagcagcugcugcccauccucaacaagcagagcugcuccaucagcaacaucgagaccgugaucgaguuccagcagaagaacaaccgccugcuggagaucacgcgggaguucuccgucaacgcgggcgugaccacccccgugagcaccuacaugcucacgaacagcgagcugcugucccucaucaacgacaugccgaucaccaacgaccagaagaagcugaugagcaacaacguccagaucgugcgccagcaguccuacagcaucaugugcaucaucaaggaggaggugcuggccuacgucgugcagcucccccuguacggggugaucgacacccccugcuggaagcugcacaccagcccccucugcacgaccaacaccaaggagggcagcaacaucugccugacccggacggaccgcgggugguacugcgacaacgccggcuccgucagcuucuucccgcaggccgagaccugcaaggugcaguccaaccgggucuucugcgacaccaugaacagccugacccuccccuccgaggugaaccugugcaacaucgacaucuucaaccccaaguacgacugcaagaucaugacgagcaagaccgacguguccagcuccgucaucaccagccugggcgccaucguguccugcuacgggaagaccaagugcacggcgagcaacaagaaccgcggcaucaucaagaccuucuccaacgggugcgacuacgugagcaacaagggcgucgacaccgugagcgugggcaacacccucuacuacgucaacaagcaggaggggaagucccuguacgugaagggcgagcccaucaucaacuucuacgacccgcugguguuccccagcgacgaguucgacgccuccaucagccaggucaacgagaagaucaaccagucccucgccuucauccggaaguccgacgagcugcugcacaacgugaacguggggaaguccaccacgaacaucaugaucaccaccaucaucaucgucaucaucgugauccugcuccugcugaucgccgugggccucuuccuguacugcaaggcccgcugaggacuaguguccaccugucccuccugggcugcuggauugucucguuuuccugccaaauaaacaggaucagcgcuuuacagaucuaaaaaaaaaaaaaaaaaaaaaaaaaaaaaaaaaaaaaaaaaaaaaaaaaaaaaaaaaaaaaaaaugcaucccccccccccccccccccccccccccccccaaaggcucuuuucagagccaccagaauu

SEQ ID NO: 12892 - RNA, 1931 nt, Artificial Sequence
  mRNA product Design b-2 comprising derived and/or modified sequence from HRSV(Memphis-37)__AIY60640.1__F-del_DSCav1 (opt2)
gggagagccucugcuggaguccggggaguggcguuggcugcuagagcgaagcuuaccauggagcuccccauccucaagaccaacgccaucaccaccauccucgccgccgucacccucugcuucgccuccucccagaacaucaccgaggaguucuaccaguccaccugcuccgccgucuccaagggcuaccucuccgcccuccgcaccggcugguacaccuccgucaucaccaucgagcucuccaacaucaaggagaacaagugcaacggcaccgacgccaaggucaagcucaucaagcaggagcucgacaaguacaagaacgccgucaccgagcuccagcuccucaugcaguccacccccgccgccaacaaccgcgcccgccgcgagcucccccgcuucaugaacuacacccucaacaacaccaagaacaacaacgucacccucuccaagaagcgcaagcgccgcuuccucggcuuccuccucggcgucggcuccgccaucgccuccggcaucgccgucugcaagguccuccaccucgagggcgaggucaacaagaucaagaacgcccuccucuccaccaacaaggccgucgucucccucuccaacggcgucuccguccucaccuucaagguccucgaccucaagaacuacaucgacaagcagcuccuccccauccucaacaagcaguccugcuccaucuccaacaucgagaccgucaucgaguuccagcagaagaacaaccgccuccucgagaucacccgcgaguucuccgucaacgccggcgucaccacccccgucuccaccuacaugcucaccaacuccgagcuccucucccucaucaacgacaugcccaucaccaacgaccagaagaagcucauguccaacaacguccagaucguccgccagcaguccuacuccaucaugugcaucaucaaggaggagguccucgccuacgucguccagcucccccucuacggcgucaucgacacccccugcuggaagcuccacaccuccccccucugcaccaccaacaccaaggagggcuccaacaucugccucacccgcaccgaccgcggcugguacugcgacaacgccggcuccgucuccuucuucccccaggccgagaccugcaagguccaguccaaccgcgucuucugcgacaccaugaacucccucacccuccccuccgaggucaaccucugcaacaucgacaucuucaaccccaaguacgacugcaagaucaugaccuccaagaccgacgucuccuccuccgucaucaccucccucggcgccaucgucuccugcuacggcaagaccaagugcaccgccuccaacaagaaccgcggcaucaucaagaccuucuccaacggcugcgacuacgucuccaacaagggcgucgacaccgucuccgucggcaacacccucuacuacgucaacaagcaggagggcaagucccucuacgucaagggcgagcccaucaucaacuucuacgacccccucgucuuccccuccgacgaguucgacgccuccaucucccaggucaacgagaagaucaaccagucccucgccuucauccgcaaguccgacgagcuccuccacaacgucaacgucggcaaguccaccaccaacaucaugaucaccaccaucaucaucgucaucaucgucauccuccuccuccucaucgccgucggccucuuccucuacugcaaggcccgcugaggacuaguguccaccugucccuccugggcugcuggauugucucguuuuccugccaaauaaacaggaucagcgcuuuacagaucuaaaaaaaaaaaaaaaaaaaaaaaaaaaaaaaaaaaaaaaaaaaaaaaaaaaaaaaaaaaaaaaaugcaucccccccccccccccccccccccccccccccaaaggcucuuuucagagccaccagaauu

SEQ ID NO: 12893 - RNA, 1931 nt, Artificial Sequence
  mRNA product Design b-2 comprising derived and/or modified sequence from HRSV(Memphis-37)__AIY60640.1__F-del_DSCav1 (opt3)
gggagagccucugcuggaguccggggaguggcguuggcugcuagagcgaagcuuaccauggagcugcccauccucaagaccaacgccauuacaacuauacuugcugcagugacgcugugcuucgccagcucccagaauaucaccgaagaguuuuaccaaucuacauguucagcggucaguaaaggcuauuugagcgcuuuaagaacugggugguacaccuccguuauuacaaucgaacugucuaacauuaaggagaauaaaugcaacggaaccgacgccaaggugaaacuaaucaagcaggaacucgauaaguauaaaaaugcaguaacugagcugcagcuucugaugcagucgaccccugccgcuaacaauagggcacggcgcgaguugccacgauucaugaacuacacacucaauaacacgaagaauaacaaugugacucugagcaaaaagcguaaaagaagguuucuggguuuccucuuaggcgucgggucagccauagcuaguggaaucgccguguguaagguucugcaccuugaaggcgaggugaacaagauuaaaaaugcguugcuguccaccaacaaggcagucgugucucuaagcaacgguguauccguucucacauuuaaagugcuggaccuuaagaauuauaucgauaaacaacuguugccgauucucaacaagcagucaugcaguaucagcaauauagaaacugucauugaguuccagcagaaaaacaaucggcuguuagagaucacccgcgaauuuucugugaacgccggggugacaacccccgucuccacguacaugcugacuaauucagagcuccuuagccugauuaacgacaugccuaucacaaaugaucaaaagaaguugaugaguaacaauguucagaucgugagacagcagucuuauuccauuauguguauaaucaaagaagagguacuagcuuacgugguccaacugccacucuacggagugauugacacccccugcuggaagcugcauacuagcccucuuuguacaaccaacacgaaagaaggcucgaauaucugccugaccaggacagaucggggcugguauugugacaacgccgggucuguuuccuucuuuccacaggcagagacuugcaaggugcagucaaaucgcgucuucugugauaccaugaacaguuugacacuccccagcgaggugaaccugugcaauauagacauuuuuaacccuaaauacgauugcaagaucaugacuuccaagaccgacguaucuagcucaguuaucacaaguuuaggagcuauuguguccuguuaugguaaaaccaagugcacugccagcaauaaaaaccgaggcaucauuaagacguucucuaaugggugugauuacgucucaaacaaaggaguggacacagucagugugggcaauacccuguauuacguuaacaagcaagaagguaagagccuauaugugaaaggggagccaauaaucaauuuuuacgacccgcucguauuccccuccgaugaguucgacgcgucuauuucgcaggucaacgaaaagaucaaucagagccuggccuuuaucagaaaauccgaugaacuuuugcacaacgugaauguuggaaagucaacuaccaacauuaugauaacaaccaucauuaucgugauuaucgucauacugcuccugcuuaucgcagugggccuguucuuguacugcaaagcuaggugaggacuaguguccaccugucccuccugggcugcuggauugucucguuuuccugccaaauaaacaggaucagcgcuuuacagaucuaaaaaaaaaaaaaaaaaaaaaaaaaaaaaaaaaaaaaaaaaaaaaaaaaaaaaaaaaaaaaaaaugcaucccccccccccccccccccccccccccccccaaaggcucuuuucagagccaccagaauu

SEQ ID NO: 12894 - RNA, 1931 nt, Artificial Sequence
  mRNA product Design b-2 comprising derived and/or modified sequence from HRSV(Memphis-37)__AIY60640.1__F-del_DSCav1 (opt4)
gggagagccucugcuggaguccggggaguggcguuggcugcuagagcgaagcuuaccauggagcugcccauccugaagaccaacgccaucaccaccauccuggccgccgugacccugugcuucgccagcagccagaacaucaccgaggaguucuaccagagcaccugcagcgccgugagcaagggcuaccugagcgcccugagaaccggcugguacaccagcgugaucaccaucgagcugagcaacaucaaggagaacaagugcaacggcaccgacgccaaggugaagcugaucaagcaggagcuggacaaguacaagaacgccgugaccgagcugcagcugcugaugcagagcacccccgccgccaacaacagagccagaagagagcugcccagauucaugaacuacacccugaacaacaccaagaacaacaacgugacccugagcaagaagagaaagagaagauuccugggcuuccugcugggcgugggcagcgccaucgccagcggcaucgccgugugcaaggugcugcaccuggagggcgaggugaacaagaucaagaacgcccugcugagcaccaacaaggccguggugagccugagcaacggcgugagcgugcugaccuucaaggugcuggaccugaagaacuacaucgacaagcagcugcugcccauccugaacaagcagagcugcagcaucagcaacaucgagaccgugaucgaguuccagcagaagaacaacagacugcuggagaucaccagagaguucagcgugaacgccggcgugaccacccccgugagcaccuacaugcugaccaacagcgagcugcugagccugaucaacgacaugcccaucaccaacgaccagaagaagcugaugagcaacaacgugcagaucgugagacagcagagcuacagcaucaugugcaucaucaaggaggaggugcuggccuacguggugcagcugccccuguacggcgugaucgacacccccugcuggaagcugcacaccagcccccugugcaccaccaacaccaaggagggcagcaacaucugccugaccagaaccgacagaggcugguacugcgacaacgccggcagcgugagcuucuucccccaggccgagaccugcaaggugcagagcaacagaguguucugcgacaccaugaacagccugacccugcccagcgaggugaaccugugcaacaucgacaucuucaaccccaaguacgacugcaagaucaugaccagcaagaccgacgugagcagcagcgugaucaccagccugggcgccaucgugagcugcuacggcaagaccaagugcaccgccagcaacaagaacagaggcaucaucaagaccuucagcaacggcugcgacuacgugagcaacaagggcguggacaccgugagcgugggcaacacccuguacuacgugaacaagcaggagggcaagagccuguacgugaagggcgagcccaucaucaacuucuacgacccccugguguuccccagcgacgaguucgacgccagcaucagccaggugaacgagaagaucaaccagagccuggccuucaucagaaagagcgacgagcugcugcacaacgugaacgugggcaagagcaccaccaacaucaugaucaccaccaucaucaucgugaucaucgugauccugcugcugcugaucgccgugggccuguuccuguacugcaaggccagaugaggacuaguguccaccugucccuccugggcugcuggauugucucguuuuccugccaaauaaacaggaucagcgcuuuacagaucuaaaaaaaaaaaaaaaaaaaaaaaaaaaaaaaaaaaaaaaaaaaaaaaaaaaaaaaaaaaaaaaaugcaucccccccccccccccccccccccccccccccaaaggcucuuuucagagccaccagaauu

SEQ ID NO: 12895 - RNA, 1931 nt, Artificial Sequence
  mRNA product Design b-2 comprising derived and/or modified sequence from HRSV(Memphis-37)__AIY60640.1__F-del_DSCav1 (opt5)
gggagagccucugcuggaguccggggaguggcguuggcugcuagagcgaagcuuaccauggagcugcccauccucaagaccaacgccauuacaacgauccuggcugccgugacccuuugcuucgcgagcucccagaauauuacagaagaguuuuaccaaucuaccuguagcgcugucuccaaaggcuaucugucugcccucagaacagggugguacaccagcguuaucacaauugaacuguccaacaucaaggagaauaaaugcaacggaaccgacgccaaggugaaacuuaucaagcaggaacuggauaaguauaaaaaugcugugacggagcuccagcugcugaugcagucuaccccugccgcuaacaaucgggcccgcagagagcucccgcgguucaugaacuacacacugaauaacaccaagaauaacaaugucacacuuagcaaaaagcgcaaaagacgguuucugggcuuccuccugggggugggauccgcgauugccagcggcaucgcuguuuguaaggugcuucaccuggaaggggaggucaacaagauuaaaaaugcccuccugucuaccaacaaggcugugguuucccugagcaacggagugucuguccucacguuuaaagugcuggaccuuaagaauuauaucgauaaacaacugcuccccauucugaacaagcaguccugcagcaucucuaauauugaaacagugaucgaguuccagcagaaaaacaaucgccuucuggagaucaccagagaauuuuccgucaacgccggcguuacaaccccugugagcaccuacaugcucacaaauuccgagcugcugucucucauuaacgacaugcccaucacgaaugaucaaaagaagcugaugagcaacaaugugcagauuguccggcagcaguccuauagcaucauguguauuaucaaagaagaggugcuugcguacguugugcaacugccucucuacggcgucaucgacacccccugcuggaagcugcauacaucuccucuuuguaccacaaacaccaaagaaggguccaauauuugccugacgcgcacagauagaggaugguauugugacaacgccggcagcgugucuuucuuuccgcaggcugagaccugcaagguucagagcaaucggguguucugugauaccaugaacucccucacacugcccucugaggucaaccugugcaauaucgacauuuuuaacccuaaauacgauugcaagaucaugaccagcaagacagacguguccagcucugucauuacgucccucggggccaucgugagcuguuauggaaaaaccaagugcacagcuucuaauaaaaaccgcggcaucauuaagaccuucuccaaugggugugauuacguuagcaacaaaggaguggacacagucuccgugggcaauacccuguauuacguuaacaagcaagaaggcaagucucuuuaugugaaaggggagcccaucauuaauuuuuacgacccucuggucuuccccagcgaugaguucgacgccuccaucucucaggugaacgaaaagauuaaucagagccucgccuuuaucagaaaauccgaugaacugcugcacaacgugaauguuggaaagagcacgaccaacauuaugaucacaaccaucauuaucgucauuaucgugauucuucuccugcugaucgcugugggccucuuccuguacugcaaagcgcggugaggacuaguguccaccugucccuccugggcugcuggauugucucguuuuccugccaaauaaacaggaucagcgcuuuacagaucuaaaaaaaaaaaaaaaaaaaaaaaaaaaaaaaaaaaaaaaaaaaaaaaaaaaaaaaaaaaaaaaaugcaucccccccccccccccccccccccccccccccaaaggcucuuuucagagccaccagaauu

SEQ ID NO: 12896 - RNA, 1931 nt, Artificial Sequence
  mRNA product Design b-2 comprising derived and/or modified sequence from HRSV(Memphis-37)__AIY60640.1__F-del_DSCav1 (opt6)
gggagagccucugcuggaguccggggaguggcguuggcugcuagagcgaagcuuaccauggaauuaccaauccuuaaaacaaacgcaauaacaaccauccucgcagcaguaacucucugcuucgcuucaucucaaaacaucacagaagaauuuuaccaaagcacaugcucagcuguauccaaagguuaucuaucagccuugagaaccggaugguacacaucaguaauaacaauugaacuaucaaacauuaaagaaaacaaaugcaacggcaccgacgcaaaaguaaaacuaaucaaacaagaacuagacaaauauaaaaaugcaguaacagaauuacaauuauuaaugcaauccacaccagcugcaaacaaccgagcccgaagagaacuaccaagauucaugaacuacacacuaaacaacaccaaaaauaacaacgucacccuaucuaaaaaacguaaaagaagauucuuaggauuccucuuaggagucggauccgcaauagcaagcggcauagccguauguaaaguccuacacuuagaaggugaagugaauaaaauaaaaaacgcccuauuaagcacuaacaaagcaguagucucccuaucaaacggaguuucaguacucacauucaaaguacucgaccucaaaaacuacaucgacaaacaacuuuuaccaauucuaaacaaacaaucaugcuccauaucuaauaucgaaaccgucaucgaauuucaacaaaaaaacaauagacuacuagaaauaacuagagaauuuucaguaaacgccggcguuacgacaccagucucuacauacauguuaaccaauucagaacucuuaucauuaaucaacgacaugccaauaacaaacgaccaaaaaaaacuaauguccaauaacguacaaauagucagacaacaaucauacucaauuaugugcauaauaaaagaagaaguacuagcuuacguaguacaacucccccuauacggcguaauagacacuccauguuggaaauuacacacaucaccauuauguaccaccaauacaaaagaaggcucaaacauaugccuaacaagaacagauagaggaugguauugcgacaacgcaggcucaguuuccuuuuucccccaagcagaaaccugcaaaguacaaucaaaucguguuuuuugcgacaccaugaacucacucacauuaccaucagaaguaaaccuaugcaacauagacauauucaacccaaaauacgacugcaaaaucaugacaucaaaaacagacguauccucuucaguaauuacuagcuuaggagcaauagucucuuguuauggaaaaacaaaaugcacagccaguaacaaaaaccgcggaauaauaaaaaccuucucaaacgguugcgauuacgucucuaacaaaggagucgacacaguaucaguaggcaauacauuauacuacguuaacaaacaagaaggaaaaucuuuauacgucaaaggagaacccauuauaaacuuuuacgacccauuagucuucccuuccgacgaauuugacgccagcauuucacaaguaaacgaaaaaauaaaccaaucacucgcauuuauaagaaaaucugacgaauuacuccacaacguaaacguaggaaaauccacaacaaacauaaugauaacaaccauaaucaucgucauaauagucauacuucuccuauuaauugcaguaggcuuauuccuauacuguaaagcacgauaaggacuaguguccaccugucccuccugggcugcuggauugucucguuuuccugccaaauaaacaggaucagcgcuuuacagaucuaaaaaaaaaaaaaaaaaaaaaaaaaaaaaaaaaaaaaaaaaaaaaaaaaaaaaaaaaaaaaaaaugcaucccccccccccccccccccccccccccccccaaaggcucuuuucagagccaccagaauu

SEQ ID NO: 12897 - RNA, 1931 nt, Artificial Sequence
  mRNA product Design b-2 comprising derived and/or modified sequence from HRSV(Memphis-37)__AIY60640.1__F-del_DSCav1 (opt11)
gggagagccucugcuggaguccggggaguggcguuggcugcuagagcgaagcuuaccauggaacuaccaauccuaaaaacuaacgcaaucaccacaauccucgccgccgucacccuuugcuuugcguccucccaaaacauuacugaagaguucuaccaauccacgugcuccgccgucuccaaagguuaccuauccgcccuuaggaccggcugguacaccagcgucaucaccaucgaacuuuccaacaucaaagaaaacaaauguaacggcaccgacgcaaaagucaaacuuauuaaacaggaacucgacaaauauaagaaugccgucaccgaauuacaacuccucaugcaauccacccccgccgccaacaaccgagcaaggcgcgaacucccucgauucaugaauuacacccucaacaauaccaaaaacaacaacgucacccuauccaagaaacgcaaaagacgcuucuugggcuuccuccucggcgugggcuccgcaauagccuccgguauugccgugugcaaagucuuacaccucgaaggcgaggucaacaaaaucaaaaacgcccuccucuccaccaacaaagccgucgucagccuauccaacggcguuuccguccucaccuucaaaguacucgaccucaaaaacuacaucgacaaacaacuccuacccauacuaaacaaacaauccugcuccauuuccaacaucgaaaccguaaucgaguuccaacagaaaaacaaucgccuccuagaaaucacacgugaauuuucaguuaacgccggaguaacaacuccuguaucuaccuacaugcucaccaauuccgaacuccucagccucauaaacgacaugccaauaacaaacgaccaaaagaaacucaugucuaacaacguacaaaucgucagacaacaaaguuacucaaucauguguaucaucaaagaggaaguccuagcauacgugguccaacucccccucuacggaguaaucgacaccccaugcuggaaacuacacaccagcccccucuguaccacaaacacgaaagaagguuccaacaucugccugacccgaaccgaccgcggcugguacugcgauaacgcuggcuccgucucauucuucccccaagcagaaaccugcaaaguacaauccaaccgaguauucugcgacaccaugaacucacucacccuccccagcgaaguaaaccucugcaacaucgacauauucaacccaaaauacgacugcaaaauuaugaccucuaaaacagacguauccuccucuguaaucacaucccucggggccaucgucuccugcuacggcaaaaccaaaugcaccgccuccaacaaaaaccgcggaaucauaaaaaccuucuccaacggaugcgacuacgucucaaauaaaggcgucgacaccgucuccgucggcaacacgcuauacuacgucaacaaacaagaaggcaaaucacucuacgucaaaggugagcccaucaucaauuucuacgauccccucgucuucccaagcgacgaguucgacgccagcauaucccaaguaaacgagaaaaucaaccaaagccuggccuucauccgcaaauccgacgaacuacuacacaacguaaacguaggcaaguccacuaccaacauaaugaucaccacaaucaucauagucauaaucguuauacuacuccugcucaucgccguaggccucuuccucuauugcaaagcccgauagggacuaguguccaccugucccuccugggcugcuggauugucucguuuuccugccaaauaaacaggaucagcgcuuuacagaucuaaaaaaaaaaaaaaaaaaaaaaaaaaaaaaaaaaaaaaaaaaaaaaaaaaaaaaaaaaaaaaaaugcaucccccccccccccccccccccccccccccccaaaggcucuuuucagagccaccagaauu

SEQ ID NO: 12898 - RNA, 1951 nt, Artificial Sequence
  mRNA product Design b-3 comprising derived and/or modified sequence from HRSV(Memphis-37)__AIY60640.1__F-del_DSCav1 (opt1)
gggagagucccgcagucggcguccagcggcucugcuuguucgugugugugucguugcaggccuuauucaagcuuaccauggagcugcccauccucaagaccaacgccaucaccacgauccuggccgcggugacccugugcuucgccagcucccagaacaucaccgaggaguucuaccagagcacgugcuccgccgucagcaagggcuaccucuccgcccugcgcaccgggugguacaccagcgugaucaccaucgagcuguccaacaucaaggagaacaagugcaacggcaccgacgccaaggugaagcucaucaagcaggagcuggacaaguacaagaacgcggucacggagcugcagcuccugaugcagagcaccccggccgccaacaaccgggcccgccgggagcugccccgcuucaugaacuacacccucaacaacaccaagaacaacaacgugacgcuguccaagaagcggaagcgccgguuccugggguuccuccugggcguggggagcgcgaucgccuccggcaucgccgucugcaaggugcugcaccucgagggcgaggugaacaagaucaagaacgcccugcuguccaccaacaaggccgucgugagccucuccaacggggugagcguccugaccuucaaggugcuggaccucaagaacuacaucgacaagcagcugcugcccauccugaacaagcagagcugcuccaucagcaacaucgagaccgucaucgaguuccagcagaagaacaaccgccuccuggagaucacgcgggaguucagcgugaacgcgggcgugaccacccccgucuccaccuacaugcugacgaacagcgagcuccugucccugaucaacgacaugccgaucaccaacgaccagaagaagcucaugagcaacaacgugcagaucgugcgccagcaguccuacagcaucaugugcaucaucaaggaggagguccuggccuacguggugcagcugccccucuacggggucaucgacacccccugcuggaagcugcacaccagcccccugugcacgaccaacaccaaggagggcuccaacaucugccucacccggacggaccgcgggugguacugcgacaacgccggcagcguguccuucuucccgcaggccgagaccugcaagguccagagcaaccggguguucugcgacaccaugaacucccugacccugcccagcgaggugaaccucugcaacaucgacaucuucaaccccaaguacgacugcaagaucaugacguccaagaccgacgucagcuccagcgugaucaccucccugggcgccaucgugagcugcuacgggaagaccaagugcacggcgagcaacaagaaccgcggcaucaucaagaccuucuccaacgggugcgacuacgucagcaacaagggcguggacaccguguccgucggcaacacccuguacuacgugaacaagcaggagggcaagagccucuacgugaagggggagcccaucaucaacuucuacgacccgcuggucuuccccuccgacgaguucgacgccagcaucucccaggugaacgagaagaucaaccagagccuggccuucauccggaaguccgacgagcuccugcacaacgugaacgucggcaagagcaccacgaacaucaugaucaccaccaucaucaucgugaucaucgugauccugcugcuccugaucgccgucgggcuguuccucuacugcaaggcccgcugaggacuaguguccaccugucccuccugggcugcuggauugucucguuuuccugccaaauaaacaggaucagcgcuuuacagaucuaaaaaaaaaaaaaaaaaaaaaaaaaaaaaaaaaaaaaaaaaaaaaaaaaaaaaaaaaaaaaaaaugcaucccccccccccccccccccccccccccccccaaaggcucuuuucagagccaccagaauu

SEQ ID NO: 12899 - RNA, 1951 nt, Artificial Sequence
  mRNA product Design b-3 comprising derived and/or modified sequence from HRSV(Memphis-37)__AIY60640.1__F-del_DSCav1 (opt1)
gggagagucccgcagucggcguccagcggcucugcuuguucgugugugugucguugcaggccuuauucaagcuuaccauggagcugcccauccucaagaccaacgccaucaccacgauccuggccgcggugacccugugcuucgccagcucccagaacaucaccgaggaguucuaccagagcacgugcuccgccgucagcaagggcuaccucuccgcccugcgcaccgggugguacaccagcgugaucaccaucgagcuguccaacaucaaggagaacaagugcaacggcaccgacgccaaggugaagcucaucaagcaggagcuggacaaguacaagaacgcggucacggagcugcagcuccugaugcagagcaccccggccgccaacaaccgggcccgccgggagcugccccgcuucaugaacuacacccucaacaacaccaagaacaacaacgugacgcuguccaagaagcggaagcgccgguuccugggguuccuccugggcguggggagcgcgaucgccuccggcaucgccgucugcaaggugcugcaccucgagggcgaggugaacaagaucaagaacgcccugcugagcaccaacaaggccgucgugucccucagcaacgggguguccguccugaccuucaaggugcuggaccucaagaacuacaucgacaagcagcugcugcccauccucaacaagcagagcugcuccaucagcaacaucgagaccgugaucgaguuccagcagaagaacaaccgccugcuggagaucacgcgggaguucuccgucaacgcgggcgugaccacccccgugagcaccuacaugcucacgaacagcgagcugcugucccucaucaacgacaugccgaucaccaacgaccagaagaagcugaugagcaacaacguccagaucgugcgccagcaguccuacagcaucaugugcaucaucaaggaggaggugcuggccuacgucgugcagcucccccuguacggggugaucgacacccccugcuggaagcugcacaccagcccccucugcacgaccaacaccaaggagggcagcaacaucugccugacccggacggaccgcgggugguacugcgacaacgccggcuccgucagcuucuucccgcaggccgagaccugcaaggugcaguccaaccgggucuucugcgacaccaugaacagccugacccuccccuccgaggugaaccugugcaacaucgacaucuucaaccccaaguacgacugcaagaucaugacgagcaagaccgacguguccagcuccgucaucaccagccugggcgccaucguguccugcuacgggaagaccaagugcacggcgagcaacaagaaccgcggcaucaucaagaccuucuccaacgggugcgacuacgugagcaacaagggcgucgacaccgugagcgugggcaacacccucuacuacgucaacaagcaggaggggaagucccuguacgugaagggcgagcccaucaucaacuucuacgacccgcugguguuccccagcgacgaguucgacgccuccaucagccaggucaacgagaagaucaaccagucccucgccuucauccggaaguccgacgagcugcugcacaacgugaacguggggaaguccaccacgaacaucaugaucaccaccaucaucaucgucaucaucgugauccugcuccugcugaucgccgugggccucuuccuguacugcaaggcccgcugaggacuaguguccaccugucccuccugggcugcuggauugucucguuuuccugccaaauaaacaggaucagcgcuuuacagaucuaaaaaaaaaaaaaaaaaaaaaaaaaaaaaaaaaaaaaaaaaaaaaaaaaaaaaaaaaaaaaaaaugcaucccccccccccccccccccccccccccccccaaaggcucuuuucagagccaccagaauu

SEQ ID NO: 12900 - RNA, 1951 nt, Artificial Sequence
  mRNA product Design b-3 comprising derived and/or modified sequence from HRSV(Memphis-37)__AIY60640.1__F-del_DSCav1 (opt2)
gggagagucccgcagucggcguccagcggcucugcuuguucgugugugugucguugcaggccuuauucaagcuuaccauggagcuccccauccucaagaccaacgccaucaccaccauccucgccgccgucacccucugcuucgccuccucccagaacaucaccgaggaguucuaccaguccaccugcuccgccgucuccaagggcuaccucuccgcccuccgcaccggcugguacaccuccgucaucaccaucgagcucuccaacaucaaggagaacaagugcaacggcaccgacgccaaggucaagcucaucaagcaggagcucgacaaguacaagaacgccgucaccgagcuccagcuccucaugcaguccacccccgccgccaacaaccgcgcccgccgcgagcucccccgcuucaugaacuacacccucaacaacaccaagaacaacaacgucacccucuccaagaagcgcaagcgccgcuuccucggcuuccuccucggcgucggcuccgccaucgccuccggcaucgccgucugcaagguccuccaccucgagggcgaggucaacaagaucaagaacgcccuccucuccaccaacaaggccgucgucucccucuccaacggcgucuccguccucaccuucaagguccucgaccucaagaacuacaucgacaagcagcuccuccccauccucaacaagcaguccugcuccaucuccaacaucgagaccgucaucgaguuccagcagaagaacaaccgccuccucgagaucacccgcgaguucuccgucaacgccggcgucaccacccccgucuccaccuacaugcucaccaacuccgagcuccucucccucaucaacgacaugcccaucaccaacgaccagaagaagcucauguccaacaacguccagaucguccgccagcaguccuacuccaucaugugcaucaucaaggaggagguccucgccuacgucguccagcucccccucuacggcgucaucgacacccccugcuggaagcuccacaccuccccccucugcaccaccaacaccaaggagggcuccaacaucugccucacccgcaccgaccgcggcugguacugcgacaacgccggcuccgucuccuucuucccccaggccgagaccugcaagguccaguccaaccgcgucuucugcgacaccaugaacucccucacccuccccuccgaggucaaccucugcaacaucgacaucuucaaccccaaguacgacugcaagaucaugaccuccaagaccgacgucuccuccuccgucaucaccucccucggcgccaucgucuccugcuacggcaagaccaagugcaccgccuccaacaagaaccgcggcaucaucaagaccuucuccaacggcugcgacuacgucuccaacaagggcgucgacaccgucuccgucggcaacacccucuacuacgucaacaagcaggagggcaagucccucuacgucaagggcgagcccaucaucaacuucuacgacccccucgucuuccccuccgacgaguucgacgccuccaucucccaggucaacgagaagaucaaccagucccucgccuucauccgcaaguccgacgagcuccuccacaacgucaacgucggcaaguccaccaccaacaucaugaucaccaccaucaucaucgucaucaucgucauccuccuccuccucaucgccgucggccucuuccucuacugcaaggcccgcugaggacuaguguccaccugucccuccugggcugcuggauugucucguuuuccugccaaauaaacaggaucagcgcuuuacagaucuaaaaaaaaaaaaaaaaaaaaaaaaaaaaaaaaaaaaaaaaaaaaaaaaaaaaaaaaaaaaaaaaugcaucccccccccccccccccccccccccccccccaaaggcucuuuucagagccaccagaauu

SEQ ID NO: 12901 - RNA, 1951 nt, Artificial Sequence
  mRNA product Design b-3 comprising derived and/or modified sequence from HRSV(Memphis-37)__AIY60640.1__F-del_DSCav1 (opt3)
gggagagucccgcagucggcguccagcggcucugcuuguucgugugugugucguugcaggccuuauucaagcuuaccauggagcugcccauccucaagaccaacgccauuacaacuauacuugcugcagugacgcugugcuucgccagcucccagaauaucaccgaagaguuuuaccaaucuacauguucagcggucaguaaaggcuauuugagcgcuuuaagaacugggugguacaccuccguuauuacaaucgaacugucuaacauuaaggagaauaaaugcaacggaaccgacgccaaggugaaacuaaucaagcaggaacucgauaaguauaaaaaugcaguaacugagcugcagcuucugaugcagucgaccccugccgcuaacaauagggcacggcgcgaguugccacgauucaugaacuacacacucaauaacacgaagaauaacaaugugacucugagcaaaaagcguaaaagaagguuucuggguuuccucuuaggcgucgggucagccauagcuaguggaaucgccguguguaagguucugcaccuugaaggcgaggugaacaagauuaaaaaugcguugcuguccaccaacaaggcagucgugucucuaagcaacgguguauccguucucacauuuaaagugcuggaccuuaagaauuauaucgauaaacaacuguugccgauucucaacaagcagucaugcaguaucagcaauauagaaacugucauugaguuccagcagaaaaacaaucggcuguuagagaucacccgcgaauuuucugugaacgccggggugacaacccccgucuccacguacaugcugacuaauucagagcuccuuagccugauuaacgacaugccuaucacaaaugaucaaaagaaguugaugaguaacaauguucagaucgugagacagcagucuuauuccauuauguguauaaucaaagaagagguacuagcuuacgugguccaacugccacucuacggagugauugacacccccugcuggaagcugcauacuagcccucuuuguacaaccaacacgaaagaaggcucgaauaucugccugaccaggacagaucggggcugguauugugacaacgccgggucuguuuccuucuuuccacaggcagagacuugcaaggugcagucaaaucgcgucuucugugauaccaugaacaguuugacacuccccagcgaggugaaccugugcaauauagacauuuuuaacccuaaauacgauugcaagaucaugacuuccaagaccgacguaucuagcucaguuaucacaaguuuaggagcuauuguguccuguuaugguaaaaccaagugcacugccagcaauaaaaaccgaggcaucauuaagacguucucuaaugggugugauuacgucucaaacaaaggaguggacacagucagugugggcaauacccuguauuacguuaacaagcaagaagguaagagccuauaugugaaaggggagccaauaaucaauuuuuacgacccgcucguauuccccuccgaugaguucgacgcgucuauuucgcaggucaacgaaaagaucaaucagagccuggccuuuaucagaaaauccgaugaacuuuugcacaacgugaauguuggaaagucaacuaccaacauuaugauaacaaccaucauuaucgugauuaucgucauacugcuccugcuuaucgcagugggccuguucuuguacugcaaagcuaggugaggacuaguguccaccugucccuccugggcugcuggauugucucguuuuccugccaaauaaacaggaucagcgcuuuacagaucuaaaaaaaaaaaaaaaaaaaaaaaaaaaaaaaaaaaaaaaaaaaaaaaaaaaaaaaaaaaaaaaaugcaucccccccccccccccccccccccccccccccaaaggcucuuuucagagccaccagaauu

SEQ ID NO: 12902 - RNA, 1951 nt, Artificial Sequence
  mRNA product Design b-3 comprising derived and/or modified sequence from HRSV(Memphis-37)__AIY60640.1__F-del_DSCav1 (opt4)
gggagagucccgcagucggcguccagcggcucugcuuguucgugugugugucguugcaggccuuauucaagcuuaccauggagcugcccauccugaagaccaacgccaucaccaccauccuggccgccgugacccugugcuucgccagcagccagaacaucaccgaggaguucuaccagagcaccugcagcgccgugagcaagggcuaccugagcgcccugagaaccggcugguacaccagcgugaucaccaucgagcugagcaacaucaaggagaacaagugcaacggcaccgacgccaaggugaagcugaucaagcaggagcuggacaaguacaagaacgccgugaccgagcugcagcugcugaugcagagcacccccgccgccaacaacagagccagaagagagcugcccagauucaugaacuacacccugaacaacaccaagaacaacaacgugacccugagcaagaagagaaagagaagauuccugggcuuccugcugggcgugggcagcgccaucgccagcggcaucgccgugugcaaggugcugcaccuggagggcgaggugaacaagaucaagaacgcccugcugagcaccaacaaggccguggugagccugagcaacggcgugagcgugcugaccuucaaggugcuggaccugaagaacuacaucgacaagcagcugcugcccauccugaacaagcagagcugcagcaucagcaacaucgagaccgugaucgaguuccagcagaagaacaacagacugcuggagaucaccagagaguucagcgugaacgccggcgugaccacccccgugagcaccuacaugcugaccaacagcgagcugcugagccugaucaacgacaugcccaucaccaacgaccagaagaagcugaugagcaacaacgugcagaucgugagacagcagagcuacagcaucaugugcaucaucaaggaggaggugcuggccuacguggugcagcugccccuguacggcgugaucgacacccccugcuggaagcugcacaccagcccccugugcaccaccaacaccaaggagggcagcaacaucugccugaccagaaccgacagaggcugguacugcgacaacgccggcagcgugagcuucuucccccaggccgagaccugcaaggugcagagcaacagaguguucugcgacaccaugaacagccugacccugcccagcgaggugaaccugugcaacaucgacaucuucaaccccaaguacgacugcaagaucaugaccagcaagaccgacgugagcagcagcgugaucaccagccugggcgccaucgugagcugcuacggcaagaccaagugcaccgccagcaacaagaacagaggcaucaucaagaccuucagcaacggcugcgacuacgugagcaacaagggcguggacaccgugagcgugggcaacacccuguacuacgugaacaagcaggagggcaagagccuguacgugaagggcgagcccaucaucaacuucuacgacccccugguguuccccagcgacgaguucgacgccagcaucagccaggugaacgagaagaucaaccagagccuggccuucaucagaaagagcgacgagcugcugcacaacgugaacgugggcaagagcaccaccaacaucaugaucaccaccaucaucaucgugaucaucgugauccugcugcugcugaucgccgugggccuguuccuguacugcaaggccagaugaggacuaguguccaccugucccuccugggcugcuggauugucucguuuuccugccaaauaaacaggaucagcgcuuuacagaucuaaaaaaaaaaaaaaaaaaaaaaaaaaaaaaaaaaaaaaaaaaaaaaaaaaaaaaaaaaaaaaaaugcaucccccccccccccccccccccccccccccccaaaggcucuuuucagagccaccagaauu

SEQ ID NO: 12903 - RNA, 1951 nt, Artificial Sequence
  mRNA product Design b-3 comprising derived and/or modified sequence from HRSV(Memphis-37)__AIY60640.1__F-del_DSCav1 (opt5)
gggagagucccgcagucggcguccagcggcucugcuuguucgugugugugucguugcaggccuuauucaagcuuaccauggagcugcccauccucaagaccaacgccauuacaacgauccuggcugccgugacccuuugcuucgcgagcucccagaauauuacagaagaguuuuaccaaucuaccuguagcgcugucuccaaaggcuaucugucugcccucagaacagggugguacaccagcguuaucacaauugaacuguccaacaucaaggagaauaaaugcaacggaaccgacgccaaggugaaacuuaucaagcaggaacuggauaaguauaaaaaugcugugacggagcuccagcugcugaugcagucuaccccugccgcuaacaaucgggcccgcagagagcucccgcgguucaugaacuacacacugaauaacaccaagaauaacaaugucacacuuagcaaaaagcgcaaaagacgguuucugggcuuccuccugggggugggauccgcgauugccagcggcaucgcuguuuguaaggugcuucaccuggaaggggaggucaacaagauuaaaaaugcccuccugucuaccaacaaggcugugguuucccugagcaacggagugucuguccucacguuuaaagugcuggaccuuaagaauuauaucgauaaacaacugcuccccauucugaacaagcaguccugcagcaucucuaauauugaaacagugaucgaguuccagcagaaaaacaaucgccuucuggagaucaccagagaauuuuccgucaacgccggcguuacaaccccugugagcaccuacaugcucacaaauuccgagcugcugucucucauuaacgacaugcccaucacgaaugaucaaaagaagcugaugagcaacaaugugcagauuguccggcagcaguccuauagcaucauguguauuaucaaagaagaggugcuugcguacguugugcaacugccucucuacggcgucaucgacacccccugcuggaagcugcauacaucuccucuuuguaccacaaacaccaaagaaggguccaauauuugccugacgcgcacagauagaggaugguauugugacaacgccggcagcgugucuuucuuuccgcaggcugagaccugcaagguucagagcaaucggguguucugugauaccaugaacucccucacacugcccucugaggucaaccugugcaauaucgacauuuuuaacccuaaauacgauugcaagaucaugaccagcaagacagacguguccagcucugucauuacgucccucggggccaucgugagcuguuauggaaaaaccaagugcacagcuucuaauaaaaaccgcggcaucauuaagaccuucuccaaugggugugauuacguuagcaacaaaggaguggacacagucuccgugggcaauacccuguauuacguuaacaagcaagaaggcaagucucuuuaugugaaaggggagcccaucauuaauuuuuacgacccucuggucuuccccagcgaugaguucgacgccuccaucucucaggugaacgaaaagauuaaucagagccucgccuuuaucagaaaauccgaugaacugcugcacaacgugaauguuggaaagagcacgaccaacauuaugaucacaaccaucauuaucgucauuaucgugauucuucuccugcugaucgcugugggccucuuccuguacugcaaagcgcggugaggacuaguguccaccugucccuccugggcugcuggauugucucguuuuccugccaaauaaacaggaucagcgcuuuacagaucuaaaaaaaaaaaaaaaaaaaaaaaaaaaaaaaaaaaaaaaaaaaaaaaaaaaaaaaaaaaaaaaaugcaucccccccccccccccccccccccccccccccaaaggcucuuuucagagccaccagaauu

SEQ ID NO: 12904 - RNA, 1951 nt, Artificial Sequence
  mRNA product Design b-3 comprising derived and/or modified sequence from HRSV(Memphis-37)__AIY60640.1__F-del_DSCav1 (opt6)
gggagagucccgcagucggcguccagcggcucugcuuguucgugugugugucguugcaggccuuauucaagcuuaccauggaauuaccaauccuuaaaacaaacgcaauaacaaccauccucgcagcaguaacucucugcuucgcuucaucucaaaacaucacagaagaauuuuaccaaagcacaugcucagcuguauccaaagguuaucuaucagccuugagaaccggaugguacacaucaguaauaacaauugaacuaucaaacauuaaagaaaacaaaugcaacggcaccgacgcaaaaguaaaacuaaucaaacaagaacuagacaaauauaaaaaugcaguaacagaauuacaauuauuaaugcaauccacaccagcugcaaacaaccgagcccgaagagaacuaccaagauucaugaacuacacacuaaacaacaccaaaaauaacaacgucacccuaucuaaaaaacguaaaagaagauucuuaggauuccucuuaggagucggauccgcaauagcaagcggcauagccguauguaaaguccuacacuuagaaggugaagugaauaaaauaaaaaacgcccuauuaagcacuaacaaagcaguagucucccuaucaaacggaguuucaguacucacauucaaaguacucgaccucaaaaacuacaucgacaaacaacuuuuaccaauucuaaacaaacaaucaugcuccauaucuaauaucgaaaccgucaucgaauuucaacaaaaaaacaauagacuacuagaaauaacuagagaauuuucaguaaacgccggcguuacgacaccagucucuacauacauguuaaccaauucagaacucuuaucauuaaucaacgacaugccaauaacaaacgaccaaaaaaaacuaauguccaauaacguacaaauagucagacaacaaucauacucaauuaugugcauaauaaaagaagaaguacuagcuuacguaguacaacucccccuauacggcguaauagacacuccauguuggaaauuacacacaucaccauuauguaccaccaauacaaaagaaggcucaaacauaugccuaacaagaacagauagaggaugguauugcgacaacgcaggcucaguuuccuuuuucccccaagcagaaaccugcaaaguacaaucaaaucguguuuuuugcgacaccaugaacucacucacauuaccaucagaaguaaaccuaugcaacauagacauauucaacccaaaauacgacugcaaaaucaugacaucaaaaacagacguauccucuucaguaauuacuagcuuaggagcaauagucucuuguuauggaaaaacaaaaugcacagccaguaacaaaaaccgcggaauaauaaaaaccuucucaaacgguugcgauuacgucucuaacaaaggagucgacacaguaucaguaggcaauacauuauacuacguuaacaaacaagaaggaaaaucuuuauacgucaaaggagaacccauuauaaacuuuuacgacccauuagucuucccuuccgacgaauuugacgccagcauuucacaaguaaacgaaaaaauaaaccaaucacucgcauuuauaagaaaaucugacgaauuacuccacaacguaaacguaggaaaauccacaacaaacauaaugauaacaaccauaaucaucgucauaauagucauacuucuccuauuaauugcaguaggcuuauuccuauacuguaaagcacgauaaggacuaguguccaccugucccuccugggcugcuggauugucucguuuuccugccaaauaaacaggaucagcgcuuuacagaucuaaaaaaaaaaaaaaaaaaaaaaaaaaaaaaaaaaaaaaaaaaaaaaaaaaaaaaaaaaaaaaaaugcaucccccccccccccccccccccccccccccccaaaggcucuuuucagagccaccagaauu

SEQ ID NO: 12905 - RNA, 1951 nt, Artificial Sequence
  mRNA product Design b-3 comprising derived and/or modified sequence from HRSV(Memphis-37)__AIY60640.1__F-del_DSCav1 (opt11)
gggagagucccgcagucggcguccagcggcucugcuuguucgugugugugucguugcaggccuuauucaagcuuaccauggaacuaccaauccuaaaaacuaacgcaaucaccacaauccucgccgccgucacccuuugcuuugcguccucccaaaacauuacugaagaguucuaccaauccacgugcuccgccgucuccaaagguuaccuauccgcccuuaggaccggcugguacaccagcgucaucaccaucgaacuuuccaacaucaaagaaaacaaauguaacggcaccgacgcaaaagucaaacuuauuaaacaggaacucgacaaauauaagaaugccgucaccgaauuacaacuccucaugcaauccacccccgccgccaacaaccgagcaaggcgcgaacucccucgauucaugaauuacacccucaacaauaccaaaaacaacaacgucacccuauccaagaaacgcaaaagacgcuucuugggcuuccuccucggcgugggcuccgcaauagccuccgguauugccgugugcaaagucuuacaccucgaaggcgaggucaacaaaaucaaaaacgcccuccucuccaccaacaaagccgucgucagccuauccaacggcguuuccguccucaccuucaaaguacucgaccucaaaaacuacaucgacaaacaacuccuacccauacuaaacaaacaauccugcuccauuuccaacaucgaaaccguaaucgaguuccaacagaaaaacaaucgccuccuagaaaucacacgugaauuuucaguuaacgccggaguaacaacuccuguaucuaccuacaugcucaccaauuccgaacuccucagccucauaaacgacaugccaauaacaaacgaccaaaagaaacucaugucuaacaacguacaaaucgucagacaacaaaguuacucaaucauguguaucaucaaagaggaaguccuagcauacgugguccaacucccccucuacggaguaaucgacaccccaugcuggaaacuacacaccagcccccucuguaccacaaacacgaaagaagguuccaacaucugccugacccgaaccgaccgcggcugguacugcgauaacgcuggcuccgucucauucuucccccaagcagaaaccugcaaaguacaauccaaccgaguauucugcgacaccaugaacucacucacccuccccagcgaaguaaaccucugcaacaucgacauauucaacccaaaauacgacugcaaaauuaugaccucuaaaacagacguauccuccucuguaaucacaucccucggggccaucgucuccugcuacggcaaaaccaaaugcaccgccuccaacaaaaaccgcggaaucauaaaaaccuucuccaacggaugcgacuacgucucaaauaaaggcgucgacaccgucuccgucggcaacacgcuauacuacgucaacaaacaagaaggcaaaucacucuacgucaaaggugagcccaucaucaauuucuacgauccccucgucuucccaagcgacgaguucgacgccagcauaucccaaguaaacgagaaaaucaaccaaagccuggccuucauccgcaaauccgacgaacuacuacacaacguaaacguaggcaaguccacuaccaacauaaugaucaccacaaucaucauagucauaaucguuauacuacuccugcucaucgccguaggccucuuccucuauugcaaagcccgauagggacuaguguccaccugucccuccugggcugcuggauugucucguuuuccugccaaauaaacaggaucagcgcuuuacagaucuaaaaaaaaaaaaaaaaaaaaaaaaaaaaaaaaaaaaaaaaaaaaaaaaaaaaaaaaaaaaaaaaugcaucccccccccccccccccccccccccccccccaaaggcucuuuucagagccaccagaauu

SEQ ID NO: 12906 - RNA, 2002 nt, Artificial Sequence
  mRNA product Design b-4 comprising derived and/or modified sequence from HRSV(Memphis-37)__AIY60640.1__F-del_DSCav1 (opt1)
gggagagucccgcagucggcguccagcggcucugcuuguucgugugugugucguugcaggccuuauucaagcuuaccauggagcugcccauccucaagaccaacgccaucaccacgauccuggccgcggugacccugugcuucgccagcucccagaacaucaccgaggaguucuaccagagcacgugcuccgccgucagcaagggcuaccucuccgcccugcgcaccgggugguacaccagcgugaucaccaucgagcuguccaacaucaaggagaacaagugcaacggcaccgacgccaaggugaagcucaucaagcaggagcuggacaaguacaagaacgcggucacggagcugcagcuccugaugcagagcaccccggccgccaacaaccgggcccgccgggagcugccccgcuucaugaacuacacccucaacaacaccaagaacaacaacgugacgcuguccaagaagcggaagcgccgguuccugggguuccuccugggcguggggagcgcgaucgccuccggcaucgccgucugcaaggugcugcaccucgagggcgaggugaacaagaucaagaacgcccugcuguccaccaacaaggccgucgugagccucuccaacggggugagcguccugaccuucaaggugcuggaccucaagaacuacaucgacaagcagcugcugcccauccugaacaagcagagcugcuccaucagcaacaucgagaccgucaucgaguuccagcagaagaacaaccgccuccuggagaucacgcgggaguucagcgugaacgcgggcgugaccacccccgucuccaccuacaugcugacgaacagcgagcuccugucccugaucaacgacaugccgaucaccaacgaccagaagaagcucaugagcaacaacgugcagaucgugcgccagcaguccuacagcaucaugugcaucaucaaggaggagguccuggccuacguggugcagcugccccucuacggggucaucgacacccccugcuggaagcugcacaccagcccccugugcacgaccaacaccaaggagggcuccaacaucugccucacccggacggaccgcgggugguacugcgacaacgccggcagcguguccuucuucccgcaggccgagaccugcaagguccagagcaaccggguguucugcgacaccaugaacucccugacccugcccagcgaggugaaccucugcaacaucgacaucuucaaccccaaguacgacugcaagaucaugacguccaagaccgacgucagcuccagcgugaucaccucccugggcgccaucgugagcugcuacgggaagaccaagugcacggcgagcaacaagaaccgcggcaucaucaagaccuucuccaacgggugcgacuacgucagcaacaagggcguggacaccguguccgucggcaacacccuguacuacgugaacaagcaggagggcaagagccucuacgugaagggggagcccaucaucaacuucuacgacccgcuggucuuccccuccgacgaguucgacgccagcaucucccaggugaacgagaagaucaaccagagccuggccuucauccggaaguccgacgagcuccugcacaacgugaacgucggcaagagcaccacgaacaucaugaucaccaccaucaucaucgugaucaucgugauccugcugcuccugaucgccgucgggcuguuccucuacugcaaggcccgcugaggacuaguaauaaggaaacuguaugaaugucugugggcaggaagugaagagauccuucuguaaagguuuuuggaauuaugucugcugaauaauaaacuuuuuugaaauaauaaaucugguagaaaaaugagaucuaaaaaaaaaaaaaaaaaaaaaaaaaaaaaaaaaaaaaaaaaaaaaaaaaaaaaaaaaaaaaaaaugcaucccccccccccccccccccccccccccccccaaaggcucuuuucagagccaccagaauu

SEQ ID NO: 12907 - RNA, 2002 nt, Artificial Sequence
  mRNA product Design b-4 comprising derived and/or modified sequence from HRSV(Memphis-37)__AIY60640.1__F-del_DSCav1 (opt1)
gggagagucccgcagucggcguccagcggcucugcuuguucgugugugugucguugcaggccuuauucaagcuuaccauggagcugcccauccucaagaccaacgccaucaccacgauccuggccgcggugacccugugcuucgccagcucccagaacaucaccgaggaguucuaccagagcacgugcuccgccgucagcaagggcuaccucuccgcccugcgcaccgggugguacaccagcgugaucaccaucgagcuguccaacaucaaggagaacaagugcaacggcaccgacgccaaggugaagcucaucaagcaggagcuggacaaguacaagaacgcggucacggagcugcagcuccugaugcagagcaccccggccgccaacaaccgggcccgccgggagcugccccgcuucaugaacuacacccucaacaacaccaagaacaacaacgugacgcuguccaagaagcggaagcgccgguuccugggguuccuccugggcguggggagcgcgaucgccuccggcaucgccgucugcaaggugcugcaccucgagggcgaggugaacaagaucaagaacgcccugcugagcaccaacaaggccgucgugucccucagcaacgggguguccguccugaccuucaaggugcuggaccucaagaacuacaucgacaagcagcugcugcccauccucaacaagcagagcugcuccaucagcaacaucgagaccgugaucgaguuccagcagaagaacaaccgccugcuggagaucacgcgggaguucuccgucaacgcgggcgugaccacccccgugagcaccuacaugcucacgaacagcgagcugcugucccucaucaacgacaugccgaucaccaacgaccagaagaagcugaugagcaacaacguccagaucgugcgccagcaguccuacagcaucaugugcaucaucaaggaggaggugcuggccuacgucgugcagcucccccuguacggggugaucgacacccccugcuggaagcugcacaccagcccccucugcacgaccaacaccaaggagggcagcaacaucugccugacccggacggaccgcgggugguacugcgacaacgccggcuccgucagcuucuucccgcaggccgagaccugcaaggugcaguccaaccgggucuucugcgacaccaugaacagccugacccuccccuccgaggugaaccugugcaacaucgacaucuucaaccccaaguacgacugcaagaucaugacgagcaagaccgacguguccagcuccgucaucaccagccugggcgccaucguguccugcuacgggaagaccaagugcacggcgagcaacaagaaccgcggcaucaucaagaccuucuccaacgggugcgacuacgugagcaacaagggcgucgacaccgugagcgugggcaacacccucuacuacgucaacaagcaggaggggaagucccuguacgugaagggcgagcccaucaucaacuucuacgacccgcugguguuccccagcgacgaguucgacgccuccaucagccaggucaacgagaagaucaaccagucccucgccuucauccggaaguccgacgagcugcugcacaacgugaacguggggaaguccaccacgaacaucaugaucaccaccaucaucaucgucaucaucgugauccugcuccugcugaucgccgugggccucuuccuguacugcaaggcccgcugaggacuaguaauaaggaaacuguaugaaugucugugggcaggaagugaagagauccuucuguaaagguuuuuggaauuaugucugcugaauaauaaacuuuuuugaaauaauaaaucugguagaaaaaugagaucuaaaaaaaaaaaaaaaaaaaaaaaaaaaaaaaaaaaaaaaaaaaaaaaaaaaaaaaaaaaaaaaaugcaucccccccccccccccccccccccccccccccaaaggcucuuuucagagccaccagaauu

SEQ ID NO: 12908 - RNA, 2002 nt, Artificial Sequence
  mRNA product Design b-4 comprising derived and/or modified sequence from HRSV(Memphis-37)__AIY60640.1__F-del_DSCav1 (opt2)
gggagagucccgcagucggcguccagcggcucugcuuguucgugugugugucguugcaggccuuauucaagcuuaccauggagcuccccauccucaagaccaacgccaucaccaccauccucgccgccgucacccucugcuucgccuccucccagaacaucaccgaggaguucuaccaguccaccugcuccgccgucuccaagggcuaccucuccgcccuccgcaccggcugguacaccuccgucaucaccaucgagcucuccaacaucaaggagaacaagugcaacggcaccgacgccaaggucaagcucaucaagcaggagcucgacaaguacaagaacgccgucaccgagcuccagcuccucaugcaguccacccccgccgccaacaaccgcgcccgccgcgagcucccccgcuucaugaacuacacccucaacaacaccaagaacaacaacgucacccucuccaagaagcgcaagcgccgcuuccucggcuuccuccucggcgucggcuccgccaucgccuccggcaucgccgucugcaagguccuccaccucgagggcgaggucaacaagaucaagaacgcccuccucuccaccaacaaggccgucgucucccucuccaacggcgucuccguccucaccuucaagguccucgaccucaagaacuacaucgacaagcagcuccuccccauccucaacaagcaguccugcuccaucuccaacaucgagaccgucaucgaguuccagcagaagaacaaccgccuccucgagaucacccgcgaguucuccgucaacgccggcgucaccacccccgucuccaccuacaugcucaccaacuccgagcuccucucccucaucaacgacaugcccaucaccaacgaccagaagaagcucauguccaacaacguccagaucguccgccagcaguccuacuccaucaugugcaucaucaaggaggagguccucgccuacgucguccagcucccccucuacggcgucaucgacacccccugcuggaagcuccacaccuccccccucugcaccaccaacaccaaggagggcuccaacaucugccucacccgcaccgaccgcggcugguacugcgacaacgccggcuccgucuccuucuucccccaggccgagaccugcaagguccaguccaaccgcgucuucugcgacaccaugaacucccucacccuccccuccgaggucaaccucugcaacaucgacaucuucaaccccaaguacgacugcaagaucaugaccuccaagaccgacgucuccuccuccgucaucaccucccucggcgccaucgucuccugcuacggcaagaccaagugcaccgccuccaacaagaaccgcggcaucaucaagaccuucuccaacggcugcgacuacgucuccaacaagggcgucgacaccgucuccgucggcaacacccucuacuacgucaacaagcaggagggcaagucccucuacgucaagggcgagcccaucaucaacuucuacgacccccucgucuuccccuccgacgaguucgacgccuccaucucccaggucaacgagaagaucaaccagucccucgccuucauccgcaaguccgacgagcuccuccacaacgucaacgucggcaaguccaccaccaacaucaugaucaccaccaucaucaucgucaucaucgucauccuccuccuccucaucgccgucggccucuuccucuacugcaaggcccgcugaggacuaguaauaaggaaacuguaugaaugucugugggcaggaagugaagagauccuucuguaaagguuuuuggaauuaugucugcugaauaauaaacuuuuuugaaauaauaaaucugguagaaaaaugagaucuaaaaaaaaaaaaaaaaaaaaaaaaaaaaaaaaaaaaaaaaaaaaaaaaaaaaaaaaaaaaaaaaugcaucccccccccccccccccccccccccccccccaaaggcucuuuucagagccaccagaauu

SEQ ID NO: 12909 - RNA, 2002 nt, Artificial Sequence
  mRNA product Design b-4 comprising derived and/or modified sequence from HRSV(Memphis-37)__AIY60640.1__F-del_DSCav1 (opt3)
gggagagucccgcagucggcguccagcggcucugcuuguucgugugugugucguugcaggccuuauucaagcuuaccauggagcugcccauccucaagaccaacgccauuacaacuauacuugcugcagugacgcugugcuucgccagcucccagaauaucaccgaagaguuuuaccaaucuacauguucagcggucaguaaaggcuauuugagcgcuuuaagaacugggugguacaccuccguuauuacaaucgaacugucuaacauuaaggagaauaaaugcaacggaaccgacgccaaggugaaacuaaucaagcaggaacucgauaaguauaaaaaugcaguaacugagcugcagcuucugaugcagucgaccccugccgcuaacaauagggcacggcgcgaguugccacgauucaugaacuacacacucaauaacacgaagaauaacaaugugacucugagcaaaaagcguaaaagaagguuucuggguuuccucuuaggcgucgggucagccauagcuaguggaaucgccguguguaagguucugcaccuugaaggcgaggugaacaagauuaaaaaugcguugcuguccaccaacaaggcagucgugucucuaagcaacgguguauccguucucacauuuaaagugcuggaccuuaagaauuauaucgauaaacaacuguugccgauucucaacaagcagucaugcaguaucagcaauauagaaacugucauugaguuccagcagaaaaacaaucggcuguuagagaucacccgcgaauuuucugugaacgccggggugacaacccccgucuccacguacaugcugacuaauucagagcuccuuagccugauuaacgacaugccuaucacaaaugaucaaaagaaguugaugaguaacaauguucagaucgugagacagcagucuuauuccauuauguguauaaucaaagaagagguacuagcuuacgugguccaacugccacucuacggagugauugacacccccugcuggaagcugcauacuagcccucuuuguacaaccaacacgaaagaaggcucgaauaucugccugaccaggacagaucggggcugguauugugacaacgccgggucuguuuccuucuuuccacaggcagagacuugcaaggugcagucaaaucgcgucuucugugauaccaugaacaguuugacacuccccagcgaggugaaccugugcaauauagacauuuuuaacccuaaauacgauugcaagaucaugacuuccaagaccgacguaucuagcucaguuaucacaaguuuaggagcuauuguguccuguuaugguaaaaccaagugcacugccagcaauaaaaaccgaggcaucauuaagacguucucuaaugggugugauuacgucucaaacaaaggaguggacacagucagugugggcaauacccuguauuacguuaacaagcaagaagguaagagccuauaugugaaaggggagccaauaaucaauuuuuacgacccgcucguauuccccuccgaugaguucgacgcgucuauuucgcaggucaacgaaaagaucaaucagagccuggccuuuaucagaaaauccgaugaacuuuugcacaacgugaauguuggaaagucaacuaccaacauuaugauaacaaccaucauuaucgugauuaucgucauacugcuccugcuuaucgcagugggccuguucuuguacugcaaagcuaggugaggacuaguaauaaggaaacuguaugaaugucugugggcaggaagugaagagauccuucuguaaagguuuuuggaauuaugucugcugaauaauaaacuuuuuugaaauaauaaaucugguagaaaaaugagaucuaaaaaaaaaaaaaaaaaaaaaaaaaaaaaaaaaaaaaaaaaaaaaaaaaaaaaaaaaaaaaaaaugcaucccccccccccccccccccccccccccccccaaaggcucuuuucagagccaccagaauu

SEQ ID NO: 12910 - RNA, 2002 nt, Artificial Sequence
  mRNA product Design b-4 comprising derived and/or modified sequence from HRSV(Memphis-37)__AIY60640.1__F-del_DSCav1 (opt4)
gggagagucccgcagucggcguccagcggcucugcuuguucgugugugugucguugcaggccuuauucaagcuuaccauggagcugcccauccugaagaccaacgccaucaccaccauccuggccgccgugacccugugcuucgccagcagccagaacaucaccgaggaguucuaccagagcaccugcagcgccgugagcaagggcuaccugagcgcccugagaaccggcugguacaccagcgugaucaccaucgagcugagcaacaucaaggagaacaagugcaacggcaccgacgccaaggugaagcugaucaagcaggagcuggacaaguacaagaacgccgugaccgagcugcagcugcugaugcagagcacccccgccgccaacaacagagccagaagagagcugcccagauucaugaacuacacccugaacaacaccaagaacaacaacgugacccugagcaagaagagaaagagaagauuccugggcuuccugcugggcgugggcagcgccaucgccagcggcaucgccgugugcaaggugcugcaccuggagggcgaggugaacaagaucaagaacgcccugcugagcaccaacaaggccguggugagccugagcaacggcgugagcgugcugaccuucaaggugcuggaccugaagaacuacaucgacaagcagcugcugcccauccugaacaagcagagcugcagcaucagcaacaucgagaccgugaucgaguuccagcagaagaacaacagacugcuggagaucaccagagaguucagcgugaacgccggcgugaccacccccgugagcaccuacaugcugaccaacagcgagcugcugagccugaucaacgacaugcccaucaccaacgaccagaagaagcugaugagcaacaacgugcagaucgugagacagcagagcuacagcaucaugugcaucaucaaggaggaggugcuggccuacguggugcagcugccccuguacggcgugaucgacacccccugcuggaagcugcacaccagcccccugugcaccaccaacaccaaggagggcagcaacaucugccugaccagaaccgacagaggcugguacugcgacaacgccggcagcgugagcuucuucccccaggccgagaccugcaaggugcagagcaacagaguguucugcgacaccaugaacagccugacccugcccagcgaggugaaccugugcaacaucgacaucuucaaccccaaguacgacugcaagaucaugaccagcaagaccgacgugagcagcagcgugaucaccagccugggcgccaucgugagcugcuacggcaagaccaagugcaccgccagcaacaagaacagaggcaucaucaagaccuucagcaacggcugcgacuacgugagcaacaagggcguggacaccgugagcgugggcaacacccuguacuacgugaacaagcaggagggcaagagccuguacgugaagggcgagcccaucaucaacuucuacgacccccugguguuccccagcgacgaguucgacgccagcaucagccaggugaacgagaagaucaaccagagccuggccuucaucagaaagagcgacgagcugcugcacaacgugaacgugggcaagagcaccaccaacaucaugaucaccaccaucaucaucgugaucaucgugauccugcugcugcugaucgccgugggccuguuccuguacugcaaggccagaugaggacuaguaauaaggaaacuguaugaaugucugugggcaggaagugaagagauccuucuguaaagguuuuuggaauuaugucugcugaauaauaaacuuuuuugaaauaauaaaucugguagaaaaaugagaucuaaaaaaaaaaaaaaaaaaaaaaaaaaaaaaaaaaaaaaaaaaaaaaaaaaaaaaaaaaaaaaaaugcaucccccccccccccccccccccccccccccccaaaggcucuuuucagagccaccagaauu

SEQ ID NO: 12911 - RNA, 2002 nt, Artificial Sequence
  mRNA product Design b-4 comprising derived and/or modified sequence from HRSV(Memphis-37)__AIY60640.1__F-del_DSCav1 (opt5)
gggagagucccgcagucggcguccagcggcucugcuuguucgugugugugucguugcaggccuuauucaagcuuaccauggagcugcccauccucaagaccaacgccauuacaacgauccuggcugccgugacccuuugcuucgcgagcucccagaauauuacagaagaguuuuaccaaucuaccuguagcgcugucuccaaaggcuaucugucugcccucagaacagggugguacaccagcguuaucacaauugaacuguccaacaucaaggagaauaaaugcaacggaaccgacgccaaggugaaacuuaucaagcaggaacuggauaaguauaaaaaugcugugacggagcuccagcugcugaugcagucuaccccugccgcuaacaaucgggcccgcagagagcucccgcgguucaugaacuacacacugaauaacaccaagaauaacaaugucacacuuagcaaaaagcgcaaaagacgguuucugggcuuccuccugggggugggauccgcgauugccagcggcaucgcuguuuguaaggugcuucaccuggaaggggaggucaacaagauuaaaaaugcccuccugucuaccaacaaggcugugguuucccugagcaacggagugucuguccucacguuuaaagugcuggaccuuaagaauuauaucgauaaacaacugcuccccauucugaacaagcaguccugcagcaucucuaauauugaaacagugaucgaguuccagcagaaaaacaaucgccuucuggagaucaccagagaauuuuccgucaacgccggcguuacaaccccugugagcaccuacaugcucacaaauuccgagcugcugucucucauuaacgacaugcccaucacgaaugaucaaaagaagcugaugagcaacaaugugcagauuguccggcagcaguccuauagcaucauguguauuaucaaagaagaggugcuugcguacguugugcaacugccucucuacggcgucaucgacacccccugcuggaagcugcauacaucuccucuuuguaccacaaacaccaaagaaggguccaauauuugccugacgcgcacagauagaggaugguauugugacaacgccggcagcgugucuuucuuuccgcaggcugagaccugcaagguucagagcaaucggguguucugugauaccaugaacucccucacacugcccucugaggucaaccugugcaauaucgacauuuuuaacccuaaauacgauugcaagaucaugaccagcaagacagacguguccagcucugucauuacgucccucggggccaucgugagcuguuauggaaaaaccaagugcacagcuucuaauaaaaaccgcggcaucauuaagaccuucuccaaugggugugauuacguuagcaacaaaggaguggacacagucuccgugggcaauacccuguauuacguuaacaagcaagaaggcaagucucuuuaugugaaaggggagcccaucauuaauuuuuacgacccucuggucuuccccagcgaugaguucgacgccuccaucucucaggugaacgaaaagauuaaucagagccucgccuuuaucagaaaauccgaugaacugcugcacaacgugaauguuggaaagagcacgaccaacauuaugaucacaaccaucauuaucgucauuaucgugauucuucuccugcugaucgcugugggccucuuccuguacugcaaagcgcggugaggacuaguaauaaggaaacuguaugaaugucugugggcaggaagugaagagauccuucuguaaagguuuuuggaauuaugucugcugaauaauaaacuuuuuugaaauaauaaaucugguagaaaaaugagaucuaaaaaaaaaaaaaaaaaaaaaaaaaaaaaaaaaaaaaaaaaaaaaaaaaaaaaaaaaaaaaaaaugcaucccccccccccccccccccccccccccccccaaaggcucuuuucagagccaccagaauu

SEQ ID NO: 12912 - RNA, 2002 nt, Artificial Sequence
  mRNA product Design b-4 comprising derived and/or modified sequence from HRSV(Memphis-37)__AIY60640.1__F-del_DSCav1 (opt6)
gggagagucccgcagucggcguccagcggcucugcuuguucgugugugugucguugcaggccuuauucaagcuuaccauggaauuaccaauccuuaaaacaaacgcaauaacaaccauccucgcagcaguaacucucugcuucgcuucaucucaaaacaucacagaagaauuuuaccaaagcacaugcucagcuguauccaaagguuaucuaucagccuugagaaccggaugguacacaucaguaauaacaauugaacuaucaaacauuaaagaaaacaaaugcaacggcaccgacgcaaaaguaaaacuaaucaaacaagaacuagacaaauauaaaaaugcaguaacagaauuacaauuauuaaugcaauccacaccagcugcaaacaaccgagcccgaagagaacuaccaagauucaugaacuacacacuaaacaacaccaaaaauaacaacgucacccuaucuaaaaaacguaaaagaagauucuuaggauuccucuuaggagucggauccgcaauagcaagcggcauagccguauguaaaguccuacacuuagaaggugaagugaauaaaauaaaaaacgcccuauuaagcacuaacaaagcaguagucucccuaucaaacggaguuucaguacucacauucaaaguacucgaccucaaaaacuacaucgacaaacaacuuuuaccaauucuaaacaaacaaucaugcuccauaucuaauaucgaaaccgucaucgaauuucaacaaaaaaacaauagacuacuagaaauaacuagagaauuuucaguaaacgccggcguuacgacaccagucucuacauacauguuaaccaauucagaacucuuaucauuaaucaacgacaugccaauaacaaacgaccaaaaaaaacuaauguccaauaacguacaaauagucagacaacaaucauacucaauuaugugcauaauaaaagaagaaguacuagcuuacguaguacaacucccccuauacggcguaauagacacuccauguuggaaauuacacacaucaccauuauguaccaccaauacaaaagaaggcucaaacauaugccuaacaagaacagauagaggaugguauugcgacaacgcaggcucaguuuccuuuuucccccaagcagaaaccugcaaaguacaaucaaaucguguuuuuugcgacaccaugaacucacucacauuaccaucagaaguaaaccuaugcaacauagacauauucaacccaaaauacgacugcaaaaucaugacaucaaaaacagacguauccucuucaguaauuacuagcuuaggagcaauagucucuuguuauggaaaaacaaaaugcacagccaguaacaaaaaccgcggaauaauaaaaaccuucucaaacgguugcgauuacgucucuaacaaaggagucgacacaguaucaguaggcaauacauuauacuacguuaacaaacaagaaggaaaaucuuuauacgucaaaggagaacccauuauaaacuuuuacgacccauuagucuucccuuccgacgaauuugacgccagcauuucacaaguaaacgaaaaaauaaaccaaucacucgcauuuauaagaaaaucugacgaauuacuccacaacguaaacguaggaaaauccacaacaaacauaaugauaacaaccauaaucaucgucauaauagucauacuucuccuauuaauugcaguaggcuuauuccuauacuguaaagcacgauaaggacuaguaauaaggaaacuguaugaaugucugugggcaggaagugaagagauccuucuguaaagguuuuuggaauuaugucugcugaauaauaaacuuuuuugaaauaauaaaucugguagaaaaaugagaucuaaaaaaaaaaaaaaaaaaaaaaaaaaaaaaaaaaaaaaaaaaaaaaaaaaaaaaaaaaaaaaaaugcaucccccccccccccccccccccccccccccccaaaggcucuuuucagagccaccagaauu

SEQ ID NO: 12913 - RNA, 2002 nt, Artificial Sequence
  mRNA product Design b-4 comprising derived and/or modified sequence from HRSV(Memphis-37)__AIY60640.1__F-del_DSCav1 (opt11)
gggagagucccgcagucggcguccagcggcucugcuuguucgugugugugucguugcaggccuuauucaagcuuaccauggaacuaccaauccuaaaaacuaacgcaaucaccacaauccucgccgccgucacccuuugcuuugcguccucccaaaacauuacugaagaguucuaccaauccacgugcuccgccgucuccaaagguuaccuauccgcccuuaggaccggcugguacaccagcgucaucaccaucgaacuuuccaacaucaaagaaaacaaauguaacggcaccgacgcaaaagucaaacuuauuaaacaggaacucgacaaauauaagaaugccgucaccgaauuacaacuccucaugcaauccacccccgccgccaacaaccgagcaaggcgcgaacucccucgauucaugaauuacacccucaacaauaccaaaaacaacaacgucacccuauccaagaaacgcaaaagacgcuucuugggcuuccuccucggcgugggcuccgcaauagccuccgguauugccgugugcaaagucuuacaccucgaaggcgaggucaacaaaaucaaaaacgcccuccucuccaccaacaaagccgucgucagccuauccaacggcguuuccguccucaccuucaaaguacucgaccucaaaaacuacaucgacaaacaacuccuacccauacuaaacaaacaauccugcuccauuuccaacaucgaaaccguaaucgaguuccaacagaaaaacaaucgccuccuagaaaucacacgugaauuuucaguuaacgccggaguaacaacuccuguaucuaccuacaugcucaccaauuccgaacuccucagccucauaaacgacaugccaauaacaaacgaccaaaagaaacucaugucuaacaacguacaaaucgucagacaacaaaguuacucaaucauguguaucaucaaagaggaaguccuagcauacgugguccaacucccccucuacggaguaaucgacaccccaugcuggaaacuacacaccagcccccucuguaccacaaacacgaaagaagguuccaacaucugccugacccgaaccgaccgcggcugguacugcgauaacgcuggcuccgucucauucuucccccaagcagaaaccugcaaaguacaauccaaccgaguauucugcgacaccaugaacucacucacccuccccagcgaaguaaaccucugcaacaucgacauauucaacccaaaauacgacugcaaaauuaugaccucuaaaacagacguauccuccucuguaaucacaucccucggggccaucgucuccugcuacggcaaaaccaaaugcaccgccuccaacaaaaaccgcggaaucauaaaaaccuucuccaacggaugcgacuacgucucaaauaaaggcgucgacaccgucuccgucggcaacacgcuauacuacgucaacaaacaagaaggcaaaucacucuacgucaaaggugagcccaucaucaauuucuacgauccccucgucuucccaagcgacgaguucgacgccagcauaucccaaguaaacgagaaaaucaaccaaagccuggccuucauccgcaaauccgacgaacuacuacacaacguaaacguaggcaaguccacuaccaacauaaugaucaccacaaucaucauagucauaaucguuauacuacuccugcucaucgccguaggccucuuccucuauugcaaagcccgauagggacuaguaauaaggaaacuguaugaaugucugugggcaggaagugaagagauccuucuguaaagguuuuuggaauuaugucugcugaauaauaaacuuuuuugaaauaauaaaucugguagaaaaaugagaucuaaaaaaaaaaaaaaaaaaaaaaaaaaaaaaaaaaaaaaaaaaaaaaaaaaaaaaaaaaaaaaaaugcaucccccccccccccccccccccccccccccccaaaggcucuuuucagagccaccagaauu

SEQ ID NO: 12914 - RNA, 2064 nt, Artificial Sequence
  mRNA product Design b-5 comprising derived and/or modified sequence from HRSV(Memphis-37)__AIY60640.1__F-del_DSCav1 (opt1)
gggagacuccugucgggcggaaguaggaggaguagaguuuaaaaacaguacucuuuuuccgguucgggacguaguugaagcaacgacaagccggauaaccgcucuugagacaggaagcuuaccauggagcugcccauccucaagaccaacgccaucaccacgauccuggccgcggugacccugugcuucgccagcucccagaacaucaccgaggaguucuaccagagcacgugcuccgccgucagcaagggcuaccucuccgcccugcgcaccgggugguacaccagcgugaucaccaucgagcuguccaacaucaaggagaacaagugcaacggcaccgacgccaaggugaagcucaucaagcaggagcuggacaaguacaagaacgcggucacggagcugcagcuccugaugcagagcaccccggccgccaacaaccgggcccgccgggagcugccccgcuucaugaacuacacccucaacaacaccaagaacaacaacgugacgcuguccaagaagcggaagcgccgguuccugggguuccuccugggcguggggagcgcgaucgccuccggcaucgccgucugcaaggugcugcaccucgagggcgaggugaacaagaucaagaacgcccugcuguccaccaacaaggccgucgugagccucuccaacggggugagcguccugaccuucaaggugcuggaccucaagaacuacaucgacaagcagcugcugcccauccugaacaagcagagcugcuccaucagcaacaucgagaccgucaucgaguuccagcagaagaacaaccgccuccuggagaucacgcgggaguucagcgugaacgcgggcgugaccacccccgucuccaccuacaugcugacgaacagcgagcuccugucccugaucaacgacaugccgaucaccaacgaccagaagaagcucaugagcaacaacgugcagaucgugcgccagcaguccuacagcaucaugugcaucaucaaggaggagguccuggccuacguggugcagcugccccucuacggggucaucgacacccccugcuggaagcugcacaccagcccccugugcacgaccaacaccaaggagggcuccaacaucugccucacccggacggaccgcgggugguacugcgacaacgccggcagcguguccuucuucccgcaggccgagaccugcaagguccagagcaaccggguguucugcgacaccaugaacucccugacccugcccagcgaggugaaccucugcaacaucgacaucuucaaccccaaguacgacugcaagaucaugacguccaagaccgacgucagcuccagcgugaucaccucccugggcgccaucgugagcugcuacgggaagaccaagugcacggcgagcaacaagaaccgcggcaucaucaagaccuucuccaacgggugcgacuacgucagcaacaagggcguggacaccguguccgucggcaacacccuguacuacgugaacaagcaggagggcaagagccucuacgugaagggggagcccaucaucaacuucuacgacccgcuggucuuccccuccgacgaguucgacgccagcaucucccaggugaacgagaagaucaaccagagccuggccuucauccggaaguccgacgagcuccugcacaacgugaacgucggcaagagcaccacgaacaucaugaucaccaccaucaucaucgugaucaucgugauccugcugcuccugaucgccgucgggcuguuccucuacugcaaggcccgcugaggacuaguacuggcugcaucucccuuuccucuguccuccauccuucucccaggauggugaagggggaccugguacccagugauccccaccccaggauccuaaaucaugacuuaccugcuaauaaaaacucauuggaaaagugagaagaucuaaaaaaaaaaaaaaaaaaaaaaaaaaaaaaaaaaaaaaaaaaaaaaaaaaaaaaaaaaaaaaaaugcaucccccccccccccccccccccccccccccccaaaggcucuuuucagagccaccagaauu

SEQ ID NO: 12915 - RNA, 2064 nt, Artificial Sequence
  mRNA product Design b-5 comprising derived and/or modified sequence from HRSV(Memphis-37)__AIY60640.1__F-del_DSCav1 (opt1)
gggagacuccugucgggcggaaguaggaggaguagaguuuaaaaacaguacucuuuuuccgguucgggacguaguugaagcaacgacaagccggauaaccgcucuugagacaggaagcuuaccauggagcugcccauccucaagaccaacgccaucaccacgauccuggccgcggugacccugugcuucgccagcucccagaacaucaccgaggaguucuaccagagcacgugcuccgccgucagcaagggcuaccucuccgcccugcgcaccgggugguacaccagcgugaucaccaucgagcuguccaacaucaaggagaacaagugcaacggcaccgacgccaaggugaagcucaucaagcaggagcuggacaaguacaagaacgcggucacggagcugcagcuccugaugcagagcaccccggccgccaacaaccgggcccgccgggagcugccccgcuucaugaacuacacccucaacaacaccaagaacaacaacgugacgcuguccaagaagcggaagcgccgguuccugggguuccuccugggcguggggagcgcgaucgccuccggcaucgccgucugcaaggugcugcaccucgagggcgaggugaacaagaucaagaacgcccugcugagcaccaacaaggccgucgugucccucagcaacgggguguccguccugaccuucaaggugcuggaccucaagaacuacaucgacaagcagcugcugcccauccucaacaagcagagcugcuccaucagcaacaucgagaccgugaucgaguuccagcagaagaacaaccgccugcuggagaucacgcgggaguucuccgucaacgcgggcgugaccacccccgugagcaccuacaugcucacgaacagcgagcugcugucccucaucaacgacaugccgaucaccaacgaccagaagaagcugaugagcaacaacguccagaucgugcgccagcaguccuacagcaucaugugcaucaucaaggaggaggugcuggccuacgucgugcagcucccccuguacggggugaucgacacccccugcuggaagcugcacaccagcccccucugcacgaccaacaccaaggagggcagcaacaucugccugacccggacggaccgcgggugguacugcgacaacgccggcuccgucagcuucuucccgcaggccgagaccugcaaggugcaguccaaccgggucuucugcgacaccaugaacagccugacccuccccuccgaggugaaccugugcaacaucgacaucuucaaccccaaguacgacugcaagaucaugacgagcaagaccgacguguccagcuccgucaucaccagccugggcgccaucguguccugcuacgggaagaccaagugcacggcgagcaacaagaaccgcggcaucaucaagaccuucuccaacgggugcgacuacgugagcaacaagggcgucgacaccgugagcgugggcaacacccucuacuacgucaacaagcaggaggggaagucccuguacgugaagggcgagcccaucaucaacuucuacgacccgcugguguuccccagcgacgaguucgacgccuccaucagccaggucaacgagaagaucaaccagucccucgccuucauccggaaguccgacgagcugcugcacaacgugaacguggggaaguccaccacgaacaucaugaucaccaccaucaucaucgucaucaucgugauccugcuccugcugaucgccgugggccucuuccuguacugcaaggcccgcugaggacuaguacuggcugcaucucccuuuccucuguccuccauccuucucccaggauggugaagggggaccugguacccagugauccccaccccaggauccuaaaucaugacuuaccugcuaauaaaaacucauuggaaaagugagaagaucuaaaaaaaaaaaaaaaaaaaaaaaaaaaaaaaaaaaaaaaaaaaaaaaaaaaaaaaaaaaaaaaaugcaucccccccccccccccccccccccccccccccaaaggcucuuuucagagccaccagaauu

SEQ ID NO: 12916 - RNA, 2064 nt, Artificial Sequence
  mRNA product Design b-5 comprising derived and/or modified sequence from HRSV(Memphis-37)__AIY60640.1__F-del_DSCav1 (opt2)
gggagacuccugucgggcggaaguaggaggaguagaguuuaaaaacaguacucuuuuuccgguucgggacguaguugaagcaacgacaagccggauaaccgcucuugagacaggaagcuuaccauggagcuccccauccucaagaccaacgccaucaccaccauccucgccgccgucacccucugcuucgccuccucccagaacaucaccgaggaguucuaccaguccaccugcuccgccgucuccaagggcuaccucuccgcccuccgcaccggcugguacaccuccgucaucaccaucgagcucuccaacaucaaggagaacaagugcaacggcaccgacgccaaggucaagcucaucaagcaggagcucgacaaguacaagaacgccgucaccgagcuccagcuccucaugcaguccacccccgccgccaacaaccgcgcccgccgcgagcucccccgcuucaugaacuacacccucaacaacaccaagaacaacaacgucacccucuccaagaagcgcaagcgccgcuuccucggcuuccuccucggcgucggcuccgccaucgccuccggcaucgccgucugcaagguccuccaccucgagggcgaggucaacaagaucaagaacgcccuccucuccaccaacaaggccgucgucucccucuccaacggcgucuccguccucaccuucaagguccucgaccucaagaacuacaucgacaagcagcuccuccccauccucaacaagcaguccugcuccaucuccaacaucgagaccgucaucgaguuccagcagaagaacaaccgccuccucgagaucacccgcgaguucuccgucaacgccggcgucaccacccccgucuccaccuacaugcucaccaacuccgagcuccucucccucaucaacgacaugcccaucaccaacgaccagaagaagcucauguccaacaacguccagaucguccgccagcaguccuacuccaucaugugcaucaucaaggaggagguccucgccuacgucguccagcucccccucuacggcgucaucgacacccccugcuggaagcuccacaccuccccccucugcaccaccaacaccaaggagggcuccaacaucugccucacccgcaccgaccgcggcugguacugcgacaacgccggcuccgucuccuucuucccccaggccgagaccugcaagguccaguccaaccgcgucuucugcgacaccaugaacucccucacccuccccuccgaggucaaccucugcaacaucgacaucuucaaccccaaguacgacugcaagaucaugaccuccaagaccgacgucuccuccuccgucaucaccucccucggcgccaucgucuccugcuacggcaagaccaagugcaccgccuccaacaagaaccgcggcaucaucaagaccuucuccaacggcugcgacuacgucuccaacaagggcgucgacaccgucuccgucggcaacacccucuacuacgucaacaagcaggagggcaagucccucuacgucaagggcgagcccaucaucaacuucuacgacccccucgucuuccccuccgacgaguucgacgccuccaucucccaggucaacgagaagaucaaccagucccucgccuucauccgcaaguccgacgagcuccuccacaacgucaacgucggcaaguccaccaccaacaucaugaucaccaccaucaucaucgucaucaucgucauccuccuccuccucaucgccgucggccucuuccucuacugcaaggcccgcugaggacuaguacuggcugcaucucccuuuccucuguccuccauccuucucccaggauggugaagggggaccugguacccagugauccccaccccaggauccuaaaucaugacuuaccugcuaauaaaaacucauuggaaaagugagaagaucuaaaaaaaaaaaaaaaaaaaaaaaaaaaaaaaaaaaaaaaaaaaaaaaaaaaaaaaaaaaaaaaaugcaucccccccccccccccccccccccccccccccaaaggcucuuuucagagccaccagaauu

SEQ ID NO: 12917 - RNA, 2064 nt, Artificial Sequence
  mRNA product Design b-5 comprising derived and/or modified sequence from HRSV(Memphis-37)__AIY60640.1__F-del_DSCav1 (opt3)
gggagacuccugucgggcggaaguaggaggaguagaguuuaaaaacaguacucuuuuuccgguucgggacguaguugaagcaacgacaagccggauaaccgcucuugagacaggaagcuuaccauggagcugcccauccucaagaccaacgccauuacaacuauacuugcugcagugacgcugugcuucgccagcucccagaauaucaccgaagaguuuuaccaaucuacauguucagcggucaguaaaggcuauuugagcgcuuuaagaacugggugguacaccuccguuauuacaaucgaacugucuaacauuaaggagaauaaaugcaacggaaccgacgccaaggugaaacuaaucaagcaggaacucgauaaguauaaaaaugcaguaacugagcugcagcuucugaugcagucgaccccugccgcuaacaauagggcacggcgcgaguugccacgauucaugaacuacacacucaauaacacgaagaauaacaaugugacucugagcaaaaagcguaaaagaagguuucuggguuuccucuuaggcgucgggucagccauagcuaguggaaucgccguguguaagguucugcaccuugaaggcgaggugaacaagauuaaaaaugcguugcuguccaccaacaaggcagucgugucucuaagcaacgguguauccguucucacauuuaaagugcuggaccuuaagaauuauaucgauaaacaacuguugccgauucucaacaagcagucaugcaguaucagcaauauagaaacugucauugaguuccagcagaaaaacaaucggcuguuagagaucacccgcgaauuuucugugaacgccggggugacaacccccgucuccacguacaugcugacuaauucagagcuccuuagccugauuaacgacaugccuaucacaaaugaucaaaagaaguugaugaguaacaauguucagaucgugagacagcagucuuauuccauuauguguauaaucaaagaagagguacuagcuuacgugguccaacugccacucuacggagugauugacacccccugcuggaagcugcauacuagcccucuuuguacaaccaacacgaaagaaggcucgaauaucugccugaccaggacagaucggggcugguauugugacaacgccgggucuguuuccuucuuuccacaggcagagacuugcaaggugcagucaaaucgcgucuucugugauaccaugaacaguuugacacuccccagcgaggugaaccugugcaauauagacauuuuuaacccuaaauacgauugcaagaucaugacuuccaagaccgacguaucuagcucaguuaucacaaguuuaggagcuauuguguccuguuaugguaaaaccaagugcacugccagcaauaaaaaccgaggcaucauuaagacguucucuaaugggugugauuacgucucaaacaaaggaguggacacagucagugugggcaauacccuguauuacguuaacaagcaagaagguaagagccuauaugugaaaggggagccaauaaucaauuuuuacgacccgcucguauuccccuccgaugaguucgacgcgucuauuucgcaggucaacgaaaagaucaaucagagccuggccuuuaucagaaaauccgaugaacuuuugcacaacgugaauguuggaaagucaacuaccaacauuaugauaacaaccaucauuaucgugauuaucgucauacugcuccugcuuaucgcagugggccuguucuuguacugcaaagcuaggugaggacuaguacuggcugcaucucccuuuccucuguccuccauccuucucccaggauggugaagggggaccugguacccagugauccccaccccaggauccuaaaucaugacuuaccugcuaauaaaaacucauuggaaaagugagaagaucuaaaaaaaaaaaaaaaaaaaaaaaaaaaaaaaaaaaaaaaaaaaaaaaaaaaaaaaaaaaaaaaaugcaucccccccccccccccccccccccccccccccaaaggcucuuuucagagccaccagaauu

SEQ ID NO: 12918 - RNA, 2064 nt, Artificial Sequence
  mRNA product Design b-5 comprising derived and/or modified sequence from HRSV(Memphis-37)__AIY60640.1__F-del_DSCav1 (opt4)
gggagacuccugucgggcggaaguaggaggaguagaguuuaaaaacaguacucuuuuuccgguucgggacguaguugaagcaacgacaagccggauaaccgcucuugagacaggaagcuuaccauggagcugcccauccugaagaccaacgccaucaccaccauccuggccgccgugacccugugcuucgccagcagccagaacaucaccgaggaguucuaccagagcaccugcagcgccgugagcaagggcuaccugagcgcccugagaaccggcugguacaccagcgugaucaccaucgagcugagcaacaucaaggagaacaagugcaacggcaccgacgccaaggugaagcugaucaagcaggagcuggacaaguacaagaacgccgugaccgagcugcagcugcugaugcagagcacccccgccgccaacaacagagccagaagagagcugcccagauucaugaacuacacccugaacaacaccaagaacaacaacgugacccugagcaagaagagaaagagaagauuccugggcuuccugcugggcgugggcagcgccaucgccagcggcaucgccgugugcaaggugcugcaccuggagggcgaggugaacaagaucaagaacgcccugcugagcaccaacaaggccguggugagccugagcaacggcgugagcgugcugaccuucaaggugcuggaccugaagaacuacaucgacaagcagcugcugcccauccugaacaagcagagcugcagcaucagcaacaucgagaccgugaucgaguuccagcagaagaacaacagacugcuggagaucaccagagaguucagcgugaacgccggcgugaccacccccgugagcaccuacaugcugaccaacagcgagcugcugagccugaucaacgacaugcccaucaccaacgaccagaagaagcugaugagcaacaacgugcagaucgugagacagcagagcuacagcaucaugugcaucaucaaggaggaggugcuggccuacguggugcagcugccccuguacggcgugaucgacacccccugcuggaagcugcacaccagcccccugugcaccaccaacaccaaggagggcagcaacaucugccugaccagaaccgacagaggcugguacugcgacaacgccggcagcgugagcuucuucccccaggccgagaccugcaaggugcagagcaacagaguguucugcgacaccaugaacagccugacccugcccagcgaggugaaccugugcaacaucgacaucuucaaccccaaguacgacugcaagaucaugaccagcaagaccgacgugagcagcagcgugaucaccagccugggcgccaucgugagcugcuacggcaagaccaagugcaccgccagcaacaagaacagaggcaucaucaagaccuucagcaacggcugcgacuacgugagcaacaagggcguggacaccgugagcgugggcaacacccuguacuacgugaacaagcaggagggcaagagccuguacgugaagggcgagcccaucaucaacuucuacgacccccugguguuccccagcgacgaguucgacgccagcaucagccaggugaacgagaagaucaaccagagccuggccuucaucagaaagagcgacgagcugcugcacaacgugaacgugggcaagagcaccaccaacaucaugaucaccaccaucaucaucgugaucaucgugauccugcugcugcugaucgccgugggccuguuccuguacugcaaggccagaugaggacuaguacuggcugcaucucccuuuccucuguccuccauccuucucccaggauggugaagggggaccugguacccagugauccccaccccaggauccuaaaucaugacuuaccugcuaauaaaaacucauuggaaaagugagaagaucuaaaaaaaaaaaaaaaaaaaaaaaaaaaaaaaaaaaaaaaaaaaaaaaaaaaaaaaaaaaaaaaaugcaucccccccccccccccccccccccccccccccaaaggcucuuuucagagccaccagaauu

SEQ ID NO: 12919 - RNA, 2064 nt, Artificial Sequence
  mRNA product Design b-5 comprising derived and/or modified sequence from HRSV(Memphis-37)__AIY60640.1__F-del_DSCav1 (opt5)
gggagacuccugucgggcggaaguaggaggaguagaguuuaaaaacaguacucuuuuuccgguucgggacguaguugaagcaacgacaagccggauaaccgcucuugagacaggaagcuuaccauggagcugcccauccucaagaccaacgccauuacaacgauccuggcugccgugacccuuugcuucgcgagcucccagaauauuacagaagaguuuuaccaaucuaccuguagcgcugucuccaaaggcuaucugucugcccucagaacagggugguacaccagcguuaucacaauugaacuguccaacaucaaggagaauaaaugcaacggaaccgacgccaaggugaaacuuaucaagcaggaacuggauaaguauaaaaaugcugugacggagcuccagcugcugaugcagucuaccccugccgcuaacaaucgggcccgcagagagcucccgcgguucaugaacuacacacugaauaacaccaagaauaacaaugucacacuuagcaaaaagcgcaaaagacgguuucugggcuuccuccugggggugggauccgcgauugccagcggcaucgcuguuuguaaggugcuucaccuggaaggggaggucaacaagauuaaaaaugcccuccugucuaccaacaaggcugugguuucccugagcaacggagugucuguccucacguuuaaagugcuggaccuuaagaauuauaucgauaaacaacugcuccccauucugaacaagcaguccugcagcaucucuaauauugaaacagugaucgaguuccagcagaaaaacaaucgccuucuggagaucaccagagaauuuuccgucaacgccggcguuacaaccccugugagcaccuacaugcucacaaauuccgagcugcugucucucauuaacgacaugcccaucacgaaugaucaaaagaagcugaugagcaacaaugugcagauuguccggcagcaguccuauagcaucauguguauuaucaaagaagaggugcuugcguacguugugcaacugccucucuacggcgucaucgacacccccugcuggaagcugcauacaucuccucuuuguaccacaaacaccaaagaaggguccaauauuugccugacgcgcacagauagaggaugguauugugacaacgccggcagcgugucuuucuuuccgcaggcugagaccugcaagguucagagcaaucggguguucugugauaccaugaacucccucacacugcccucugaggucaaccugugcaauaucgacauuuuuaacccuaaauacgauugcaagaucaugaccagcaagacagacguguccagcucugucauuacgucccucggggccaucgugagcuguuauggaaaaaccaagugcacagcuucuaauaaaaaccgcggcaucauuaagaccuucuccaaugggugugauuacguuagcaacaaaggaguggacacagucuccgugggcaauacccuguauuacguuaacaagcaagaaggcaagucucuuuaugugaaaggggagcccaucauuaauuuuuacgacccucuggucuuccccagcgaugaguucgacgccuccaucucucaggugaacgaaaagauuaaucagagccucgccuuuaucagaaaauccgaugaacugcugcacaacgugaauguuggaaagagcacgaccaacauuaugaucacaaccaucauuaucgucauuaucgugauucuucuccugcugaucgcugugggccucuuccuguacugcaaagcgcggugaggacuaguacuggcugcaucucccuuuccucuguccuccauccuucucccaggauggugaagggggaccugguacccagugauccccaccccaggauccuaaaucaugacuuaccugcuaauaaaaacucauuggaaaagugagaagaucuaaaaaaaaaaaaaaaaaaaaaaaaaaaaaaaaaaaaaaaaaaaaaaaaaaaaaaaaaaaaaaaaugcaucccccccccccccccccccccccccccccccaaaggcucuuuucagagccaccagaauu

SEQ ID NO: 12920 - RNA, 2064 nt, Artificial Sequence
  mRNA product Design b-5 comprising derived and/or modified sequence from HRSV(Memphis-37)__AIY60640.1__F-del_DSCav1 (opt6)
gggagacuccugucgggcggaaguaggaggaguagaguuuaaaaacaguacucuuuuuccgguucgggacguaguugaagcaacgacaagccggauaaccgcucuugagacaggaagcuuaccauggaauuaccaauccuuaaaacaaacgcaauaacaaccauccucgcagcaguaacucucugcuucgcuucaucucaaaacaucacagaagaauuuuaccaaagcacaugcucagcuguauccaaagguuaucuaucagccuugagaaccggaugguacacaucaguaauaacaauugaacuaucaaacauuaaagaaaacaaaugcaacggcaccgacgcaaaaguaaaacuaaucaaacaagaacuagacaaauauaaaaaugcaguaacagaauuacaauuauuaaugcaauccacaccagcugcaaacaaccgagcccgaagagaacuaccaagauucaugaacuacacacuaaacaacaccaaaaauaacaacgucacccuaucuaaaaaacguaaaagaagauucuuaggauuccucuuaggagucggauccgcaauagcaagcggcauagccguauguaaaguccuacacuuagaaggugaagugaauaaaauaaaaaacgcccuauuaagcacuaacaaagcaguagucucccuaucaaacggaguuucaguacucacauucaaaguacucgaccucaaaaacuacaucgacaaacaacuuuuaccaauucuaaacaaacaaucaugcuccauaucuaauaucgaaaccgucaucgaauuucaacaaaaaaacaauagacuacuagaaauaacuagagaauuuucaguaaacgccggcguuacgacaccagucucuacauacauguuaaccaauucagaacucuuaucauuaaucaacgacaugccaauaacaaacgaccaaaaaaaacuaauguccaauaacguacaaauagucagacaacaaucauacucaauuaugugcauaauaaaagaagaaguacuagcuuacguaguacaacucccccuauacggcguaauagacacuccauguuggaaauuacacacaucaccauuauguaccaccaauacaaaagaaggcucaaacauaugccuaacaagaacagauagaggaugguauugcgacaacgcaggcucaguuuccuuuuucccccaagcagaaaccugcaaaguacaaucaaaucguguuuuuugcgacaccaugaacucacucacauuaccaucagaaguaaaccuaugcaacauagacauauucaacccaaaauacgacugcaaaaucaugacaucaaaaacagacguauccucuucaguaauuacuagcuuaggagcaauagucucuuguuauggaaaaacaaaaugcacagccaguaacaaaaaccgcggaauaauaaaaaccuucucaaacgguugcgauuacgucucuaacaaaggagucgacacaguaucaguaggcaauacauuauacuacguuaacaaacaagaaggaaaaucuuuauacgucaaaggagaacccauuauaaacuuuuacgacccauuagucuucccuuccgacgaauuugacgccagcauuucacaaguaaacgaaaaaauaaaccaaucacucgcauuuauaagaaaaucugacgaauuacuccacaacguaaacguaggaaaauccacaacaaacauaaugauaacaaccauaaucaucgucauaauagucauacuucuccuauuaauugcaguaggcuuauuccuauacuguaaagcacgauaaggacuaguacuggcugcaucucccuuuccucuguccuccauccuucucccaggauggugaagggggaccugguacccagugauccccaccccaggauccuaaaucaugacuuaccugcuaauaaaaacucauuggaaaagugagaagaucuaaaaaaaaaaaaaaaaaaaaaaaaaaaaaaaaaaaaaaaaaaaaaaaaaaaaaaaaaaaaaaaaugcaucccccccccccccccccccccccccccccccaaaggcucuuuucagagccaccagaauu

SEQ ID NO: 12921 - RNA, 2064 nt, Artificial Sequence
  mRNA product Design b-5 comprising derived and/or modified sequence from HRSV(Memphis-37)__AIY60640.1__F-del_DSCav1 (opt11)
gggagacuccugucgggcggaaguaggaggaguagaguuuaaaaacaguacucuuuuuccgguucgggacguaguugaagcaacgacaagccggauaaccgcucuugagacaggaagcuuaccauggaacuaccaauccuaaaaacuaacgcaaucaccacaauccucgccgccgucacccuuugcuuugcguccucccaaaacauuacugaagaguucuaccaauccacgugcuccgccgucuccaaagguuaccuauccgcccuuaggaccggcugguacaccagcgucaucaccaucgaacuuuccaacaucaaagaaaacaaauguaacggcaccgacgcaaaagucaaacuuauuaaacaggaacucgacaaauauaagaaugccgucaccgaauuacaacuccucaugcaauccacccccgccgccaacaaccgagcaaggcgcgaacucccucgauucaugaauuacacccucaacaauaccaaaaacaacaacgucacccuauccaagaaacgcaaaagacgcuucuugggcuuccuccucggcgugggcuccgcaauagccuccgguauugccgugugcaaagucuuacaccucgaaggcgaggucaacaaaaucaaaaacgcccuccucuccaccaacaaagccgucgucagccuauccaacggcguuuccguccucaccuucaaaguacucgaccucaaaaacuacaucgacaaacaacuccuacccauacuaaacaaacaauccugcuccauuuccaacaucgaaaccguaaucgaguuccaacagaaaaacaaucgccuccuagaaaucacacgugaauuuucaguuaacgccggaguaacaacuccuguaucuaccuacaugcucaccaauuccgaacuccucagccucauaaacgacaugccaauaacaaacgaccaaaagaaacucaugucuaacaacguacaaaucgucagacaacaaaguuacucaaucauguguaucaucaaagaggaaguccuagcauacgugguccaacucccccucuacggaguaaucgacaccccaugcuggaaacuacacaccagcccccucuguaccacaaacacgaaagaagguuccaacaucugccugacccgaaccgaccgcggcugguacugcgauaacgcuggcuccgucucauucuucccccaagcagaaaccugcaaaguacaauccaaccgaguauucugcgacaccaugaacucacucacccuccccagcgaaguaaaccucugcaacaucgacauauucaacccaaaauacgacugcaaaauuaugaccucuaaaacagacguauccuccucuguaaucacaucccucggggccaucgucuccugcuacggcaaaaccaaaugcaccgccuccaacaaaaaccgcggaaucauaaaaaccuucuccaacggaugcgacuacgucucaaauaaaggcgucgacaccgucuccgucggcaacacgcuauacuacgucaacaaacaagaaggcaaaucacucuacgucaaaggugagcccaucaucaauuucuacgauccccucgucuucccaagcgacgaguucgacgccagcauaucccaaguaaacgagaaaaucaaccaaagccuggccuucauccgcaaauccgacgaacuacuacacaacguaaacguaggcaaguccacuaccaacauaaugaucaccacaaucaucauagucauaaucguuauacuacuccugcucaucgccguaggccucuuccucuauugcaaagcccgauagggacuaguacuggcugcaucucccuuuccucuguccuccauccuucucccaggauggugaagggggaccugguacccagugauccccaccccaggauccuaaaucaugacuuaccugcuaauaaaaacucauuggaaaagugagaagaucuaaaaaaaaaaaaaaaaaaaaaaaaaaaaaaaaaaaaaaaaaaaaaaaaaaaaaaaaaaaaaaaaugcaucccccccccccccccccccccccccccccccaaaggcucuuuucagagccaccagaauu

SEQ ID NO: 12922 - RNA, 1970 nt, Artificial Sequence
  mRNA product Design c-1 comprising derived and/or modified sequence from HRSV(Memphis-37)__AIY60640.1__F-del_DSCav1 (opt1)
gggagaguccgcucagccagguugcagaagcggcuuagcguguguccuaaucuucucucugcguguagguaggccugugccgcaaacaagcuuaccauggagcugcccauccucaagaccaacgccaucaccacgauccuggccgcggugacccugugcuucgccagcucccagaacaucaccgaggaguucuaccagagcacgugcuccgccgucagcaagggcuaccucuccgcccugcgcaccgggugguacaccagcgugaucaccaucgagcuguccaacaucaaggagaacaagugcaacggcaccgacgccaaggugaagcucaucaagcaggagcuggacaaguacaagaacgcggucacggagcugcagcuccugaugcagagcaccccggccgccaacaaccgggcccgccgggagcugccccgcuucaugaacuacacccucaacaacaccaagaacaacaacgugacgcuguccaagaagcggaagcgccgguuccugggguuccuccugggcguggggagcgcgaucgccuccggcaucgccgucugcaaggugcugcaccucgagggcgaggugaacaagaucaagaacgcccugcuguccaccaacaaggccgucgugagccucuccaacggggugagcguccugaccuucaaggugcuggaccucaagaacuacaucgacaagcagcugcugcccauccugaacaagcagagcugcuccaucagcaacaucgagaccgucaucgaguuccagcagaagaacaaccgccuccuggagaucacgcgggaguucagcgugaacgcgggcgugaccacccccgucuccaccuacaugcugacgaacagcgagcuccugucccugaucaacgacaugccgaucaccaacgaccagaagaagcucaugagcaacaacgugcagaucgugcgccagcaguccuacagcaucaugugcaucaucaaggaggagguccuggccuacguggugcagcugccccucuacggggucaucgacacccccugcuggaagcugcacaccagcccccugugcacgaccaacaccaaggagggcuccaacaucugccucacccggacggaccgcgggugguacugcgacaacgccggcagcguguccuucuucccgcaggccgagaccugcaagguccagagcaaccggguguucugcgacaccaugaacucccugacccugcccagcgaggugaaccucugcaacaucgacaucuucaaccccaaguacgacugcaagaucaugacguccaagaccgacgucagcuccagcgugaucaccucccugggcgccaucgugagcugcuacgggaagaccaagugcacggcgagcaacaagaaccgcggcaucaucaagaccuucuccaacgggugcgacuacgucagcaacaagggcguggacaccguguccgucggcaacacccuguacuacgugaacaagcaggagggcaagagccucuacgugaagggggagcccaucaucaacuucuacgacccgcuggucuuccccuccgacgaguucgacgccagcaucucccaggugaacgagaagaucaaccagagccuggccuucauccggaaguccgacgagcuccugcacaacgugaacgucggcaagagcaccacgaacaucaugaucaccaccaucaucaucgugaucaucgugauccugcugcuccugaucgccgucgggcuguuccucuacugcaaggcccgcugaggacuaguguccaccugucccuccugggcugcuggauugucucguuuuccugccaaauaaacaggaucagcgcuuuacagaucuaaaaaaaaaaaaaaaaaaaaaaaaaaaaaaaaaaaaaaaaaaaaaaaaaaaaaaaaaaaaaaaaugcaucccccccccccccccccccccccccccccccaaaggcucuuuucagagccaccagaauu

SEQ ID NO: 12923 - RNA, 1970 nt, Artificial Sequence
  mRNA product Design c-1 comprising derived and/or modified sequence from HRSV(Memphis-37)__AIY60640.1__F-del_DSCav1 (opt1)
gggagaguccgcucagccagguugcagaagcggcuuagcguguguccuaaucuucucucugcguguagguaggccugugccgcaaacaagcuuaccauggagcugcccauccucaagaccaacgccaucaccacgauccuggccgcggugacccugugcuucgccagcucccagaacaucaccgaggaguucuaccagagcacgugcuccgccgucagcaagggcuaccucuccgcccugcgcaccgggugguacaccagcgugaucaccaucgagcuguccaacaucaaggagaacaagugcaacggcaccgacgccaaggugaagcucaucaagcaggagcuggacaaguacaagaacgcggucacggagcugcagcuccugaugcagagcaccccggccgccaacaaccgggcccgccgggagcugccccgcuucaugaacuacacccucaacaacaccaagaacaacaacgugacgcuguccaagaagcggaagcgccgguuccugggguuccuccugggcguggggagcgcgaucgccuccggcaucgccgucugcaaggugcugcaccucgagggcgaggugaacaagaucaagaacgcccugcugagcaccaacaaggccgucgugucccucagcaacgggguguccguccugaccuucaaggugcuggaccucaagaacuacaucgacaagcagcugcugcccauccucaacaagcagagcugcuccaucagcaacaucgagaccgugaucgaguuccagcagaagaacaaccgccugcuggagaucacgcgggaguucuccgucaacgcgggcgugaccacccccgugagcaccuacaugcucacgaacagcgagcugcugucccucaucaacgacaugccgaucaccaacgaccagaagaagcugaugagcaacaacguccagaucgugcgccagcaguccuacagcaucaugugcaucaucaaggaggaggugcuggccuacgucgugcagcucccccuguacggggugaucgacacccccugcuggaagcugcacaccagcccccucugcacgaccaacaccaaggagggcagcaacaucugccugacccggacggaccgcgggugguacugcgacaacgccggcuccgucagcuucuucccgcaggccgagaccugcaaggugcaguccaaccgggucuucugcgacaccaugaacagccugacccuccccuccgaggugaaccugugcaacaucgacaucuucaaccccaaguacgacugcaagaucaugacgagcaagaccgacguguccagcuccgucaucaccagccugggcgccaucguguccugcuacgggaagaccaagugcacggcgagcaacaagaaccgcggcaucaucaagaccuucuccaacgggugcgacuacgugagcaacaagggcgucgacaccgugagcgugggcaacacccucuacuacgucaacaagcaggaggggaagucccuguacgugaagggcgagcccaucaucaacuucuacgacccgcugguguuccccagcgacgaguucgacgccuccaucagccaggucaacgagaagaucaaccagucccucgccuucauccggaaguccgacgagcugcugcacaacgugaacguggggaaguccaccacgaacaucaugaucaccaccaucaucaucgucaucaucgugauccugcuccugcugaucgccgugggccucuuccuguacugcaaggcccgcugaggacuaguguccaccugucccuccugggcugcuggauugucucguuuuccugccaaauaaacaggaucagcgcuuuacagaucuaaaaaaaaaaaaaaaaaaaaaaaaaaaaaaaaaaaaaaaaaaaaaaaaaaaaaaaaaaaaaaaaugcaucccccccccccccccccccccccccccccccaaaggcucuuuucagagccaccagaauu

SEQ ID NO: 12924 - RNA, 1970 nt, Artificial Sequence
  mRNA product Design c-1 comprising derived and/or modified sequence from HRSV(Memphis-37)__AIY60640.1__F-del_DSCav1 (opt2)
gggagaguccgcucagccagguugcagaagcggcuuagcguguguccuaaucuucucucugcguguagguaggccugugccgcaaacaagcuuaccauggagcuccccauccucaagaccaacgccaucaccaccauccucgccgccgucacccucugcuucgccuccucccagaacaucaccgaggaguucuaccaguccaccugcuccgccgucuccaagggcuaccucuccgcccuccgcaccggcugguacaccuccgucaucaccaucgagcucuccaacaucaaggagaacaagugcaacggcaccgacgccaaggucaagcucaucaagcaggagcucgacaaguacaagaacgccgucaccgagcuccagcuccucaugcaguccacccccgccgccaacaaccgcgcccgccgcgagcucccccgcuucaugaacuacacccucaacaacaccaagaacaacaacgucacccucuccaagaagcgcaagcgccgcuuccucggcuuccuccucggcgucggcuccgccaucgccuccggcaucgccgucugcaagguccuccaccucgagggcgaggucaacaagaucaagaacgcccuccucuccaccaacaaggccgucgucucccucuccaacggcgucuccguccucaccuucaagguccucgaccucaagaacuacaucgacaagcagcuccuccccauccucaacaagcaguccugcuccaucuccaacaucgagaccgucaucgaguuccagcagaagaacaaccgccuccucgagaucacccgcgaguucuccgucaacgccggcgucaccacccccgucuccaccuacaugcucaccaacuccgagcuccucucccucaucaacgacaugcccaucaccaacgaccagaagaagcucauguccaacaacguccagaucguccgccagcaguccuacuccaucaugugcaucaucaaggaggagguccucgccuacgucguccagcucccccucuacggcgucaucgacacccccugcuggaagcuccacaccuccccccucugcaccaccaacaccaaggagggcuccaacaucugccucacccgcaccgaccgcggcugguacugcgacaacgccggcuccgucuccuucuucccccaggccgagaccugcaagguccaguccaaccgcgucuucugcgacaccaugaacucccucacccuccccuccgaggucaaccucugcaacaucgacaucuucaaccccaaguacgacugcaagaucaugaccuccaagaccgacgucuccuccuccgucaucaccucccucggcgccaucgucuccugcuacggcaagaccaagugcaccgccuccaacaagaaccgcggcaucaucaagaccuucuccaacggcugcgacuacgucuccaacaagggcgucgacaccgucuccgucggcaacacccucuacuacgucaacaagcaggagggcaagucccucuacgucaagggcgagcccaucaucaacuucuacgacccccucgucuuccccuccgacgaguucgacgccuccaucucccaggucaacgagaagaucaaccagucccucgccuucauccgcaaguccgacgagcuccuccacaacgucaacgucggcaaguccaccaccaacaucaugaucaccaccaucaucaucgucaucaucgucauccuccuccuccucaucgccgucggccucuuccucuacugcaaggcccgcugaggacuaguguccaccugucccuccugggcugcuggauugucucguuuuccugccaaauaaacaggaucagcgcuuuacagaucuaaaaaaaaaaaaaaaaaaaaaaaaaaaaaaaaaaaaaaaaaaaaaaaaaaaaaaaaaaaaaaaaugcaucccccccccccccccccccccccccccccccaaaggcucuuuucagagccaccagaauu

SEQ ID NO: 12925 - RNA, 1970 nt, Artificial Sequence
  mRNA product Design c-1 comprising derived and/or modified sequence from HRSV(Memphis-37)__AIY60640.1__F-del_DSCav1 (opt3)
gggagaguccgcucagccagguugcagaagcggcuuagcguguguccuaaucuucucucugcguguagguaggccugugccgcaaacaagcuuaccauggagcugcccauccucaagaccaacgccauuacaacuauacuugcugcagugacgcugugcuucgccagcucccagaauaucaccgaagaguuuuaccaaucuacauguucagcggucaguaaaggcuauuugagcgcuuuaagaacugggugguacaccuccguuauuacaaucgaacugucuaacauuaaggagaauaaaugcaacggaaccgacgccaaggugaaacuaaucaagcaggaacucgauaaguauaaaaaugcaguaacugagcugcagcuucugaugcagucgaccccugccgcuaacaauagggcacggcgcgaguugccacgauucaugaacuacacacucaauaacacgaagaauaacaaugugacucugagcaaaaagcguaaaagaagguuucuggguuuccucuuaggcgucgggucagccauagcuaguggaaucgccguguguaagguucugcaccuugaaggcgaggugaacaagauuaaaaaugcguugcuguccaccaacaaggcagucgugucucuaagcaacgguguauccguucucacauuuaaagugcuggaccuuaagaauuauaucgauaaacaacuguugccgauucucaacaagcagucaugcaguaucagcaauauagaaacugucauugaguuccagcagaaaaacaaucggcuguuagagaucacccgcgaauuuucugugaacgccggggugacaacccccgucuccacguacaugcugacuaauucagagcuccuuagccugauuaacgacaugccuaucacaaaugaucaaaagaaguugaugaguaacaauguucagaucgugagacagcagucuuauuccauuauguguauaaucaaagaagagguacuagcuuacgugguccaacugccacucuacggagugauugacacccccugcuggaagcugcauacuagcccucuuuguacaaccaacacgaaagaaggcucgaauaucugccugaccaggacagaucggggcugguauugugacaacgccgggucuguuuccuucuuuccacaggcagagacuugcaaggugcagucaaaucgcgucuucugugauaccaugaacaguuugacacuccccagcgaggugaaccugugcaauauagacauuuuuaacccuaaauacgauugcaagaucaugacuuccaagaccgacguaucuagcucaguuaucacaaguuuaggagcuauuguguccuguuaugguaaaaccaagugcacugccagcaauaaaaaccgaggcaucauuaagacguucucuaaugggugugauuacgucucaaacaaaggaguggacacagucagugugggcaauacccuguauuacguuaacaagcaagaagguaagagccuauaugugaaaggggagccaauaaucaauuuuuacgacccgcucguauuccccuccgaugaguucgacgcgucuauuucgcaggucaacgaaaagaucaaucagagccuggccuuuaucagaaaauccgaugaacuuuugcacaacgugaauguuggaaagucaacuaccaacauuaugauaacaaccaucauuaucgugauuaucgucauacugcuccugcuuaucgcagugggccuguucuuguacugcaaagcuaggugaggacuaguguccaccugucccuccugggcugcuggauugucucguuuuccugccaaauaaacaggaucagcgcuuuacagaucuaaaaaaaaaaaaaaaaaaaaaaaaaaaaaaaaaaaaaaaaaaaaaaaaaaaaaaaaaaaaaaaaugcaucccccccccccccccccccccccccccccccaaaggcucuuuucagagccaccagaauu

SEQ ID NO: 12926 - RNA, 1970 nt, Artificial Sequence
  mRNA product Design c-1 comprising derived and/or modified sequence from HRSV(Memphis-37)__AIY60640.1__F-del_DSCav1 (opt4)
gggagaguccgcucagccagguugcagaagcggcuuagcguguguccuaaucuucucucugcguguagguaggccugugccgcaaacaagcuuaccauggagcugcccauccugaagaccaacgccaucaccaccauccuggccgccgugacccugugcuucgccagcagccagaacaucaccgaggaguucuaccagagcaccugcagcgccgugagcaagggcuaccugagcgcccugagaaccggcugguacaccagcgugaucaccaucgagcugagcaacaucaaggagaacaagugcaacggcaccgacgccaaggugaagcugaucaagcaggagcuggacaaguacaagaacgccgugaccgagcugcagcugcugaugcagagcacccccgccgccaacaacagagccagaagagagcugcccagauucaugaacuacacccugaacaacaccaagaacaacaacgugacccugagcaagaagagaaagagaagauuccugggcuuccugcugggcgugggcagcgccaucgccagcggcaucgccgugugcaaggugcugcaccuggagggcgaggugaacaagaucaagaacgcccugcugagcaccaacaaggccguggugagccugagcaacggcgugagcgugcugaccuucaaggugcuggaccugaagaacuacaucgacaagcagcugcugcccauccugaacaagcagagcugcagcaucagcaacaucgagaccgugaucgaguuccagcagaagaacaacagacugcuggagaucaccagagaguucagcgugaacgccggcgugaccacccccgugagcaccuacaugcugaccaacagcgagcugcugagccugaucaacgacaugcccaucaccaacgaccagaagaagcugaugagcaacaacgugcagaucgugagacagcagagcuacagcaucaugugcaucaucaaggaggaggugcuggccuacguggugcagcugccccuguacggcgugaucgacacccccugcuggaagcugcacaccagcccccugugcaccaccaacaccaaggagggcagcaacaucugccugaccagaaccgacagaggcugguacugcgacaacgccggcagcgugagcuucuucccccaggccgagaccugcaaggugcagagcaacagaguguucugcgacaccaugaacagccugacccugcccagcgaggugaaccugugcaacaucgacaucuucaaccccaaguacgacugcaagaucaugaccagcaagaccgacgugagcagcagcgugaucaccagccugggcgccaucgugagcugcuacggcaagaccaagugcaccgccagcaacaagaacagaggcaucaucaagaccuucagcaacggcugcgacuacgugagcaacaagggcguggacaccgugagcgugggcaacacccuguacuacgugaacaagcaggagggcaagagccuguacgugaagggcgagcccaucaucaacuucuacgacccccugguguuccccagcgacgaguucgacgccagcaucagccaggugaacgagaagaucaaccagagccuggccuucaucagaaagagcgacgagcugcugcacaacgugaacgugggcaagagcaccaccaacaucaugaucaccaccaucaucaucgugaucaucgugauccugcugcugcugaucgccgugggccuguuccuguacugcaaggccagaugaggacuaguguccaccugucccuccugggcugcuggauugucucguuuuccugccaaauaaacaggaucagcgcuuuacagaucuaaaaaaaaaaaaaaaaaaaaaaaaaaaaaaaaaaaaaaaaaaaaaaaaaaaaaaaaaaaaaaaaugcaucccccccccccccccccccccccccccccccaaaggcucuuuucagagccaccagaauu

SEQ ID NO: 12927 - RNA, 1970 nt, Artificial Sequence
  mRNA product Design c-1 comprising derived and/or modified sequence from HRSV(Memphis-37)__AIY60640.1__F-del_DSCav1 (opt5)
gggagaguccgcucagccagguugcagaagcggcuuagcguguguccuaaucuucucucugcguguagguaggccugugccgcaaacaagcuuaccauggagcugcccauccucaagaccaacgccauuacaacgauccuggcugccgugacccuuugcuucgcgagcucccagaauauuacagaagaguuuuaccaaucuaccuguagcgcugucuccaaaggcuaucugucugcccucagaacagggugguacaccagcguuaucacaauugaacuguccaacaucaaggagaauaaaugcaacggaaccgacgccaaggugaaacuuaucaagcaggaacuggauaaguauaaaaaugcugugacggagcuccagcugcugaugcagucuaccccugccgcuaacaaucgggcccgcagagagcucccgcgguucaugaacuacacacugaauaacaccaagaauaacaaugucacacuuagcaaaaagcgcaaaagacgguuucugggcuuccuccugggggugggauccgcgauugccagcggcaucgcuguuuguaaggugcuucaccuggaaggggaggucaacaagauuaaaaaugcccuccugucuaccaacaaggcugugguuucccugagcaacggagugucuguccucacguuuaaagugcuggaccuuaagaauuauaucgauaaacaacugcuccccauucugaacaagcaguccugcagcaucucuaauauugaaacagugaucgaguuccagcagaaaaacaaucgccuucuggagaucaccagagaauuuuccgucaacgccggcguuacaaccccugugagcaccuacaugcucacaaauuccgagcugcugucucucauuaacgacaugcccaucacgaaugaucaaaagaagcugaugagcaacaaugugcagauuguccggcagcaguccuauagcaucauguguauuaucaaagaagaggugcuugcguacguugugcaacugccucucuacggcgucaucgacacccccugcuggaagcugcauacaucuccucuuuguaccacaaacaccaaagaaggguccaauauuugccugacgcgcacagauagaggaugguauugugacaacgccggcagcgugucuuucuuuccgcaggcugagaccugcaagguucagagcaaucggguguucugugauaccaugaacucccucacacugcccucugaggucaaccugugcaauaucgacauuuuuaacccuaaauacgauugcaagaucaugaccagcaagacagacguguccagcucugucauuacgucccucggggccaucgugagcuguuauggaaaaaccaagugcacagcuucuaauaaaaaccgcggcaucauuaagaccuucuccaaugggugugauuacguuagcaacaaaggaguggacacagucuccgugggcaauacccuguauuacguuaacaagcaagaaggcaagucucuuuaugugaaaggggagcccaucauuaauuuuuacgacccucuggucuuccccagcgaugaguucgacgccuccaucucucaggugaacgaaaagauuaaucagagccucgccuuuaucagaaaauccgaugaacugcugcacaacgugaauguuggaaagagcacgaccaacauuaugaucacaaccaucauuaucgucauuaucgugauucuucuccugcugaucgcugugggccucuuccuguacugcaaagcgcggugaggacuaguguccaccugucccuccugggcugcuggauugucucguuuuccugccaaauaaacaggaucagcgcuuuacagaucuaaaaaaaaaaaaaaaaaaaaaaaaaaaaaaaaaaaaaaaaaaaaaaaaaaaaaaaaaaaaaaaaugcaucccccccccccccccccccccccccccccccaaaggcucuuuucagagccaccagaauu

SEQ ID NO: 12928 - RNA, 1970 nt, Artificial Sequence
  mRNA product Design c-1 comprising derived and/or modified sequence from HRSV(Memphis-37)__AIY60640.1__F-del_DSCav1 (opt6)
gggagaguccgcucagccagguugcagaagcggcuuagcguguguccuaaucuucucucugcguguagguaggccugugccgcaaacaagcuuaccauggaauuaccaauccuuaaaacaaacgcaauaacaaccauccucgcagcaguaacucucugcuucgcuucaucucaaaacaucacagaagaauuuuaccaaagcacaugcucagcuguauccaaagguuaucuaucagccuugagaaccggaugguacacaucaguaauaacaauugaacuaucaaacauuaaagaaaacaaaugcaacggcaccgacgcaaaaguaaaacuaaucaaacaagaacuagacaaauauaaaaaugcaguaacagaauuacaauuauuaaugcaauccacaccagcugcaaacaaccgagcccgaagagaacuaccaagauucaugaacuacacacuaaacaacaccaaaaauaacaacgucacccuaucuaaaaaacguaaaagaagauucuuaggauuccucuuaggagucggauccgcaauagcaagcggcauagccguauguaaaguccuacacuuagaaggugaagugaauaaaauaaaaaacgcccuauuaagcacuaacaaagcaguagucucccuaucaaacggaguuucaguacucacauucaaaguacucgaccucaaaaacuacaucgacaaacaacuuuuaccaauucuaaacaaacaaucaugcuccauaucuaauaucgaaaccgucaucgaauuucaacaaaaaaacaauagacuacuagaaauaacuagagaauuuucaguaaacgccggcguuacgacaccagucucuacauacauguuaaccaauucagaacucuuaucauuaaucaacgacaugccaauaacaaacgaccaaaaaaaacuaauguccaauaacguacaaauagucagacaacaaucauacucaauuaugugcauaauaaaagaagaaguacuagcuuacguaguacaacucccccuauacggcguaauagacacuccauguuggaaauuacacacaucaccauuauguaccaccaauacaaaagaaggcucaaacauaugccuaacaagaacagauagaggaugguauugcgacaacgcaggcucaguuuccuuuuucccccaagcagaaaccugcaaaguacaaucaaaucguguuuuuugcgacaccaugaacucacucacauuaccaucagaaguaaaccuaugcaacauagacauauucaacccaaaauacgacugcaaaaucaugacaucaaaaacagacguauccucuucaguaauuacuagcuuaggagcaauagucucuuguuauggaaaaacaaaaugcacagccaguaacaaaaaccgcggaauaauaaaaaccuucucaaacgguugcgauuacgucucuaacaaaggagucgacacaguaucaguaggcaauacauuauacuacguuaacaaacaagaaggaaaaucuuuauacgucaaaggagaacccauuauaaacuuuuacgacccauuagucuucccuuccgacgaauuugacgccagcauuucacaaguaaacgaaaaaauaaaccaaucacucgcauuuauaagaaaaucugacgaauuacuccacaacguaaacguaggaaaauccacaacaaacauaaugauaacaaccauaaucaucgucauaauagucauacuucuccuauuaauugcaguaggcuuauuccuauacuguaaagcacgauaaggacuaguguccaccugucccuccugggcugcuggauugucucguuuuccugccaaauaaacaggaucagcgcuuuacagaucuaaaaaaaaaaaaaaaaaaaaaaaaaaaaaaaaaaaaaaaaaaaaaaaaaaaaaaaaaaaaaaaaugcaucccccccccccccccccccccccccccccccaaaggcucuuuucagagccaccagaauu

SEQ ID NO: 12929 - RNA, 1970 nt, Artificial Sequence
  mRNA product Design c-1 comprising derived and/or modified sequence from HRSV(Memphis-37)__AIY60640.1__F-del_DSCav1 (opt11)
gggagaguccgcucagccagguugcagaagcggcuuagcguguguccuaaucuucucucugcguguagguaggccugugccgcaaacaagcuuaccauggaacuaccaauccuaaaaacuaacgcaaucaccacaauccucgccgccgucacccuuugcuuugcguccucccaaaacauuacugaagaguucuaccaauccacgugcuccgccgucuccaaagguuaccuauccgcccuuaggaccggcugguacaccagcgucaucaccaucgaacuuuccaacaucaaagaaaacaaauguaacggcaccgacgcaaaagucaaacuuauuaaacaggaacucgacaaauauaagaaugccgucaccgaauuacaacuccucaugcaauccacccccgccgccaacaaccgagcaaggcgcgaacucccucgauucaugaauuacacccucaacaauaccaaaaacaacaacgucacccuauccaagaaacgcaaaagacgcuucuugggcuuccuccucggcgugggcuccgcaauagccuccgguauugccgugugcaaagucuuacaccucgaaggcgaggucaacaaaaucaaaaacgcccuccucuccaccaacaaagccgucgucagccuauccaacggcguuuccguccucaccuucaaaguacucgaccucaaaaacuacaucgacaaacaacuccuacccauacuaaacaaacaauccugcuccauuuccaacaucgaaaccguaaucgaguuccaacagaaaaacaaucgccuccuagaaaucacacgugaauuuucaguuaacgccggaguaacaacuccuguaucuaccuacaugcucaccaauuccgaacuccucagccucauaaacgacaugccaauaacaaacgaccaaaagaaacucaugucuaacaacguacaaaucgucagacaacaaaguuacucaaucauguguaucaucaaagaggaaguccuagcauacgugguccaacucccccucuacggaguaaucgacaccccaugcuggaaacuacacaccagcccccucuguaccacaaacacgaaagaagguuccaacaucugccugacccgaaccgaccgcggcugguacugcgauaacgcuggcuccgucucauucuucccccaagcagaaaccugcaaaguacaauccaaccgaguauucugcgacaccaugaacucacucacccuccccagcgaaguaaaccucugcaacaucgacauauucaacccaaaauacgacugcaaaauuaugaccucuaaaacagacguauccuccucuguaaucacaucccucggggccaucgucuccugcuacggcaaaaccaaaugcaccgccuccaacaaaaaccgcggaaucauaaaaaccuucuccaacggaugcgacuacgucucaaauaaaggcgucgacaccgucuccgucggcaacacgcuauacuacgucaacaaacaagaaggcaaaucacucuacgucaaaggugagcccaucaucaauuucuacgauccccucgucuucccaagcgacgaguucgacgccagcauaucccaaguaaacgagaaaaucaaccaaagccuggccuucauccgcaaauccgacgaacuacuacacaacguaaacguaggcaaguccacuaccaacauaaugaucaccacaaucaucauagucauaaucguuauacuacuccugcucaucgccguaggccucuuccucuauugcaaagcccgauagggacuaguguccaccugucccuccugggcugcuggauugucucguuuuccugccaaauaaacaggaucagcgcuuuacagaucuaaaaaaaaaaaaaaaaaaaaaaaaaaaaaaaaaaaaaaaaaaaaaaaaaaaaaaaaaaaaaaaaugcaucccccccccccccccccccccccccccccccaaaggcucuuuucagagccaccagaauu

SEQ ID NO: 12930 - RNA, 2060 nt, Artificial Sequence
  mRNA product Design c-2 comprising derived and/or modified sequence from HRSV(Memphis-37)__AIY60640.1__F-del_DSCav1 (opt1)
gggagacuccugucgggcggaaguaggaggaguagaguuuaaaaacaguacucuuuuuccgguucgggacguaguugaagcaacgacaagccggauaaccgcucuugagacaggaagcuuaccauggagcugcccauccucaagaccaacgccaucaccacgauccuggccgcggugacccugugcuucgccagcucccagaacaucaccgaggaguucuaccagagcacgugcuccgccgucagcaagggcuaccucuccgcccugcgcaccgggugguacaccagcgugaucaccaucgagcuguccaacaucaaggagaacaagugcaacggcaccgacgccaaggugaagcucaucaagcaggagcuggacaaguacaagaacgcggucacggagcugcagcuccugaugcagagcaccccggccgccaacaaccgggcccgccgggagcugccccgcuucaugaacuacacccucaacaacaccaagaacaacaacgugacgcuguccaagaagcggaagcgccgguuccugggguuccuccugggcguggggagcgcgaucgccuccggcaucgccgucugcaaggugcugcaccucgagggcgaggugaacaagaucaagaacgcccugcuguccaccaacaaggccgucgugagccucuccaacggggugagcguccugaccuucaaggugcuggaccucaagaacuacaucgacaagcagcugcugcccauccugaacaagcagagcugcuccaucagcaacaucgagaccgucaucgaguuccagcagaagaacaaccgccuccuggagaucacgcgggaguucagcgugaacgcgggcgugaccacccccgucuccaccuacaugcugacgaacagcgagcuccugucccugaucaacgacaugccgaucaccaacgaccagaagaagcucaugagcaacaacgugcagaucgugcgccagcaguccuacagcaucaugugcaucaucaaggaggagguccuggccuacguggugcagcugccccucuacggggucaucgacacccccugcuggaagcugcacaccagcccccugugcacgaccaacaccaaggagggcuccaacaucugccucacccggacggaccgcgggugguacugcgacaacgccggcagcguguccuucuucccgcaggccgagaccugcaagguccagagcaaccggguguucugcgacaccaugaacucccugacccugcccagcgaggugaaccucugcaacaucgacaucuucaaccccaaguacgacugcaagaucaugacguccaagaccgacgucagcuccagcgugaucaccucccugggcgccaucgugagcugcuacgggaagaccaagugcacggcgagcaacaagaaccgcggcaucaucaagaccuucuccaacgggugcgacuacgucagcaacaagggcguggacaccguguccgucggcaacacccuguacuacgugaacaagcaggagggcaagagccucuacgugaagggggagcccaucaucaacuucuacgacccgcuggucuuccccuccgacgaguucgacgccagcaucucccaggugaacgagaagaucaaccagagccuggccuucauccggaaguccgacgagcuccugcacaacgugaacgucggcaagagcaccacgaacaucaugaucaccaccaucaucaucgugaucaucgugauccugcugcuccugaucgccgucgggcuguuccucuacugcaaggcccgcugaggacuaguggaagcauuuuccuggcugauuaaaagaaauuacucagcuauggucaucuguuccuguuagaaggcuaugcagcauauuauauacuaugcgcauguuaugaaaugcauaauaaaaaauuuuaaaaaaucuaaaagaucuaaaaaaaaaaaaaaaaaaaaaaaaaaaaaaaaaaaaaaaaaaaaaaaaaaaaaaaaaaaaaaaaugcaucccccccccccccccccccccccccccccccaaaggcucuuuucagagccaccagaauu

SEQ ID NO: 12931 - RNA, 2060 nt, Artificial Sequence
  mRNA product Design c-2 comprising derived and/or modified sequence from HRSV(Memphis-37)__AIY60640.1__F-del_DSCav1 (opt1)
gggagacuccugucgggcggaaguaggaggaguagaguuuaaaaacaguacucuuuuuccgguucgggacguaguugaagcaacgacaagccggauaaccgcucuugagacaggaagcuuaccauggagcugcccauccucaagaccaacgccaucaccacgauccuggccgcggugacccugugcuucgccagcucccagaacaucaccgaggaguucuaccagagcacgugcuccgccgucagcaagggcuaccucuccgcccugcgcaccgggugguacaccagcgugaucaccaucgagcuguccaacaucaaggagaacaagugcaacggcaccgacgccaaggugaagcucaucaagcaggagcuggacaaguacaagaacgcggucacggagcugcagcuccugaugcagagcaccccggccgccaacaaccgggcccgccgggagcugccccgcuucaugaacuacacccucaacaacaccaagaacaacaacgugacgcuguccaagaagcggaagcgccgguuccugggguuccuccugggcguggggagcgcgaucgccuccggcaucgccgucugcaaggugcugcaccucgagggcgaggugaacaagaucaagaacgcccugcugagcaccaacaaggccgucgugucccucagcaacgggguguccguccugaccuucaaggugcuggaccucaagaacuacaucgacaagcagcugcugcccauccucaacaagcagagcugcuccaucagcaacaucgagaccgugaucgaguuccagcagaagaacaaccgccugcuggagaucacgcgggaguucuccgucaacgcgggcgugaccacccccgugagcaccuacaugcucacgaacagcgagcugcugucccucaucaacgacaugccgaucaccaacgaccagaagaagcugaugagcaacaacguccagaucgugcgccagcaguccuacagcaucaugugcaucaucaaggaggaggugcuggccuacgucgugcagcucccccuguacggggugaucgacacccccugcuggaagcugcacaccagcccccucugcacgaccaacaccaaggagggcagcaacaucugccugacccggacggaccgcgggugguacugcgacaacgccggcuccgucagcuucuucccgcaggccgagaccugcaaggugcaguccaaccgggucuucugcgacaccaugaacagccugacccuccccuccgaggugaaccugugcaacaucgacaucuucaaccccaaguacgacugcaagaucaugacgagcaagaccgacguguccagcuccgucaucaccagccugggcgccaucguguccugcuacgggaagaccaagugcacggcgagcaacaagaaccgcggcaucaucaagaccuucuccaacgggugcgacuacgugagcaacaagggcgucgacaccgugagcgugggcaacacccucuacuacgucaacaagcaggaggggaagucccuguacgugaagggcgagcccaucaucaacuucuacgacccgcugguguuccccagcgacgaguucgacgccuccaucagccaggucaacgagaagaucaaccagucccucgccuucauccggaaguccgacgagcugcugcacaacgugaacguggggaaguccaccacgaacaucaugaucaccaccaucaucaucgucaucaucgugauccugcuccugcugaucgccgugggccucuuccuguacugcaaggcccgcugaggacuaguggaagcauuuuccuggcugauuaaaagaaauuacucagcuauggucaucuguuccuguuagaaggcuaugcagcauauuauauacuaugcgcauguuaugaaaugcauaauaaaaaauuuuaaaaaaucuaaaagaucuaaaaaaaaaaaaaaaaaaaaaaaaaaaaaaaaaaaaaaaaaaaaaaaaaaaaaaaaaaaaaaaaugcaucccccccccccccccccccccccccccccccaaaggcucuuuucagagccaccagaauu

SEQ ID NO: 12932 - RNA, 2060 nt, Artificial Sequence
  mRNA product Design c-2 comprising derived and/or modified sequence from HRSV(Memphis-37)__AIY60640.1__F-del_DSCav1 (opt2)
gggagacuccugucgggcggaaguaggaggaguagaguuuaaaaacaguacucuuuuuccgguucgggacguaguugaagcaacgacaagccggauaaccgcucuugagacaggaagcuuaccauggagcuccccauccucaagaccaacgccaucaccaccauccucgccgccgucacccucugcuucgccuccucccagaacaucaccgaggaguucuaccaguccaccugcuccgccgucuccaagggcuaccucuccgcccuccgcaccggcugguacaccuccgucaucaccaucgagcucuccaacaucaaggagaacaagugcaacggcaccgacgccaaggucaagcucaucaagcaggagcucgacaaguacaagaacgccgucaccgagcuccagcuccucaugcaguccacccccgccgccaacaaccgcgcccgccgcgagcucccccgcuucaugaacuacacccucaacaacaccaagaacaacaacgucacccucuccaagaagcgcaagcgccgcuuccucggcuuccuccucggcgucggcuccgccaucgccuccggcaucgccgucugcaagguccuccaccucgagggcgaggucaacaagaucaagaacgcccuccucuccaccaacaaggccgucgucucccucuccaacggcgucuccguccucaccuucaagguccucgaccucaagaacuacaucgacaagcagcuccuccccauccucaacaagcaguccugcuccaucuccaacaucgagaccgucaucgaguuccagcagaagaacaaccgccuccucgagaucacccgcgaguucuccgucaacgccggcgucaccacccccgucuccaccuacaugcucaccaacuccgagcuccucucccucaucaacgacaugcccaucaccaacgaccagaagaagcucauguccaacaacguccagaucguccgccagcaguccuacuccaucaugugcaucaucaaggaggagguccucgccuacgucguccagcucccccucuacggcgucaucgacacccccugcuggaagcuccacaccuccccccucugcaccaccaacaccaaggagggcuccaacaucugccucacccgcaccgaccgcggcugguacugcgacaacgccggcuccgucuccuucuucccccaggccgagaccugcaagguccaguccaaccgcgucuucugcgacaccaugaacucccucacccuccccuccgaggucaaccucugcaacaucgacaucuucaaccccaaguacgacugcaagaucaugaccuccaagaccgacgucuccuccuccgucaucaccucccucggcgccaucgucuccugcuacggcaagaccaagugcaccgccuccaacaagaaccgcggcaucaucaagaccuucuccaacggcugcgacuacgucuccaacaagggcgucgacaccgucuccgucggcaacacccucuacuacgucaacaagcaggagggcaagucccucuacgucaagggcgagcccaucaucaacuucuacgacccccucgucuuccccuccgacgaguucgacgccuccaucucccaggucaacgagaagaucaaccagucccucgccuucauccgcaaguccgacgagcuccuccacaacgucaacgucggcaaguccaccaccaacaucaugaucaccaccaucaucaucgucaucaucgucauccuccuccuccucaucgccgucggccucuuccucuacugcaaggcccgcugaggacuaguggaagcauuuuccuggcugauuaaaagaaauuacucagcuauggucaucuguuccuguuagaaggcuaugcagcauauuauauacuaugcgcauguuaugaaaugcauaauaaaaaauuuuaaaaaaucuaaaagaucuaaaaaaaaaaaaaaaaaaaaaaaaaaaaaaaaaaaaaaaaaaaaaaaaaaaaaaaaaaaaaaaaugcaucccccccccccccccccccccccccccccccaaaggcucuuuucagagccaccagaauu

SEQ ID NO: 12933 - RNA, 2060 nt, Artificial Sequence
  mRNA product Design c-2 comprising derived and/or modified sequence from HRSV(Memphis-37)__AIY60640.1__F-del_DSCav1 (opt3)
gggagacuccugucgggcggaaguaggaggaguagaguuuaaaaacaguacucuuuuuccgguucgggacguaguugaagcaacgacaagccggauaaccgcucuugagacaggaagcuuaccauggagcugcccauccucaagaccaacgccauuacaacuauacuugcugcagugacgcugugcuucgccagcucccagaauaucaccgaagaguuuuaccaaucuacauguucagcggucaguaaaggcuauuugagcgcuuuaagaacugggugguacaccuccguuauuacaaucgaacugucuaacauuaaggagaauaaaugcaacggaaccgacgccaaggugaaacuaaucaagcaggaacucgauaaguauaaaaaugcaguaacugagcugcagcuucugaugcagucgaccccugccgcuaacaauagggcacggcgcgaguugccacgauucaugaacuacacacucaauaacacgaagaauaacaaugugacucugagcaaaaagcguaaaagaagguuucuggguuuccucuuaggcgucgggucagccauagcuaguggaaucgccguguguaagguucugcaccuugaaggcgaggugaacaagauuaaaaaugcguugcuguccaccaacaaggcagucgugucucuaagcaacgguguauccguucucacauuuaaagugcuggaccuuaagaauuauaucgauaaacaacuguugccgauucucaacaagcagucaugcaguaucagcaauauagaaacugucauugaguuccagcagaaaaacaaucggcuguuagagaucacccgcgaauuuucugugaacgccggggugacaacccccgucuccacguacaugcugacuaauucagagcuccuuagccugauuaacgacaugccuaucacaaaugaucaaaagaaguugaugaguaacaauguucagaucgugagacagcagucuuauuccauuauguguauaaucaaagaagagguacuagcuuacgugguccaacugccacucuacggagugauugacacccccugcuggaagcugcauacuagcccucuuuguacaaccaacacgaaagaaggcucgaauaucugccugaccaggacagaucggggcugguauugugacaacgccgggucuguuuccuucuuuccacaggcagagacuugcaaggugcagucaaaucgcgucuucugugauaccaugaacaguuugacacuccccagcgaggugaaccugugcaauauagacauuuuuaacccuaaauacgauugcaagaucaugacuuccaagaccgacguaucuagcucaguuaucacaaguuuaggagcuauuguguccuguuaugguaaaaccaagugcacugccagcaauaaaaaccgaggcaucauuaagacguucucuaaugggugugauuacgucucaaacaaaggaguggacacagucagugugggcaauacccuguauuacguuaacaagcaagaagguaagagccuauaugugaaaggggagccaauaaucaauuuuuacgacccgcucguauuccccuccgaugaguucgacgcgucuauuucgcaggucaacgaaaagaucaaucagagccuggccuuuaucagaaaauccgaugaacuuuugcacaacgugaauguuggaaagucaacuaccaacauuaugauaacaaccaucauuaucgugauuaucgucauacugcuccugcuuaucgcagugggccuguucuuguacugcaaagcuaggugaggacuaguggaagcauuuuccuggcugauuaaaagaaauuacucagcuauggucaucuguuccuguuagaaggcuaugcagcauauuauauacuaugcgcauguuaugaaaugcauaauaaaaaauuuuaaaaaaucuaaaagaucuaaaaaaaaaaaaaaaaaaaaaaaaaaaaaaaaaaaaaaaaaaaaaaaaaaaaaaaaaaaaaaaaugcaucccccccccccccccccccccccccccccccaaaggcucuuuucagagccaccagaauu

SEQ ID NO: 12934 - RNA, 2060 nt, Artificial Sequence
  mRNA product Design c-2 comprising derived and/or modified sequence from HRSV(Memphis-37)__AIY60640.1__F-del_DSCav1 (opt4)
gggagacuccugucgggcggaaguaggaggaguagaguuuaaaaacaguacucuuuuuccgguucgggacguaguugaagcaacgacaagccggauaaccgcucuugagacaggaagcuuaccauggagcugcccauccugaagaccaacgccaucaccaccauccuggccgccgugacccugugcuucgccagcagccagaacaucaccgaggaguucuaccagagcaccugcagcgccgugagcaagggcuaccugagcgcccugagaaccggcugguacaccagcgugaucaccaucgagcugagcaacaucaaggagaacaagugcaacggcaccgacgccaaggugaagcugaucaagcaggagcuggacaaguacaagaacgccgugaccgagcugcagcugcugaugcagagcacccccgccgccaacaacagagccagaagagagcugcccagauucaugaacuacacccugaacaacaccaagaacaacaacgugacccugagcaagaagagaaagagaagauuccugggcuuccugcugggcgugggcagcgccaucgccagcggcaucgccgugugcaaggugcugcaccuggagggcgaggugaacaagaucaagaacgcccugcugagcaccaacaaggccguggugagccugagcaacggcgugagcgugcugaccuucaaggugcuggaccugaagaacuacaucgacaagcagcugcugcccauccugaacaagcagagcugcagcaucagcaacaucgagaccgugaucgaguuccagcagaagaacaacagacugcuggagaucaccagagaguucagcgugaacgccggcgugaccacccccgugagcaccuacaugcugaccaacagcgagcugcugagccugaucaacgacaugcccaucaccaacgaccagaagaagcugaugagcaacaacgugcagaucgugagacagcagagcuacagcaucaugugcaucaucaaggaggaggugcuggccuacguggugcagcugccccuguacggcgugaucgacacccccugcuggaagcugcacaccagcccccugugcaccaccaacaccaaggagggcagcaacaucugccugaccagaaccgacagaggcugguacugcgacaacgccggcagcgugagcuucuucccccaggccgagaccugcaaggugcagagcaacagaguguucugcgacaccaugaacagccugacccugcccagcgaggugaaccugugcaacaucgacaucuucaaccccaaguacgacugcaagaucaugaccagcaagaccgacgugagcagcagcgugaucaccagccugggcgccaucgugagcugcuacggcaagaccaagugcaccgccagcaacaagaacagaggcaucaucaagaccuucagcaacggcugcgacuacgugagcaacaagggcguggacaccgugagcgugggcaacacccuguacuacgugaacaagcaggagggcaagagccuguacgugaagggcgagcccaucaucaacuucuacgacccccugguguuccccagcgacgaguucgacgccagcaucagccaggugaacgagaagaucaaccagagccuggccuucaucagaaagagcgacgagcugcugcacaacgugaacgugggcaagagcaccaccaacaucaugaucaccaccaucaucaucgugaucaucgugauccugcugcugcugaucgccgugggccuguuccuguacugcaaggccagaugaggacuaguggaagcauuuuccuggcugauuaaaagaaauuacucagcuauggucaucuguuccuguuagaaggcuaugcagcauauuauauacuaugcgcauguuaugaaaugcauaauaaaaaauuuuaaaaaaucuaaaagaucuaaaaaaaaaaaaaaaaaaaaaaaaaaaaaaaaaaaaaaaaaaaaaaaaaaaaaaaaaaaaaaaaugcaucccccccccccccccccccccccccccccccaaaggcucuuuucagagccaccagaauu

SEQ ID NO: 12935 - RNA, 2060 nt, Artificial Sequence
  mRNA product Design c-2 comprising derived and/or modified sequence from HRSV(Memphis-37)__AIY60640.1__F-del_DSCav1 (opt5)
gggagacuccugucgggcggaaguaggaggaguagaguuuaaaaacaguacucuuuuuccgguucgggacguaguugaagcaacgacaagccggauaaccgcucuugagacaggaagcuuaccauggagcugcccauccucaagaccaacgccauuacaacgauccuggcugccgugacccuuugcuucgcgagcucccagaauauuacagaagaguuuuaccaaucuaccuguagcgcugucuccaaaggcuaucugucugcccucagaacagggugguacaccagcguuaucacaauugaacuguccaacaucaaggagaauaaaugcaacggaaccgacgccaaggugaaacuuaucaagcaggaacuggauaaguauaaaaaugcugugacggagcuccagcugcugaugcagucuaccccugccgcuaacaaucgggcccgcagagagcucccgcgguucaugaacuacacacugaauaacaccaagaauaacaaugucacacuuagcaaaaagcgcaaaagacgguuucugggcuuccuccugggggugggauccgcgauugccagcggcaucgcuguuuguaaggugcuucaccuggaaggggaggucaacaagauuaaaaaugcccuccugucuaccaacaaggcugugguuucccugagcaacggagugucuguccucacguuuaaagugcuggaccuuaagaauuauaucgauaaacaacugcuccccauucugaacaagcaguccugcagcaucucuaauauugaaacagugaucgaguuccagcagaaaaacaaucgccuucuggagaucaccagagaauuuuccgucaacgccggcguuacaaccccugugagcaccuacaugcucacaaauuccgagcugcugucucucauuaacgacaugcccaucacgaaugaucaaaagaagcugaugagcaacaaugugcagauuguccggcagcaguccuauagcaucauguguauuaucaaagaagaggugcuugcguacguugugcaacugccucucuacggcgucaucgacacccccugcuggaagcugcauacaucuccucuuuguaccacaaacaccaaagaaggguccaauauuugccugacgcgcacagauagaggaugguauugugacaacgccggcagcgugucuuucuuuccgcaggcugagaccugcaagguucagagcaaucggguguucugugauaccaugaacucccucacacugcccucugaggucaaccugugcaauaucgacauuuuuaacccuaaauacgauugcaagaucaugaccagcaagacagacguguccagcucugucauuacgucccucggggccaucgugagcuguuauggaaaaaccaagugcacagcuucuaauaaaaaccgcggcaucauuaagaccuucuccaaugggugugauuacguuagcaacaaaggaguggacacagucuccgugggcaauacccuguauuacguuaacaagcaagaaggcaagucucuuuaugugaaaggggagcccaucauuaauuuuuacgacccucuggucuuccccagcgaugaguucgacgccuccaucucucaggugaacgaaaagauuaaucagagccucgccuuuaucagaaaauccgaugaacugcugcacaacgugaauguuggaaagagcacgaccaacauuaugaucacaaccaucauuaucgucauuaucgugauucuucuccugcugaucgcugugggccucuuccuguacugcaaagcgcggugaggacuaguggaagcauuuuccuggcugauuaaaagaaauuacucagcuauggucaucuguuccuguuagaaggcuaugcagcauauuauauacuaugcgcauguuaugaaaugcauaauaaaaaauuuuaaaaaaucuaaaagaucuaaaaaaaaaaaaaaaaaaaaaaaaaaaaaaaaaaaaaaaaaaaaaaaaaaaaaaaaaaaaaaaaugcaucccccccccccccccccccccccccccccccaaaggcucuuuucagagccaccagaauu

SEQ ID NO: 12936 - RNA, 2060 nt, Artificial Sequence
  mRNA product Design c-2 comprising derived and/or modified sequence from HRSV(Memphis-37)__AIY60640.1__F-del_DSCav1 (opt6)
gggagacuccugucgggcggaaguaggaggaguagaguuuaaaaacaguacucuuuuuccgguucgggacguaguugaagcaacgacaagccggauaaccgcucuugagacaggaagcuuaccauggaauuaccaauccuuaaaacaaacgcaauaacaaccauccucgcagcaguaacucucugcuucgcuucaucucaaaacaucacagaagaauuuuaccaaagcacaugcucagcuguauccaaagguuaucuaucagccuugagaaccggaugguacacaucaguaauaacaauugaacuaucaaacauuaaagaaaacaaaugcaacggcaccgacgcaaaaguaaaacuaaucaaacaagaacuagacaaauauaaaaaugcaguaacagaauuacaauuauuaaugcaauccacaccagcugcaaacaaccgagcccgaagagaacuaccaagauucaugaacuacacacuaaacaacaccaaaaauaacaacgucacccuaucuaaaaaacguaaaagaagauucuuaggauuccucuuaggagucggauccgcaauagcaagcggcauagccguauguaaaguccuacacuuagaaggugaagugaauaaaauaaaaaacgcccuauuaagcacuaacaaagcaguagucucccuaucaaacggaguuucaguacucacauucaaaguacucgaccucaaaaacuacaucgacaaacaacuuuuaccaauucuaaacaaacaaucaugcuccauaucuaauaucgaaaccgucaucgaauuucaacaaaaaaacaauagacuacuagaaauaacuagagaauuuucaguaaacgccggcguuacgacaccagucucuacauacauguuaaccaauucagaacucuuaucauuaaucaacgacaugccaauaacaaacgaccaaaaaaaacuaauguccaauaacguacaaauagucagacaacaaucauacucaauuaugugcauaauaaaagaagaaguacuagcuuacguaguacaacucccccuauacggcguaauagacacuccauguuggaaauuacacacaucaccauuauguaccaccaauacaaaagaaggcucaaacauaugccuaacaagaacagauagaggaugguauugcgacaacgcaggcucaguuuccuuuuucccccaagcagaaaccugcaaaguacaaucaaaucguguuuuuugcgacaccaugaacucacucacauuaccaucagaaguaaaccuaugcaacauagacauauucaacccaaaauacgacugcaaaaucaugacaucaaaaacagacguauccucuucaguaauuacuagcuuaggagcaauagucucuuguuauggaaaaacaaaaugcacagccaguaacaaaaaccgcggaauaauaaaaaccuucucaaacgguugcgauuacgucucuaacaaaggagucgacacaguaucaguaggcaauacauuauacuacguuaacaaacaagaaggaaaaucuuuauacgucaaaggagaacccauuauaaacuuuuacgacccauuagucuucccuuccgacgaauuugacgccagcauuucacaaguaaacgaaaaaauaaaccaaucacucgcauuuauaagaaaaucugacgaauuacuccacaacguaaacguaggaaaauccacaacaaacauaaugauaacaaccauaaucaucgucauaauagucauacuucuccuauuaauugcaguaggcuuauuccuauacuguaaagcacgauaaggacuaguggaagcauuuuccuggcugauuaaaagaaauuacucagcuauggucaucuguuccuguuagaaggcuaugcagcauauuauauacuaugcgcauguuaugaaaugcauaauaaaaaauuuuaaaaaaucuaaaagaucuaaaaaaaaaaaaaaaaaaaaaaaaaaaaaaaaaaaaaaaaaaaaaaaaaaaaaaaaaaaaaaaaugcaucccccccccccccccccccccccccccccccaaaggcucuuuucagagccaccagaauu

SEQ ID NO: 12937 - RNA, 2060 nt, Artificial Sequence
  mRNA product Design c-2 comprising derived and/or modified sequence from HRSV(Memphis-37)__AIY60640.1__F-del_DSCav1 (opt11)
gggagacuccugucgggcggaaguaggaggaguagaguuuaaaaacaguacucuuuuuccgguucgggacguaguugaagcaacgacaagccggauaaccgcucuugagacaggaagcuuaccauggaacuaccaauccuaaaaacuaacgcaaucaccacaauccucgccgccgucacccuuugcuuugcguccucccaaaacauuacugaagaguucuaccaauccacgugcuccgccgucuccaaagguuaccuauccgcccuuaggaccggcugguacaccagcgucaucaccaucgaacuuuccaacaucaaagaaaacaaauguaacggcaccgacgcaaaagucaaacuuauuaaacaggaacucgacaaauauaagaaugccgucaccgaauuacaacuccucaugcaauccacccccgccgccaacaaccgagcaaggcgcgaacucccucgauucaugaauuacacccucaacaauaccaaaaacaacaacgucacccuauccaagaaacgcaaaagacgcuucuugggcuuccuccucggcgugggcuccgcaauagccuccgguauugccgugugcaaagucuuacaccucgaaggcgaggucaacaaaaucaaaaacgcccuccucuccaccaacaaagccgucgucagccuauccaacggcguuuccguccucaccuucaaaguacucgaccucaaaaacuacaucgacaaacaacuccuacccauacuaaacaaacaauccugcuccauuuccaacaucgaaaccguaaucgaguuccaacagaaaaacaaucgccuccuagaaaucacacgugaauuuucaguuaacgccggaguaacaacuccuguaucuaccuacaugcucaccaauuccgaacuccucagccucauaaacgacaugccaauaacaaacgaccaaaagaaacucaugucuaacaacguacaaaucgucagacaacaaaguuacucaaucauguguaucaucaaagaggaaguccuagcauacgugguccaacucccccucuacggaguaaucgacaccccaugcuggaaacuacacaccagcccccucuguaccacaaacacgaaagaagguuccaacaucugccugacccgaaccgaccgcggcugguacugcgauaacgcuggcuccgucucauucuucccccaagcagaaaccugcaaaguacaauccaaccgaguauucugcgacaccaugaacucacucacccuccccagcgaaguaaaccucugcaacaucgacauauucaacccaaaauacgacugcaaaauuaugaccucuaaaacagacguauccuccucuguaaucacaucccucggggccaucgucuccugcuacggcaaaaccaaaugcaccgccuccaacaaaaaccgcggaaucauaaaaaccuucuccaacggaugcgacuacgucucaaauaaaggcgucgacaccgucuccgucggcaacacgcuauacuacgucaacaaacaagaaggcaaaucacucuacgucaaaggugagcccaucaucaauuucuacgauccccucgucuucccaagcgacgaguucgacgccagcauaucccaaguaaacgagaaaaucaaccaaagccuggccuucauccgcaaauccgacgaacuacuacacaacguaaacguaggcaaguccacuaccaacauaaugaucaccacaaucaucauagucauaaucguuauacuacuccugcucaucgccguaggccucuuccucuauugcaaagcccgauagggacuaguggaagcauuuuccuggcugauuaaaagaaauuacucagcuauggucaucuguuccuguuagaaggcuaugcagcauauuauauacuaugcgcauguuaugaaaugcauaauaaaaaauuuuaaaaaaucuaaaagaucuaaaaaaaaaaaaaaaaaaaaaaaaaaaaaaaaaaaaaaaaaaaaaaaaaaaaaaaaaaaaaaaaugcaucccccccccccccccccccccccccccccccaaaggcucuuuucagagccaccagaauu

SEQ ID NO: 12938 - RNA, 2037 nt, Artificial Sequence
  mRNA product Design c-3 comprising derived and/or modified sequence from HRSV(Memphis-37)__AIY60640.1__F-del_DSCav1 (opt1)
gggagaguccgcucagccagguugcagaagcggcuuagcguguguccuaaucuucucucugcguguagguaggccugugccgcaaacaagcuuaccauggagcugcccauccucaagaccaacgccaucaccacgauccuggccgcggugacccugugcuucgccagcucccagaacaucaccgaggaguucuaccagagcacgugcuccgccgucagcaagggcuaccucuccgcccugcgcaccgggugguacaccagcgugaucaccaucgagcuguccaacaucaaggagaacaagugcaacggcaccgacgccaaggugaagcucaucaagcaggagcuggacaaguacaagaacgcggucacggagcugcagcuccugaugcagagcaccccggccgccaacaaccgggcccgccgggagcugccccgcuucaugaacuacacccucaacaacaccaagaacaacaacgugacgcuguccaagaagcggaagcgccgguuccugggguuccuccugggcguggggagcgcgaucgccuccggcaucgccgucugcaaggugcugcaccucgagggcgaggugaacaagaucaagaacgcccugcuguccaccaacaaggccgucgugagccucuccaacggggugagcguccugaccuucaaggugcuggaccucaagaacuacaucgacaagcagcugcugcccauccugaacaagcagagcugcuccaucagcaacaucgagaccgucaucgaguuccagcagaagaacaaccgccuccuggagaucacgcgggaguucagcgugaacgcgggcgugaccacccccgucuccaccuacaugcugacgaacagcgagcuccugucccugaucaacgacaugccgaucaccaacgaccagaagaagcucaugagcaacaacgugcagaucgugcgccagcaguccuacagcaucaugugcaucaucaaggaggagguccuggccuacguggugcagcugccccucuacggggucaucgacacccccugcuggaagcugcacaccagcccccugugcacgaccaacaccaaggagggcuccaacaucugccucacccggacggaccgcgggugguacugcgacaacgccggcagcguguccuucuucccgcaggccgagaccugcaagguccagagcaaccggguguucugcgacaccaugaacucccugacccugcccagcgaggugaaccucugcaacaucgacaucuucaaccccaaguacgacugcaagaucaugacguccaagaccgacgucagcuccagcgugaucaccucccugggcgccaucgugagcugcuacgggaagaccaagugcacggcgagcaacaagaaccgcggcaucaucaagaccuucuccaacgggugcgacuacgucagcaacaagggcguggacaccguguccgucggcaacacccuguacuacgugaacaagcaggagggcaagagccucuacgugaagggggagcccaucaucaacuucuacgacccgcuggucuuccccuccgacgaguucgacgccagcaucucccaggugaacgagaagaucaaccagagccuggccuucauccggaaguccgacgagcuccugcacaacgugaacgucggcaagagcaccacgaacaucaugaucaccaccaucaucaucgugaucaucgugauccugcugcuccugaucgccgucgggcuguuccucuacugcaaggcccgcugaggacuaguacuggcugcaucucccuuuccucuguccuccauccuucucccaggauggugaagggggaccugguacccagugauccccaccccaggauccuaaaucaugacuuaccugcuaauaaaaacucauuggaaaagugagaagaucuaaaaaaaaaaaaaaaaaaaaaaaaaaaaaaaaaaaaaaaaaaaaaaaaaaaaaaaaaaaaaaaaugcaucccccccccccccccccccccccccccccccaaaggcucuuuucagagccaccagaauu

SEQ ID NO: 12939 - RNA, 2037 nt, Artificial Sequence
  mRNA product Design c-3 comprising derived and/or modified sequence from HRSV(Memphis-37)__AIY60640.1__F-del_DSCav1 (opt1)
gggagaguccgcucagccagguugcagaagcggcuuagcguguguccuaaucuucucucugcguguagguaggccugugccgcaaacaagcuuaccauggagcugcccauccucaagaccaacgccaucaccacgauccuggccgcggugacccugugcuucgccagcucccagaacaucaccgaggaguucuaccagagcacgugcuccgccgucagcaagggcuaccucuccgcccugcgcaccgggugguacaccagcgugaucaccaucgagcuguccaacaucaaggagaacaagugcaacggcaccgacgccaaggugaagcucaucaagcaggagcuggacaaguacaagaacgcggucacggagcugcagcuccugaugcagagcaccccggccgccaacaaccgggcccgccgggagcugccccgcuucaugaacuacacccucaacaacaccaagaacaacaacgugacgcuguccaagaagcggaagcgccgguuccugggguuccuccugggcguggggagcgcgaucgccuccggcaucgccgucugcaaggugcugcaccucgagggcgaggugaacaagaucaagaacgcccugcugagcaccaacaaggccgucgugucccucagcaacgggguguccguccugaccuucaaggugcuggaccucaagaacuacaucgacaagcagcugcugcccauccucaacaagcagagcugcuccaucagcaacaucgagaccgugaucgaguuccagcagaagaacaaccgccugcuggagaucacgcgggaguucuccgucaacgcgggcgugaccacccccgugagcaccuacaugcucacgaacagcgagcugcugucccucaucaacgacaugccgaucaccaacgaccagaagaagcugaugagcaacaacguccagaucgugcgccagcaguccuacagcaucaugugcaucaucaaggaggaggugcuggccuacgucgugcagcucccccuguacggggugaucgacacccccugcuggaagcugcacaccagcccccucugcacgaccaacaccaaggagggcagcaacaucugccugacccggacggaccgcgggugguacugcgacaacgccggcuccgucagcuucuucccgcaggccgagaccugcaaggugcaguccaaccgggucuucugcgacaccaugaacagccugacccuccccuccgaggugaaccugugcaacaucgacaucuucaaccccaaguacgacugcaagaucaugacgagcaagaccgacguguccagcuccgucaucaccagccugggcgccaucguguccugcuacgggaagaccaagugcacggcgagcaacaagaaccgcggcaucaucaagaccuucuccaacgggugcgacuacgugagcaacaagggcgucgacaccgugagcgugggcaacacccucuacuacgucaacaagcaggaggggaagucccuguacgugaagggcgagcccaucaucaacuucuacgacccgcugguguuccccagcgacgaguucgacgccuccaucagccaggucaacgagaagaucaaccagucccucgccuucauccggaaguccgacgagcugcugcacaacgugaacguggggaaguccaccacgaacaucaugaucaccaccaucaucaucgucaucaucgugauccugcuccugcugaucgccgugggccucuuccuguacugcaaggcccgcugaggacuaguacuggcugcaucucccuuuccucuguccuccauccuucucccaggauggugaagggggaccugguacccagugauccccaccccaggauccuaaaucaugacuuaccugcuaauaaaaacucauuggaaaagugagaagaucuaaaaaaaaaaaaaaaaaaaaaaaaaaaaaaaaaaaaaaaaaaaaaaaaaaaaaaaaaaaaaaaaugcaucccccccccccccccccccccccccccccccaaaggcucuuuucagagccaccagaauu

SEQ ID NO: 12940 - RNA, 2037 nt, Artificial Sequence
  mRNA product Design c-3 comprising derived and/or modified sequence from HRSV(Memphis-37)__AIY60640.1__F-del_DSCav1 (opt2)
gggagaguccgcucagccagguugcagaagcggcuuagcguguguccuaaucuucucucugcguguagguaggccugugccgcaaacaagcuuaccauggagcuccccauccucaagaccaacgccaucaccaccauccucgccgccgucacccucugcuucgccuccucccagaacaucaccgaggaguucuaccaguccaccugcuccgccgucuccaagggcuaccucuccgcccuccgcaccggcugguacaccuccgucaucaccaucgagcucuccaacaucaaggagaacaagugcaacggcaccgacgccaaggucaagcucaucaagcaggagcucgacaaguacaagaacgccgucaccgagcuccagcuccucaugcaguccacccccgccgccaacaaccgcgcccgccgcgagcucccccgcuucaugaacuacacccucaacaacaccaagaacaacaacgucacccucuccaagaagcgcaagcgccgcuuccucggcuuccuccucggcgucggcuccgccaucgccuccggcaucgccgucugcaagguccuccaccucgagggcgaggucaacaagaucaagaacgcccuccucuccaccaacaaggccgucgucucccucuccaacggcgucuccguccucaccuucaagguccucgaccucaagaacuacaucgacaagcagcuccuccccauccucaacaagcaguccugcuccaucuccaacaucgagaccgucaucgaguuccagcagaagaacaaccgccuccucgagaucacccgcgaguucuccgucaacgccggcgucaccacccccgucuccaccuacaugcucaccaacuccgagcuccucucccucaucaacgacaugcccaucaccaacgaccagaagaagcucauguccaacaacguccagaucguccgccagcaguccuacuccaucaugugcaucaucaaggaggagguccucgccuacgucguccagcucccccucuacggcgucaucgacacccccugcuggaagcuccacaccuccccccucugcaccaccaacaccaaggagggcuccaacaucugccucacccgcaccgaccgcggcugguacugcgacaacgccggcuccgucuccuucuucccccaggccgagaccugcaagguccaguccaaccgcgucuucugcgacaccaugaacucccucacccuccccuccgaggucaaccucugcaacaucgacaucuucaaccccaaguacgacugcaagaucaugaccuccaagaccgacgucuccuccuccgucaucaccucccucggcgccaucgucuccugcuacggcaagaccaagugcaccgccuccaacaagaaccgcggcaucaucaagaccuucuccaacggcugcgacuacgucuccaacaagggcgucgacaccgucuccgucggcaacacccucuacuacgucaacaagcaggagggcaagucccucuacgucaagggcgagcccaucaucaacuucuacgacccccucgucuuccccuccgacgaguucgacgccuccaucucccaggucaacgagaagaucaaccagucccucgccuucauccgcaaguccgacgagcuccuccacaacgucaacgucggcaaguccaccaccaacaucaugaucaccaccaucaucaucgucaucaucgucauccuccuccuccucaucgccgucggccucuuccucuacugcaaggcccgcugaggacuaguacuggcugcaucucccuuuccucuguccuccauccuucucccaggauggugaagggggaccugguacccagugauccccaccccaggauccuaaaucaugacuuaccugcuaauaaaaacucauuggaaaagugagaagaucuaaaaaaaaaaaaaaaaaaaaaaaaaaaaaaaaaaaaaaaaaaaaaaaaaaaaaaaaaaaaaaaaugcaucccccccccccccccccccccccccccccccaaaggcucuuuucagagccaccagaauu

SEQ ID NO: 12941 - RNA, 2037 nt, Artificial Sequence
  mRNA product Design c-3 comprising derived and/or modified sequence from HRSV(Memphis-37)__AIY60640.1__F-del_DSCav1 (opt3)
gggagaguccgcucagccagguugcagaagcggcuuagcguguguccuaaucuucucucugcguguagguaggccugugccgcaaacaagcuuaccauggagcugcccauccucaagaccaacgccauuacaacuauacuugcugcagugacgcugugcuucgccagcucccagaauaucaccgaagaguuuuaccaaucuacauguucagcggucaguaaaggcuauuugagcgcuuuaagaacugggugguacaccuccguuauuacaaucgaacugucuaacauuaaggagaauaaaugcaacggaaccgacgccaaggugaaacuaaucaagcaggaacucgauaaguauaaaaaugcaguaacugagcugcagcuucugaugcagucgaccccugccgcuaacaauagggcacggcgcgaguugccacgauucaugaacuacacacucaauaacacgaagaauaacaaugugacucugagcaaaaagcguaaaagaagguuucuggguuuccucuuaggcgucgggucagccauagcuaguggaaucgccguguguaagguucugcaccuugaaggcgaggugaacaagauuaaaaaugcguugcuguccaccaacaaggcagucgugucucuaagcaacgguguauccguucucacauuuaaagugcuggaccuuaagaauuauaucgauaaacaacuguugccgauucucaacaagcagucaugcaguaucagcaauauagaaacugucauugaguuccagcagaaaaacaaucggcuguuagagaucacccgcgaauuuucugugaacgccggggugacaacccccgucuccacguacaugcugacuaauucagagcuccuuagccugauuaacgacaugccuaucacaaaugaucaaaagaaguugaugaguaacaauguucagaucgugagacagcagucuuauuccauuauguguauaaucaaagaagagguacuagcuuacgugguccaacugccacucuacggagugauugacacccccugcuggaagcugcauacuagcccucuuuguacaaccaacacgaaagaaggcucgaauaucugccugaccaggacagaucggggcugguauugugacaacgccgggucuguuuccuucuuuccacaggcagagacuugcaaggugcagucaaaucgcgucuucugugauaccaugaacaguuugacacuccccagcgaggugaaccugugcaauauagacauuuuuaacccuaaauacgauugcaagaucaugacuuccaagaccgacguaucuagcucaguuaucacaaguuuaggagcuauuguguccuguuaugguaaaaccaagugcacugccagcaauaaaaaccgaggcaucauuaagacguucucuaaugggugugauuacgucucaaacaaaggaguggacacagucagugugggcaauacccuguauuacguuaacaagcaagaagguaagagccuauaugugaaaggggagccaauaaucaauuuuuacgacccgcucguauuccccuccgaugaguucgacgcgucuauuucgcaggucaacgaaaagaucaaucagagccuggccuuuaucagaaaauccgaugaacuuuugcacaacgugaauguuggaaagucaacuaccaacauuaugauaacaaccaucauuaucgugauuaucgucauacugcuccugcuuaucgcagugggccuguucuuguacugcaaagcuaggugaggacuaguacuggcugcaucucccuuuccucuguccuccauccuucucccaggauggugaagggggaccugguacccagugauccccaccccaggauccuaaaucaugacuuaccugcuaauaaaaacucauuggaaaagugagaagaucuaaaaaaaaaaaaaaaaaaaaaaaaaaaaaaaaaaaaaaaaaaaaaaaaaaaaaaaaaaaaaaaaugcaucccccccccccccccccccccccccccccccaaaggcucuuuucagagccaccagaauu

SEQ ID NO: 12942 - RNA, 2037 nt, Artificial Sequence
  mRNA product Design c-3 comprising derived and/or modified sequence from HRSV(Memphis-37)__AIY60640.1__F-del_DSCav1 (opt4)
gggagaguccgcucagccagguugcagaagcggcuuagcguguguccuaaucuucucucugcguguagguaggccugugccgcaaacaagcuuaccauggagcugcccauccugaagaccaacgccaucaccaccauccuggccgccgugacccugugcuucgccagcagccagaacaucaccgaggaguucuaccagagcaccugcagcgccgugagcaagggcuaccugagcgcccugagaaccggcugguacaccagcgugaucaccaucgagcugagcaacaucaaggagaacaagugcaacggcaccgacgccaaggugaagcugaucaagcaggagcuggacaaguacaagaacgccgugaccgagcugcagcugcugaugcagagcacccccgccgccaacaacagagccagaagagagcugcccagauucaugaacuacacccugaacaacaccaagaacaacaacgugacccugagcaagaagagaaagagaagauuccugggcuuccugcugggcgugggcagcgccaucgccagcggcaucgccgugugcaaggugcugcaccuggagggcgaggugaacaagaucaagaacgcccugcugagcaccaacaaggccguggugagccugagcaacggcgugagcgugcugaccuucaaggugcuggaccugaagaacuacaucgacaagcagcugcugcccauccugaacaagcagagcugcagcaucagcaacaucgagaccgugaucgaguuccagcagaagaacaacagacugcuggagaucaccagagaguucagcgugaacgccggcgugaccacccccgugagcaccuacaugcugaccaacagcgagcugcugagccugaucaacgacaugcccaucaccaacgaccagaagaagcugaugagcaacaacgugcagaucgugagacagcagagcuacagcaucaugugcaucaucaaggaggaggugcuggccuacguggugcagcugccccuguacggcgugaucgacacccccugcuggaagcugcacaccagcccccugugcaccaccaacaccaaggagggcagcaacaucugccugaccagaaccgacagaggcugguacugcgacaacgccggcagcgugagcuucuucccccaggccgagaccugcaaggugcagagcaacagaguguucugcgacaccaugaacagccugacccugcccagcgaggugaaccugugcaacaucgacaucuucaaccccaaguacgacugcaagaucaugaccagcaagaccgacgugagcagcagcgugaucaccagccugggcgccaucgugagcugcuacggcaagaccaagugcaccgccagcaacaagaacagaggcaucaucaagaccuucagcaacggcugcgacuacgugagcaacaagggcguggacaccgugagcgugggcaacacccuguacuacgugaacaagcaggagggcaagagccuguacgugaagggcgagcccaucaucaacuucuacgacccccugguguuccccagcgacgaguucgacgccagcaucagccaggugaacgagaagaucaaccagagccuggccuucaucagaaagagcgacgagcugcugcacaacgugaacgugggcaagagcaccaccaacaucaugaucaccaccaucaucaucgugaucaucgugauccugcugcugcugaucgccgugggccuguuccuguacugcaaggccagaugaggacuaguacuggcugcaucucccuuuccucuguccuccauccuucucccaggauggugaagggggaccugguacccagugauccccaccccaggauccuaaaucaugacuuaccugcuaauaaaaacucauuggaaaagugagaagaucuaaaaaaaaaaaaaaaaaaaaaaaaaaaaaaaaaaaaaaaaaaaaaaaaaaaaaaaaaaaaaaaaugcaucccccccccccccccccccccccccccccccaaaggcucuuuucagagccaccagaauu

SEQ ID NO: 12943 - RNA, 2037 nt, Artificial Sequence
  mRNA product Design c-3 comprising derived and/or modified sequence from HRSV(Memphis-37)__AIY60640.1__F-del_DSCav1 (opt5)
gggagaguccgcucagccagguugcagaagcggcuuagcguguguccuaaucuucucucugcguguagguaggccugugccgcaaacaagcuuaccauggagcugcccauccucaagaccaacgccauuacaacgauccuggcugccgugacccuuugcuucgcgagcucccagaauauuacagaagaguuuuaccaaucuaccuguagcgcugucuccaaaggcuaucugucugcccucagaacagggugguacaccagcguuaucacaauugaacuguccaacaucaaggagaauaaaugcaacggaaccgacgccaaggugaaacuuaucaagcaggaacuggauaaguauaaaaaugcugugacggagcuccagcugcugaugcagucuaccccugccgcuaacaaucgggcccgcagagagcucccgcgguucaugaacuacacacugaauaacaccaagaauaacaaugucacacuuagcaaaaagcgcaaaagacgguuucugggcuuccuccugggggugggauccgcgauugccagcggcaucgcuguuuguaaggugcuucaccuggaaggggaggucaacaagauuaaaaaugcccuccugucuaccaacaaggcugugguuucccugagcaacggagugucuguccucacguuuaaagugcuggaccuuaagaauuauaucgauaaacaacugcuccccauucugaacaagcaguccugcagcaucucuaauauugaaacagugaucgaguuccagcagaaaaacaaucgccuucuggagaucaccagagaauuuuccgucaacgccggcguuacaaccccugugagcaccuacaugcucacaaauuccgagcugcugucucucauuaacgacaugcccaucacgaaugaucaaaagaagcugaugagcaacaaugugcagauuguccggcagcaguccuauagcaucauguguauuaucaaagaagaggugcuugcguacguugugcaacugccucucuacggcgucaucgacacccccugcuggaagcugcauacaucuccucuuuguaccacaaacaccaaagaaggguccaauauuugccugacgcgcacagauagaggaugguauugugacaacgccggcagcgugucuuucuuuccgcaggcugagaccugcaagguucagagcaaucggguguucugugauaccaugaacucccucacacugcccucugaggucaaccugugcaauaucgacauuuuuaacccuaaauacgauugcaagaucaugaccagcaagacagacguguccagcucugucauuacgucccucggggccaucgugagcuguuauggaaaaaccaagugcacagcuucuaauaaaaaccgcggcaucauuaagaccuucuccaaugggugugauuacguuagcaacaaaggaguggacacagucuccgugggcaauacccuguauuacguuaacaagcaagaaggcaagucucuuuaugugaaaggggagcccaucauuaauuuuuacgacccucuggucuuccccagcgaugaguucgacgccuccaucucucaggugaacgaaaagauuaaucagagccucgccuuuaucagaaaauccgaugaacugcugcacaacgugaauguuggaaagagcacgaccaacauuaugaucacaaccaucauuaucgucauuaucgugauucuucuccugcugaucgcugugggccucuuccuguacugcaaagcgcggugaggacuaguacuggcugcaucucccuuuccucuguccuccauccuucucccaggauggugaagggggaccugguacccagugauccccaccccaggauccuaaaucaugacuuaccugcuaauaaaaacucauuggaaaagugagaagaucuaaaaaaaaaaaaaaaaaaaaaaaaaaaaaaaaaaaaaaaaaaaaaaaaaaaaaaaaaaaaaaaaugcaucccccccccccccccccccccccccccccccaaaggcucuuuucagagccaccagaauu

SEQ ID NO: 12944 - RNA, 2037 nt, Artificial Sequence
  mRNA product Design c-3 comprising derived and/or modified sequence from HRSV(Memphis-37)__AIY60640.1__F-del_DSCav1 (opt6)
gggagaguccgcucagccagguugcagaagcggcuuagcguguguccuaaucuucucucugcguguagguaggccugugccgcaaacaagcuuaccauggaauuaccaauccuuaaaacaaacgcaauaacaaccauccucgcagcaguaacucucugcuucgcuucaucucaaaacaucacagaagaauuuuaccaaagcacaugcucagcuguauccaaagguuaucuaucagccuugagaaccggaugguacacaucaguaauaacaauugaacuaucaaacauuaaagaaaacaaaugcaacggcaccgacgcaaaaguaaaacuaaucaaacaagaacuagacaaauauaaaaaugcaguaacagaauuacaauuauuaaugcaauccacaccagcugcaaacaaccgagcccgaagagaacuaccaagauucaugaacuacacacuaaacaacaccaaaaauaacaacgucacccuaucuaaaaaacguaaaagaagauucuuaggauuccucuuaggagucggauccgcaauagcaagcggcauagccguauguaaaguccuacacuuagaaggugaagugaauaaaauaaaaaacgcccuauuaagcacuaacaaagcaguagucucccuaucaaacggaguuucaguacucacauucaaaguacucgaccucaaaaacuacaucgacaaacaacuuuuaccaauucuaaacaaacaaucaugcuccauaucuaauaucgaaaccgucaucgaauuucaacaaaaaaacaauagacuacuagaaauaacuagagaauuuucaguaaacgccggcguuacgacaccagucucuacauacauguuaaccaauucagaacucuuaucauuaaucaacgacaugccaauaacaaacgaccaaaaaaaacuaauguccaauaacguacaaauagucagacaacaaucauacucaauuaugugcauaauaaaagaagaaguacuagcuuacguaguacaacucccccuauacggcguaauagacacuccauguuggaaauuacacacaucaccauuauguaccaccaauacaaaagaaggcucaaacauaugccuaacaagaacagauagaggaugguauugcgacaacgcaggcucaguuuccuuuuucccccaagcagaaaccugcaaaguacaaucaaaucguguuuuuugcgacaccaugaacucacucacauuaccaucagaaguaaaccuaugcaacauagacauauucaacccaaaauacgacugcaaaaucaugacaucaaaaacagacguauccucuucaguaauuacuagcuuaggagcaauagucucuuguuauggaaaaacaaaaugcacagccaguaacaaaaaccgcggaauaauaaaaaccuucucaaacgguugcgauuacgucucuaacaaaggagucgacacaguaucaguaggcaauacauuauacuacguuaacaaacaagaaggaaaaucuuuauacgucaaaggagaacccauuauaaacuuuuacgacccauuagucuucccuuccgacgaauuugacgccagcauuucacaaguaaacgaaaaaauaaaccaaucacucgcauuuauaagaaaaucugacgaauuacuccacaacguaaacguaggaaaauccacaacaaacauaaugauaacaaccauaaucaucgucauaauagucauacuucuccuauuaauugcaguaggcuuauuccuauacuguaaagcacgauaaggacuaguacuggcugcaucucccuuuccucuguccuccauccuucucccaggauggugaagggggaccugguacccagugauccccaccccaggauccuaaaucaugacuuaccugcuaauaaaaacucauuggaaaagugagaagaucuaaaaaaaaaaaaaaaaaaaaaaaaaaaaaaaaaaaaaaaaaaaaaaaaaaaaaaaaaaaaaaaaugcaucccccccccccccccccccccccccccccccaaaggcucuuuucagagccaccagaauu

SEQ ID NO: 12945 - RNA, 2037 nt, Artificial Sequence
  mRNA product Design c-3 comprising derived and/or modified sequence from HRSV(Memphis-37)__AIY60640.1__F-del_DSCav1 (opt11)
gggagaguccgcucagccagguugcagaagcggcuuagcguguguccuaaucuucucucugcguguagguaggccugugccgcaaacaagcuuaccauggaacuaccaauccuaaaaacuaacgcaaucaccacaauccucgccgccgucacccuuugcuuugcguccucccaaaacauuacugaagaguucuaccaauccacgugcuccgccgucuccaaagguuaccuauccgcccuuaggaccggcugguacaccagcgucaucaccaucgaacuuuccaacaucaaagaaaacaaauguaacggcaccgacgcaaaagucaaacuuauuaaacaggaacucgacaaauauaagaaugccgucaccgaauuacaacuccucaugcaauccacccccgccgccaacaaccgagcaaggcgcgaacucccucgauucaugaauuacacccucaacaauaccaaaaacaacaacgucacccuauccaagaaacgcaaaagacgcuucuugggcuuccuccucggcgugggcuccgcaauagccuccgguauugccgugugcaaagucuuacaccucgaaggcgaggucaacaaaaucaaaaacgcccuccucuccaccaacaaagccgucgucagccuauccaacggcguuuccguccucaccuucaaaguacucgaccucaaaaacuacaucgacaaacaacuccuacccauacuaaacaaacaauccugcuccauuuccaacaucgaaaccguaaucgaguuccaacagaaaaacaaucgccuccuagaaaucacacgugaauuuucaguuaacgccggaguaacaacuccuguaucuaccuacaugcucaccaauuccgaacuccucagccucauaaacgacaugccaauaacaaacgaccaaaagaaacucaugucuaacaacguacaaaucgucagacaacaaaguuacucaaucauguguaucaucaaagaggaaguccuagcauacgugguccaacucccccucuacggaguaaucgacaccccaugcuggaaacuacacaccagcccccucuguaccacaaacacgaaagaagguuccaacaucugccugacccgaaccgaccgcggcugguacugcgauaacgcuggcuccgucucauucuucccccaagcagaaaccugcaaaguacaauccaaccgaguauucugcgacaccaugaacucacucacccuccccagcgaaguaaaccucugcaacaucgacauauucaacccaaaauacgacugcaaaauuaugaccucuaaaacagacguauccuccucuguaaucacaucccucggggccaucgucuccugcuacggcaaaaccaaaugcaccgccuccaacaaaaaccgcggaaucauaaaaaccuucuccaacggaugcgacuacgucucaaauaaaggcgucgacaccgucuccgucggcaacacgcuauacuacgucaacaaacaagaaggcaaaucacucuacgucaaaggugagcccaucaucaauuucuacgauccccucgucuucccaagcgacgaguucgacgccagcauaucccaaguaaacgagaaaaucaaccaaagccuggccuucauccgcaaauccgacgaacuacuacacaacguaaacguaggcaaguccacuaccaacauaaugaucaccacaaucaucauagucauaaucguuauacuacuccugcucaucgccguaggccucuuccucuauugcaaagcccgauagggacuaguacuggcugcaucucccuuuccucuguccuccauccuucucccaggauggugaagggggaccugguacccagugauccccaccccaggauccuaaaucaugacuuaccugcuaauaaaaacucauuggaaaagugagaagaucuaaaaaaaaaaaaaaaaaaaaaaaaaaaaaaaaaaaaaaaaaaaaaaaaaaaaaaaaaaaaaaaaugcaucccccccccccccccccccccccccccccccaaaggcucuuuucagagccaccagaauu

SEQ ID NO: 12946 - RNA, 2033 nt, Artificial Sequence
  mRNA product Design c-4 comprising derived and/or modified sequence from HRSV(Memphis-37)__AIY60640.1__F-del_DSCav1 (opt1)
gggagaguccgcucagccagguugcagaagcggcuuagcguguguccuaaucuucucucugcguguagguaggccugugccgcaaacaagcuuaccauggagcugcccauccucaagaccaacgccaucaccacgauccuggccgcggugacccugugcuucgccagcucccagaacaucaccgaggaguucuaccagagcacgugcuccgccgucagcaagggcuaccucuccgcccugcgcaccgggugguacaccagcgugaucaccaucgagcuguccaacaucaaggagaacaagugcaacggcaccgacgccaaggugaagcucaucaagcaggagcuggacaaguacaagaacgcggucacggagcugcagcuccugaugcagagcaccccggccgccaacaaccgggcccgccgggagcugccccgcuucaugaacuacacccucaacaacaccaagaacaacaacgugacgcuguccaagaagcggaagcgccgguuccugggguuccuccugggcguggggagcgcgaucgccuccggcaucgccgucugcaaggugcugcaccucgagggcgaggugaacaagaucaagaacgcccugcuguccaccaacaaggccgucgugagccucuccaacggggugagcguccugaccuucaaggugcuggaccucaagaacuacaucgacaagcagcugcugcccauccugaacaagcagagcugcuccaucagcaacaucgagaccgucaucgaguuccagcagaagaacaaccgccuccuggagaucacgcgggaguucagcgugaacgcgggcgugaccacccccgucuccaccuacaugcugacgaacagcgagcuccugucccugaucaacgacaugccgaucaccaacgaccagaagaagcucaugagcaacaacgugcagaucgugcgccagcaguccuacagcaucaugugcaucaucaaggaggagguccuggccuacguggugcagcugccccucuacggggucaucgacacccccugcuggaagcugcacaccagcccccugugcacgaccaacaccaaggagggcuccaacaucugccucacccggacggaccgcgggugguacugcgacaacgccggcagcguguccuucuucccgcaggccgagaccugcaagguccagagcaaccggguguucugcgacaccaugaacucccugacccugcccagcgaggugaaccucugcaacaucgacaucuucaaccccaaguacgacugcaagaucaugacguccaagaccgacgucagcuccagcgugaucaccucccugggcgccaucgugagcugcuacgggaagaccaagugcacggcgagcaacaagaaccgcggcaucaucaagaccuucuccaacgggugcgacuacgucagcaacaagggcguggacaccguguccgucggcaacacccuguacuacgugaacaagcaggagggcaagagccucuacgugaagggggagcccaucaucaacuucuacgacccgcuggucuuccccuccgacgaguucgacgccagcaucucccaggugaacgagaagaucaaccagagccuggccuucauccggaaguccgacgagcuccugcacaacgugaacgucggcaagagcaccacgaacaucaugaucaccaccaucaucaucgugaucaucgugauccugcugcuccugaucgccgucgggcuguuccucuacugcaaggcccgcugaggacuaguggaagcauuuuccuggcugauuaaaagaaauuacucagcuauggucaucuguuccuguuagaaggcuaugcagcauauuauauacuaugcgcauguuaugaaaugcauaauaaaaaauuuuaaaaaaucuaaaagaucuaaaaaaaaaaaaaaaaaaaaaaaaaaaaaaaaaaaaaaaaaaaaaaaaaaaaaaaaaaaaaaaaugcaucccccccccccccccccccccccccccccccaaaggcucuuuucagagccaccagaauu

SEQ ID NO: 12947 - RNA, 2033 nt, Artificial Sequence
  mRNA product Design c-4 comprising derived and/or modified sequence from HRSV(Memphis-37)__AIY60640.1__F-del_DSCav1 (opt1)
gggagaguccgcucagccagguugcagaagcggcuuagcguguguccuaaucuucucucugcguguagguaggccugugccgcaaacaagcuuaccauggagcugcccauccucaagaccaacgccaucaccacgauccuggccgcggugacccugugcuucgccagcucccagaacaucaccgaggaguucuaccagagcacgugcuccgccgucagcaagggcuaccucuccgcccugcgcaccgggugguacaccagcgugaucaccaucgagcuguccaacaucaaggagaacaagugcaacggcaccgacgccaaggugaagcucaucaagcaggagcuggacaaguacaagaacgcggucacggagcugcagcuccugaugcagagcaccccggccgccaacaaccgggcccgccgggagcugccccgcuucaugaacuacacccucaacaacaccaagaacaacaacgugacgcuguccaagaagcggaagcgccgguuccugggguuccuccugggcguggggagcgcgaucgccuccggcaucgccgucugcaaggugcugcaccucgagggcgaggugaacaagaucaagaacgcccugcugagcaccaacaaggccgucgugucccucagcaacgggguguccguccugaccuucaaggugcuggaccucaagaacuacaucgacaagcagcugcugcccauccucaacaagcagagcugcuccaucagcaacaucgagaccgugaucgaguuccagcagaagaacaaccgccugcuggagaucacgcgggaguucuccgucaacgcgggcgugaccacccccgugagcaccuacaugcucacgaacagcgagcugcugucccucaucaacgacaugccgaucaccaacgaccagaagaagcugaugagcaacaacguccagaucgugcgccagcaguccuacagcaucaugugcaucaucaaggaggaggugcuggccuacgucgugcagcucccccuguacggggugaucgacacccccugcuggaagcugcacaccagcccccucugcacgaccaacaccaaggagggcagcaacaucugccugacccggacggaccgcgggugguacugcgacaacgccggcuccgucagcuucuucccgcaggccgagaccugcaaggugcaguccaaccgggucuucugcgacaccaugaacagccugacccuccccuccgaggugaaccugugcaacaucgacaucuucaaccccaaguacgacugcaagaucaugacgagcaagaccgacguguccagcuccgucaucaccagccugggcgccaucguguccugcuacgggaagaccaagugcacggcgagcaacaagaaccgcggcaucaucaagaccuucuccaacgggugcgacuacgugagcaacaagggcgucgacaccgugagcgugggcaacacccucuacuacgucaacaagcaggaggggaagucccuguacgugaagggcgagcccaucaucaacuucuacgacccgcugguguuccccagcgacgaguucgacgccuccaucagccaggucaacgagaagaucaaccagucccucgccuucauccggaaguccgacgagcugcugcacaacgugaacguggggaaguccaccacgaacaucaugaucaccaccaucaucaucgucaucaucgugauccugcuccugcugaucgccgugggccucuuccuguacugcaaggcccgcugaggacuaguggaagcauuuuccuggcugauuaaaagaaauuacucagcuauggucaucuguuccuguuagaaggcuaugcagcauauuauauacuaugcgcauguuaugaaaugcauaauaaaaaauuuuaaaaaaucuaaaagaucuaaaaaaaaaaaaaaaaaaaaaaaaaaaaaaaaaaaaaaaaaaaaaaaaaaaaaaaaaaaaaaaaugcaucccccccccccccccccccccccccccccccaaaggcucuuuucagagccaccagaauu

SEQ ID NO: 12948 - RNA, 2033 nt, Artificial Sequence
  mRNA product Design c-4 comprising derived and/or modified sequence from HRSV(Memphis-37)__AIY60640.1__F-del_DSCav1 (opt2)
gggagaguccgcucagccagguugcagaagcggcuuagcguguguccuaaucuucucucugcguguagguaggccugugccgcaaacaagcuuaccauggagcuccccauccucaagaccaacgccaucaccaccauccucgccgccgucacccucugcuucgccuccucccagaacaucaccgaggaguucuaccaguccaccugcuccgccgucuccaagggcuaccucuccgcccuccgcaccggcugguacaccuccgucaucaccaucgagcucuccaacaucaaggagaacaagugcaacggcaccgacgccaaggucaagcucaucaagcaggagcucgacaaguacaagaacgccgucaccgagcuccagcuccucaugcaguccacccccgccgccaacaaccgcgcccgccgcgagcucccccgcuucaugaacuacacccucaacaacaccaagaacaacaacgucacccucuccaagaagcgcaagcgccgcuuccucggcuuccuccucggcgucggcuccgccaucgccuccggcaucgccgucugcaagguccuccaccucgagggcgaggucaacaagaucaagaacgcccuccucuccaccaacaaggccgucgucucccucuccaacggcgucuccguccucaccuucaagguccucgaccucaagaacuacaucgacaagcagcuccuccccauccucaacaagcaguccugcuccaucuccaacaucgagaccgucaucgaguuccagcagaagaacaaccgccuccucgagaucacccgcgaguucuccgucaacgccggcgucaccacccccgucuccaccuacaugcucaccaacuccgagcuccucucccucaucaacgacaugcccaucaccaacgaccagaagaagcucauguccaacaacguccagaucguccgccagcaguccuacuccaucaugugcaucaucaaggaggagguccucgccuacgucguccagcucccccucuacggcgucaucgacacccccugcuggaagcuccacaccuccccccucugcaccaccaacaccaaggagggcuccaacaucugccucacccgcaccgaccgcggcugguacugcgacaacgccggcuccgucuccuucuucccccaggccgagaccugcaagguccaguccaaccgcgucuucugcgacaccaugaacucccucacccuccccuccgaggucaaccucugcaacaucgacaucuucaaccccaaguacgacugcaagaucaugaccuccaagaccgacgucuccuccuccgucaucaccucccucggcgccaucgucuccugcuacggcaagaccaagugcaccgccuccaacaagaaccgcggcaucaucaagaccuucuccaacggcugcgacuacgucuccaacaagggcgucgacaccgucuccgucggcaacacccucuacuacgucaacaagcaggagggcaagucccucuacgucaagggcgagcccaucaucaacuucuacgacccccucgucuuccccuccgacgaguucgacgccuccaucucccaggucaacgagaagaucaaccagucccucgccuucauccgcaaguccgacgagcuccuccacaacgucaacgucggcaaguccaccaccaacaucaugaucaccaccaucaucaucgucaucaucgucauccuccuccuccucaucgccgucggccucuuccucuacugcaaggcccgcugaggacuaguggaagcauuuuccuggcugauuaaaagaaauuacucagcuauggucaucuguuccuguuagaaggcuaugcagcauauuauauacuaugcgcauguuaugaaaugcauaauaaaaaauuuuaaaaaaucuaaaagaucuaaaaaaaaaaaaaaaaaaaaaaaaaaaaaaaaaaaaaaaaaaaaaaaaaaaaaaaaaaaaaaaaugcaucccccccccccccccccccccccccccccccaaaggcucuuuucagagccaccagaauu

SEQ ID NO: 12949 - RNA, 2033 nt, Artificial Sequence
  mRNA product Design c-4 comprising derived and/or modified sequence from HRSV(Memphis-37)__AIY60640.1__F-del_DSCav1 (opt3)
gggagaguccgcucagccagguugcagaagcggcuuagcguguguccuaaucuucucucugcguguagguaggccugugccgcaaacaagcuuaccauggagcugcccauccucaagaccaacgccauuacaacuauacuugcugcagugacgcugugcuucgccagcucccagaauaucaccgaagaguuuuaccaaucuacauguucagcggucaguaaaggcuauuugagcgcuuuaagaacugggugguacaccuccguuauuacaaucgaacugucuaacauuaaggagaauaaaugcaacggaaccgacgccaaggugaaacuaaucaagcaggaacucgauaaguauaaaaaugcaguaacugagcugcagcuucugaugcagucgaccccugccgcuaacaauagggcacggcgcgaguugccacgauucaugaacuacacacucaauaacacgaagaauaacaaugugacucugagcaaaaagcguaaaagaagguuucuggguuuccucuuaggcgucgggucagccauagcuaguggaaucgccguguguaagguucugcaccuugaaggcgaggugaacaagauuaaaaaugcguugcuguccaccaacaaggcagucgugucucuaagcaacgguguauccguucucacauuuaaagugcuggaccuuaagaauuauaucgauaaacaacuguugccgauucucaacaagcagucaugcaguaucagcaauauagaaacugucauugaguuccagcagaaaaacaaucggcuguuagagaucacccgcgaauuuucugugaacgccggggugacaacccccgucuccacguacaugcugacuaauucagagcuccuuagccugauuaacgacaugccuaucacaaaugaucaaaagaaguugaugaguaacaauguucagaucgugagacagcagucuuauuccauuauguguauaaucaaagaagagguacuagcuuacgugguccaacugccacucuacggagugauugacacccccugcuggaagcugcauacuagcccucuuuguacaaccaacacgaaagaaggcucgaauaucugccugaccaggacagaucggggcugguauugugacaacgccgggucuguuuccuucuuuccacaggcagagacuugcaaggugcagucaaaucgcgucuucugugauaccaugaacaguuugacacuccccagcgaggugaaccugugcaauauagacauuuuuaacccuaaauacgauugcaagaucaugacuuccaagaccgacguaucuagcucaguuaucacaaguuuaggagcuauuguguccuguuaugguaaaaccaagugcacugccagcaauaaaaaccgaggcaucauuaagacguucucuaaugggugugauuacgucucaaacaaaggaguggacacagucagugugggcaauacccuguauuacguuaacaagcaagaagguaagagccuauaugugaaaggggagccaauaaucaauuuuuacgacccgcucguauuccccuccgaugaguucgacgcgucuauuucgcaggucaacgaaaagaucaaucagagccuggccuuuaucagaaaauccgaugaacuuuugcacaacgugaauguuggaaagucaacuaccaacauuaugauaacaaccaucauuaucgugauuaucgucauacugcuccugcuuaucgcagugggccuguucuuguacugcaaagcuaggugaggacuaguggaagcauuuuccuggcugauuaaaagaaauuacucagcuauggucaucuguuccuguuagaaggcuaugcagcauauuauauacuaugcgcauguuaugaaaugcauaauaaaaaauuuuaaaaaaucuaaaagaucuaaaaaaaaaaaaaaaaaaaaaaaaaaaaaaaaaaaaaaaaaaaaaaaaaaaaaaaaaaaaaaaaugcaucccccccccccccccccccccccccccccccaaaggcucuuuucagagccaccagaauu

SEQ ID NO: 12950 - RNA, 2033 nt, Artificial Sequence
  mRNA product Design c-4 comprising derived and/or modified sequence from HRSV(Memphis-37)__AIY60640.1__F-del_DSCav1 (opt4)
gggagaguccgcucagccagguugcagaagcggcuuagcguguguccuaaucuucucucugcguguagguaggccugugccgcaaacaagcuuaccauggagcugcccauccugaagaccaacgccaucaccaccauccuggccgccgugacccugugcuucgccagcagccagaacaucaccgaggaguucuaccagagcaccugcagcgccgugagcaagggcuaccugagcgcccugagaaccggcugguacaccagcgugaucaccaucgagcugagcaacaucaaggagaacaagugcaacggcaccgacgccaaggugaagcugaucaagcaggagcuggacaaguacaagaacgccgugaccgagcugcagcugcugaugcagagcacccccgccgccaacaacagagccagaagagagcugcccagauucaugaacuacacccugaacaacaccaagaacaacaacgugacccugagcaagaagagaaagagaagauuccugggcuuccugcugggcgugggcagcgccaucgccagcggcaucgccgugugcaaggugcugcaccuggagggcgaggugaacaagaucaagaacgcccugcugagcaccaacaaggccguggugagccugagcaacggcgugagcgugcugaccuucaaggugcuggaccugaagaacuacaucgacaagcagcugcugcccauccugaacaagcagagcugcagcaucagcaacaucgagaccgugaucgaguuccagcagaagaacaacagacugcuggagaucaccagagaguucagcgugaacgccggcgugaccacccccgugagcaccuacaugcugaccaacagcgagcugcugagccugaucaacgacaugcccaucaccaacgaccagaagaagcugaugagcaacaacgugcagaucgugagacagcagagcuacagcaucaugugcaucaucaaggaggaggugcuggccuacguggugcagcugccccuguacggcgugaucgacacccccugcuggaagcugcacaccagcccccugugcaccaccaacaccaaggagggcagcaacaucugccugaccagaaccgacagaggcugguacugcgacaacgccggcagcgugagcuucuucccccaggccgagaccugcaaggugcagagcaacagaguguucugcgacaccaugaacagccugacccugcccagcgaggugaaccugugcaacaucgacaucuucaaccccaaguacgacugcaagaucaugaccagcaagaccgacgugagcagcagcgugaucaccagccugggcgccaucgugagcugcuacggcaagaccaagugcaccgccagcaacaagaacagaggcaucaucaagaccuucagcaacggcugcgacuacgugagcaacaagggcguggacaccgugagcgugggcaacacccuguacuacgugaacaagcaggagggcaagagccuguacgugaagggcgagcccaucaucaacuucuacgacccccugguguuccccagcgacgaguucgacgccagcaucagccaggugaacgagaagaucaaccagagccuggccuucaucagaaagagcgacgagcugcugcacaacgugaacgugggcaagagcaccaccaacaucaugaucaccaccaucaucaucgugaucaucgugauccugcugcugcugaucgccgugggccuguuccuguacugcaaggccagaugaggacuaguggaagcauuuuccuggcugauuaaaagaaauuacucagcuauggucaucuguuccuguuagaaggcuaugcagcauauuauauacuaugcgcauguuaugaaaugcauaauaaaaaauuuuaaaaaaucuaaaagaucuaaaaaaaaaaaaaaaaaaaaaaaaaaaaaaaaaaaaaaaaaaaaaaaaaaaaaaaaaaaaaaaaugcaucccccccccccccccccccccccccccccccaaaggcucuuuucagagccaccagaauu

SEQ ID NO: 12951 - RNA, 2033 nt, Artificial Sequence
  mRNA product Design c-4 comprising derived and/or modified sequence from HRSV(Memphis-37)__AIY60640.1__F-del_DSCav1 (opt5)
gggagaguccgcucagccagguugcagaagcggcuuagcguguguccuaaucuucucucugcguguagguaggccugugccgcaaacaagcuuaccauggagcugcccauccucaagaccaacgccauuacaacgauccuggcugccgugacccuuugcuucgcgagcucccagaauauuacagaagaguuuuaccaaucuaccuguagcgcugucuccaaaggcuaucugucugcccucagaacagggugguacaccagcguuaucacaauugaacuguccaacaucaaggagaauaaaugcaacggaaccgacgccaaggugaaacuuaucaagcaggaacuggauaaguauaaaaaugcugugacggagcuccagcugcugaugcagucuaccccugccgcuaacaaucgggcccgcagagagcucccgcgguucaugaacuacacacugaauaacaccaagaauaacaaugucacacuuagcaaaaagcgcaaaagacgguuucugggcuuccuccugggggugggauccgcgauugccagcggcaucgcuguuuguaaggugcuucaccuggaaggggaggucaacaagauuaaaaaugcccuccugucuaccaacaaggcugugguuucccugagcaacggagugucuguccucacguuuaaagugcuggaccuuaagaauuauaucgauaaacaacugcuccccauucugaacaagcaguccugcagcaucucuaauauugaaacagugaucgaguuccagcagaaaaacaaucgccuucuggagaucaccagagaauuuuccgucaacgccggcguuacaaccccugugagcaccuacaugcucacaaauuccgagcugcugucucucauuaacgacaugcccaucacgaaugaucaaaagaagcugaugagcaacaaugugcagauuguccggcagcaguccuauagcaucauguguauuaucaaagaagaggugcuugcguacguugugcaacugccucucuacggcgucaucgacacccccugcuggaagcugcauacaucuccucuuuguaccacaaacaccaaagaaggguccaauauuugccugacgcgcacagauagaggaugguauugugacaacgccggcagcgugucuuucuuuccgcaggcugagaccugcaagguucagagcaaucggguguucugugauaccaugaacucccucacacugcccucugaggucaaccugugcaauaucgacauuuuuaacccuaaauacgauugcaagaucaugaccagcaagacagacguguccagcucugucauuacgucccucggggccaucgugagcuguuauggaaaaaccaagugcacagcuucuaauaaaaaccgcggcaucauuaagaccuucuccaaugggugugauuacguuagcaacaaaggaguggacacagucuccgugggcaauacccuguauuacguuaacaagcaagaaggcaagucucuuuaugugaaaggggagcccaucauuaauuuuuacgacccucuggucuuccccagcgaugaguucgacgccuccaucucucaggugaacgaaaagauuaaucagagccucgccuuuaucagaaaauccgaugaacugcugcacaacgugaauguuggaaagagcacgaccaacauuaugaucacaaccaucauuaucgucauuaucgugauucuucuccugcugaucgcugugggccucuuccuguacugcaaagcgcggugaggacuaguggaagcauuuuccuggcugauuaaaagaaauuacucagcuauggucaucuguuccuguuagaaggcuaugcagcauauuauauacuaugcgcauguuaugaaaugcauaauaaaaaauuuuaaaaaaucuaaaagaucuaaaaaaaaaaaaaaaaaaaaaaaaaaaaaaaaaaaaaaaaaaaaaaaaaaaaaaaaaaaaaaaaugcaucccccccccccccccccccccccccccccccaaaggcucuuuucagagccaccagaauu

SEQ ID NO: 12952 - RNA, 2033 nt, Artificial Sequence
  mRNA product Design c-4 comprising derived and/or modified sequence from HRSV(Memphis-37)__AIY60640.1__F-del_DSCav1 (opt6)
gggagaguccgcucagccagguugcagaagcggcuuagcguguguccuaaucuucucucugcguguagguaggccugugccgcaaacaagcuuaccauggaauuaccaauccuuaaaacaaacgcaauaacaaccauccucgcagcaguaacucucugcuucgcuucaucucaaaacaucacagaagaauuuuaccaaagcacaugcucagcuguauccaaagguuaucuaucagccuugagaaccggaugguacacaucaguaauaacaauugaacuaucaaacauuaaagaaaacaaaugcaacggcaccgacgcaaaaguaaaacuaaucaaacaagaacuagacaaauauaaaaaugcaguaacagaauuacaauuauuaaugcaauccacaccagcugcaaacaaccgagcccgaagagaacuaccaagauucaugaacuacacacuaaacaacaccaaaaauaacaacgucacccuaucuaaaaaacguaaaagaagauucuuaggauuccucuuaggagucggauccgcaauagcaagcggcauagccguauguaaaguccuacacuuagaaggugaagugaauaaaauaaaaaacgcccuauuaagcacuaacaaagcaguagucucccuaucaaacggaguuucaguacucacauucaaaguacucgaccucaaaaacuacaucgacaaacaacuuuuaccaauucuaaacaaacaaucaugcuccauaucuaauaucgaaaccgucaucgaauuucaacaaaaaaacaauagacuacuagaaauaacuagagaauuuucaguaaacgccggcguuacgacaccagucucuacauacauguuaaccaauucagaacucuuaucauuaaucaacgacaugccaauaacaaacgaccaaaaaaaacuaauguccaauaacguacaaauagucagacaacaaucauacucaauuaugugcauaauaaaagaagaaguacuagcuuacguaguacaacucccccuauacggcguaauagacacuccauguuggaaauuacacacaucaccauuauguaccaccaauacaaaagaaggcucaaacauaugccuaacaagaacagauagaggaugguauugcgacaacgcaggcucaguuuccuuuuucccccaagcagaaaccugcaaaguacaaucaaaucguguuuuuugcgacaccaugaacucacucacauuaccaucagaaguaaaccuaugcaacauagacauauucaacccaaaauacgacugcaaaaucaugacaucaaaaacagacguauccucuucaguaauuacuagcuuaggagcaauagucucuuguuauggaaaaacaaaaugcacagccaguaacaaaaaccgcggaauaauaaaaaccuucucaaacgguugcgauuacgucucuaacaaaggagucgacacaguaucaguaggcaauacauuauacuacguuaacaaacaagaaggaaaaucuuuauacgucaaaggagaacccauuauaaacuuuuacgacccauuagucuucccuuccgacgaauuugacgccagcauuucacaaguaaacgaaaaaauaaaccaaucacucgcauuuauaagaaaaucugacgaauuacuccacaacguaaacguaggaaaauccacaacaaacauaaugauaacaaccauaaucaucgucauaauagucauacuucuccuauuaauugcaguaggcuuauuccuauacuguaaagcacgauaaggacuaguggaagcauuuuccuggcugauuaaaagaaauuacucagcuauggucaucuguuccuguuagaaggcuaugcagcauauuauauacuaugcgcauguuaugaaaugcauaauaaaaaauuuuaaaaaaucuaaaagaucuaaaaaaaaaaaaaaaaaaaaaaaaaaaaaaaaaaaaaaaaaaaaaaaaaaaaaaaaaaaaaaaaugcaucccccccccccccccccccccccccccccccaaaggcucuuuucagagccaccagaauu

SEQ ID NO: 12953 - RNA, 2033 nt, Artificial Sequence
  mRNA product Design c-4 comprising derived and/or modified sequence from HRSV(Memphis-37)__AIY60640.1__F-del_DSCav1 (opt11)
gggagaguccgcucagccagguugcagaagcggcuuagcguguguccuaaucuucucucugcguguagguaggccugugccgcaaacaagcuuaccauggaacuaccaauccuaaaaacuaacgcaaucaccacaauccucgccgccgucacccuuugcuuugcguccucccaaaacauuacugaagaguucuaccaauccacgugcuccgccgucuccaaagguuaccuauccgcccuuaggaccggcugguacaccagcgucaucaccaucgaacuuuccaacaucaaagaaaacaaauguaacggcaccgacgcaaaagucaaacuuauuaaacaggaacucgacaaauauaagaaugccgucaccgaauuacaacuccucaugcaauccacccccgccgccaacaaccgagcaaggcgcgaacucccucgauucaugaauuacacccucaacaauaccaaaaacaacaacgucacccuauccaagaaacgcaaaagacgcuucuugggcuuccuccucggcgugggcuccgcaauagccuccgguauugccgugugcaaagucuuacaccucgaaggcgaggucaacaaaaucaaaaacgcccuccucuccaccaacaaagccgucgucagccuauccaacggcguuuccguccucaccuucaaaguacucgaccucaaaaacuacaucgacaaacaacuccuacccauacuaaacaaacaauccugcuccauuuccaacaucgaaaccguaaucgaguuccaacagaaaaacaaucgccuccuagaaaucacacgugaauuuucaguuaacgccggaguaacaacuccuguaucuaccuacaugcucaccaauuccgaacuccucagccucauaaacgacaugccaauaacaaacgaccaaaagaaacucaugucuaacaacguacaaaucgucagacaacaaaguuacucaaucauguguaucaucaaagaggaaguccuagcauacgugguccaacucccccucuacggaguaaucgacaccccaugcuggaaacuacacaccagcccccucuguaccacaaacacgaaagaagguuccaacaucugccugacccgaaccgaccgcggcugguacugcgauaacgcuggcuccgucucauucuucccccaagcagaaaccugcaaaguacaauccaaccgaguauucugcgacaccaugaacucacucacccuccccagcgaaguaaaccucugcaacaucgacauauucaacccaaaauacgacugcaaaauuaugaccucuaaaacagacguauccuccucuguaaucacaucccucggggccaucgucuccugcuacggcaaaaccaaaugcaccgccuccaacaaaaaccgcggaaucauaaaaaccuucuccaacggaugcgacuacgucucaaauaaaggcgucgacaccgucuccgucggcaacacgcuauacuacgucaacaaacaagaaggcaaaucacucuacgucaaaggugagcccaucaucaauuucuacgauccccucgucuucccaagcgacgaguucgacgccagcauaucccaaguaaacgagaaaaucaaccaaagccuggccuucauccgcaaauccgacgaacuacuacacaacguaaacguaggcaaguccacuaccaacauaaugaucaccacaaucaucauagucauaaucguuauacuacuccugcucaucgccguaggccucuuccucuauugcaaagcccgauagggacuaguggaagcauuuuccuggcugauuaaaagaaauuacucagcuauggucaucuguuccuguuagaaggcuaugcagcauauuauauacuaugcgcauguuaugaaaugcauaauaaaaaauuuuaaaaaaucuaaaagaucuaaaaaaaaaaaaaaaaaaaaaaaaaaaaaaaaaaaaaaaaaaaaaaaaaaaaaaaaaaaaaaaaugcaucccccccccccccccccccccccccccccccaaaggcucuuuucagagccaccagaauu

SEQ ID NO: 12954 - RNA, 1951 nt, Artificial Sequence
  mRNA product Design c-5 comprising derived and/or modified sequence from HRSV(Memphis-37)__AIY60640.1__F-del_DSCav1 (opt1)
gggagagcggcucggccauuuugucccagucaguccggaggcugcggcugcagaaguaccgccugcggaguaacugcaaagaagcuuaccauggagcugcccauccucaagaccaacgccaucaccacgauccuggccgcggugacccugugcuucgccagcucccagaacaucaccgaggaguucuaccagagcacgugcuccgccgucagcaagggcuaccucuccgcccugcgcaccgggugguacaccagcgugaucaccaucgagcuguccaacaucaaggagaacaagugcaacggcaccgacgccaaggugaagcucaucaagcaggagcuggacaaguacaagaacgcggucacggagcugcagcuccugaugcagagcaccccggccgccaacaaccgggcccgccgggagcugccccgcuucaugaacuacacccucaacaacaccaagaacaacaacgugacgcuguccaagaagcggaagcgccgguuccugggguuccuccugggcguggggagcgcgaucgccuccggcaucgccgucugcaaggugcugcaccucgagggcgaggugaacaagaucaagaacgcccugcuguccaccaacaaggccgucgugagccucuccaacggggugagcguccugaccuucaaggugcuggaccucaagaacuacaucgacaagcagcugcugcccauccugaacaagcagagcugcuccaucagcaacaucgagaccgucaucgaguuccagcagaagaacaaccgccuccuggagaucacgcgggaguucagcgugaacgcgggcgugaccacccccgucuccaccuacaugcugacgaacagcgagcuccugucccugaucaacgacaugccgaucaccaacgaccagaagaagcucaugagcaacaacgugcagaucgugcgccagcaguccuacagcaucaugugcaucaucaaggaggagguccuggccuacguggugcagcugccccucuacggggucaucgacacccccugcuggaagcugcacaccagcccccugugcacgaccaacaccaaggagggcuccaacaucugccucacccggacggaccgcgggugguacugcgacaacgccggcagcguguccuucuucccgcaggccgagaccugcaagguccagagcaaccggguguucugcgacaccaugaacucccugacccugcccagcgaggugaaccucugcaacaucgacaucuucaaccccaaguacgacugcaagaucaugacguccaagaccgacgucagcuccagcgugaucaccucccugggcgccaucgugagcugcuacgggaagaccaagugcacggcgagcaacaagaaccgcggcaucaucaagaccuucuccaacgggugcgacuacgucagcaacaagggcguggacaccguguccgucggcaacacccuguacuacgugaacaagcaggagggcaagagccucuacgugaagggggagcccaucaucaacuucuacgacccgcuggucuuccccuccgacgaguucgacgccagcaucucccaggugaacgagaagaucaaccagagccuggccuucauccggaaguccgacgagcuccugcacaacgugaacgucggcaagagcaccacgaacaucaugaucaccaccaucaucaucgugaucaucgugauccugcugcuccugaucgccgucgggcuguuccucuacugcaaggcccgcugaggacuagucccuguucccagagcccacuuuuuuuucuuuuuuugaaauaaaauagccugucuuucagaucuaaaaaaaaaaaaaaaaaaaaaaaaaaaaaaaaaaaaaaaaaaaaaaaaaaaaaaaaaaaaaaaaugcaucccccccccccccccccccccccccccccccaaaggcucuuuucagagccaccagaauu

SEQ ID NO: 12955 - RNA, 1951 nt, Artificial Sequence
  mRNA product Design c-5 comprising derived and/or modified sequence from HRSV(Memphis-37)__AIY60640.1__F-del_DSCav1 (opt1)
gggagagcggcucggccauuuugucccagucaguccggaggcugcggcugcagaaguaccgccugcggaguaacugcaaagaagcuuaccauggagcugcccauccucaagaccaacgccaucaccacgauccuggccgcggugacccugugcuucgccagcucccagaacaucaccgaggaguucuaccagagcacgugcuccgccgucagcaagggcuaccucuccgcccugcgcaccgggugguacaccagcgugaucaccaucgagcuguccaacaucaaggagaacaagugcaacggcaccgacgccaaggugaagcucaucaagcaggagcuggacaaguacaagaacgcggucacggagcugcagcuccugaugcagagcaccccggccgccaacaaccgggcccgccgggagcugccccgcuucaugaacuacacccucaacaacaccaagaacaacaacgugacgcuguccaagaagcggaagcgccgguuccugggguuccuccugggcguggggagcgcgaucgccuccggcaucgccgucugcaaggugcugcaccucgagggcgaggugaacaagaucaagaacgcccugcugagcaccaacaaggccgucgugucccucagcaacgggguguccguccugaccuucaaggugcuggaccucaagaacuacaucgacaagcagcugcugcccauccucaacaagcagagcugcuccaucagcaacaucgagaccgugaucgaguuccagcagaagaacaaccgccugcuggagaucacgcgggaguucuccgucaacgcgggcgugaccacccccgugagcaccuacaugcucacgaacagcgagcugcugucccucaucaacgacaugccgaucaccaacgaccagaagaagcugaugagcaacaacguccagaucgugcgccagcaguccuacagcaucaugugcaucaucaaggaggaggugcuggccuacgucgugcagcucccccuguacggggugaucgacacccccugcuggaagcugcacaccagcccccucugcacgaccaacaccaaggagggcagcaacaucugccugacccggacggaccgcgggugguacugcgacaacgccggcuccgucagcuucuucccgcaggccgagaccugcaaggugcaguccaaccgggucuucugcgacaccaugaacagccugacccuccccuccgaggugaaccugugcaacaucgacaucuucaaccccaaguacgacugcaagaucaugacgagcaagaccgacguguccagcuccgucaucaccagccugggcgccaucguguccugcuacgggaagaccaagugcacggcgagcaacaagaaccgcggcaucaucaagaccuucuccaacgggugcgacuacgugagcaacaagggcgucgacaccgugagcgugggcaacacccucuacuacgucaacaagcaggaggggaagucccuguacgugaagggcgagcccaucaucaacuucuacgacccgcugguguuccccagcgacgaguucgacgccuccaucagccaggucaacgagaagaucaaccagucccucgccuucauccggaaguccgacgagcugcugcacaacgugaacguggggaaguccaccacgaacaucaugaucaccaccaucaucaucgucaucaucgugauccugcuccugcugaucgccgugggccucuuccuguacugcaaggcccgcugaggacuagucccuguucccagagcccacuuuuuuuucuuuuuuugaaauaaaauagccugucuuucagaucuaaaaaaaaaaaaaaaaaaaaaaaaaaaaaaaaaaaaaaaaaaaaaaaaaaaaaaaaaaaaaaaaugcaucccccccccccccccccccccccccccccccaaaggcucuuuucagagccaccagaauu

SEQ ID NO: 12956 - RNA, 1951 nt, Artificial Sequence
  mRNA product Design c-5 comprising derived and/or modified sequence from HRSV(Memphis-37)__AIY60640.1__F-del_DSCav1 (opt2)
gggagagcggcucggccauuuugucccagucaguccggaggcugcggcugcagaaguaccgccugcggaguaacugcaaagaagcuuaccauggagcuccccauccucaagaccaacgccaucaccaccauccucgccgccgucacccucugcuucgccuccucccagaacaucaccgaggaguucuaccaguccaccugcuccgccgucuccaagggcuaccucuccgcccuccgcaccggcugguacaccuccgucaucaccaucgagcucuccaacaucaaggagaacaagugcaacggcaccgacgccaaggucaagcucaucaagcaggagcucgacaaguacaagaacgccgucaccgagcuccagcuccucaugcaguccacccccgccgccaacaaccgcgcccgccgcgagcucccccgcuucaugaacuacacccucaacaacaccaagaacaacaacgucacccucuccaagaagcgcaagcgccgcuuccucggcuuccuccucggcgucggcuccgccaucgccuccggcaucgccgucugcaagguccuccaccucgagggcgaggucaacaagaucaagaacgcccuccucuccaccaacaaggccgucgucucccucuccaacggcgucuccguccucaccuucaagguccucgaccucaagaacuacaucgacaagcagcuccuccccauccucaacaagcaguccugcuccaucuccaacaucgagaccgucaucgaguuccagcagaagaacaaccgccuccucgagaucacccgcgaguucuccgucaacgccggcgucaccacccccgucuccaccuacaugcucaccaacuccgagcuccucucccucaucaacgacaugcccaucaccaacgaccagaagaagcucauguccaacaacguccagaucguccgccagcaguccuacuccaucaugugcaucaucaaggaggagguccucgccuacgucguccagcucccccucuacggcgucaucgacacccccugcuggaagcuccacaccuccccccucugcaccaccaacaccaaggagggcuccaacaucugccucacccgcaccgaccgcggcugguacugcgacaacgccggcuccgucuccuucuucccccaggccgagaccugcaagguccaguccaaccgcgucuucugcgacaccaugaacucccucacccuccccuccgaggucaaccucugcaacaucgacaucuucaaccccaaguacgacugcaagaucaugaccuccaagaccgacgucuccuccuccgucaucaccucccucggcgccaucgucuccugcuacggcaagaccaagugcaccgccuccaacaagaaccgcggcaucaucaagaccuucuccaacggcugcgacuacgucuccaacaagggcgucgacaccgucuccgucggcaacacccucuacuacgucaacaagcaggagggcaagucccucuacgucaagggcgagcccaucaucaacuucuacgacccccucgucuuccccuccgacgaguucgacgccuccaucucccaggucaacgagaagaucaaccagucccucgccuucauccgcaaguccgacgagcuccuccacaacgucaacgucggcaaguccaccaccaacaucaugaucaccaccaucaucaucgucaucaucgucauccuccuccuccucaucgccgucggccucuuccucuacugcaaggcccgcugaggacuagucccuguucccagagcccacuuuuuuuucuuuuuuugaaauaaaauagccugucuuucagaucuaaaaaaaaaaaaaaaaaaaaaaaaaaaaaaaaaaaaaaaaaaaaaaaaaaaaaaaaaaaaaaaaugcaucccccccccccccccccccccccccccccccaaaggcucuuuucagagccaccagaauu

SEQ ID NO: 12957 - RNA, 1951 nt, Artificial Sequence
  mRNA product Design c-5 comprising derived and/or modified sequence from HRSV(Memphis-37)__AIY60640.1__F-del_DSCav1 (opt3)
gggagagcggcucggccauuuugucccagucaguccggaggcugcggcugcagaaguaccgccugcggaguaacugcaaagaagcuuaccauggagcugcccauccucaagaccaacgccauuacaacuauacuugcugcagugacgcugugcuucgccagcucccagaauaucaccgaagaguuuuaccaaucuacauguucagcggucaguaaaggcuauuugagcgcuuuaagaacugggugguacaccuccguuauuacaaucgaacugucuaacauuaaggagaauaaaugcaacggaaccgacgccaaggugaaacuaaucaagcaggaacucgauaaguauaaaaaugcaguaacugagcugcagcuucugaugcagucgaccccugccgcuaacaauagggcacggcgcgaguugccacgauucaugaacuacacacucaauaacacgaagaauaacaaugugacucugagcaaaaagcguaaaagaagguuucuggguuuccucuuaggcgucgggucagccauagcuaguggaaucgccguguguaagguucugcaccuugaaggcgaggugaacaagauuaaaaaugcguugcuguccaccaacaaggcagucgugucucuaagcaacgguguauccguucucacauuuaaagugcuggaccuuaagaauuauaucgauaaacaacuguugccgauucucaacaagcagucaugcaguaucagcaauauagaaacugucauugaguuccagcagaaaaacaaucggcuguuagagaucacccgcgaauuuucugugaacgccggggugacaacccccgucuccacguacaugcugacuaauucagagcuccuuagccugauuaacgacaugccuaucacaaaugaucaaaagaaguugaugaguaacaauguucagaucgugagacagcagucuuauuccauuauguguauaaucaaagaagagguacuagcuuacgugguccaacugccacucuacggagugauugacacccccugcuggaagcugcauacuagcccucuuuguacaaccaacacgaaagaaggcucgaauaucugccugaccaggacagaucggggcugguauugugacaacgccgggucuguuuccuucuuuccacaggcagagacuugcaaggugcagucaaaucgcgucuucugugauaccaugaacaguuugacacuccccagcgaggugaaccugugcaauauagacauuuuuaacccuaaauacgauugcaagaucaugacuuccaagaccgacguaucuagcucaguuaucacaaguuuaggagcuauuguguccuguuaugguaaaaccaagugcacugccagcaauaaaaaccgaggcaucauuaagacguucucuaaugggugugauuacgucucaaacaaaggaguggacacagucagugugggcaauacccuguauuacguuaacaagcaagaagguaagagccuauaugugaaaggggagccaauaaucaauuuuuacgacccgcucguauuccccuccgaugaguucgacgcgucuauuucgcaggucaacgaaaagaucaaucagagccuggccuuuaucagaaaauccgaugaacuuuugcacaacgugaauguuggaaagucaacuaccaacauuaugauaacaaccaucauuaucgugauuaucgucauacugcuccugcuuaucgcagugggccuguucuuguacugcaaagcuaggugaggacuagucccuguucccagagcccacuuuuuuuucuuuuuuugaaauaaaauagccugucuuucagaucuaaaaaaaaaaaaaaaaaaaaaaaaaaaaaaaaaaaaaaaaaaaaaaaaaaaaaaaaaaaaaaaaugcaucccccccccccccccccccccccccccccccaaaggcucuuuucagagccaccagaauu

SEQ ID NO: 12958 - RNA, 1951 nt, Artificial Sequence
  mRNA product Design c-5 comprising derived and/or modified sequence from HRSV(Memphis-37)__AIY60640.1__F-del_DSCav1 (opt4)
gggagagcggcucggccauuuugucccagucaguccggaggcugcggcugcagaaguaccgccugcggaguaacugcaaagaagcuuaccauggagcugcccauccugaagaccaacgccaucaccaccauccuggccgccgugacccugugcuucgccagcagccagaacaucaccgaggaguucuaccagagcaccugcagcgccgugagcaagggcuaccugagcgcccugagaaccggcugguacaccagcgugaucaccaucgagcugagcaacaucaaggagaacaagugcaacggcaccgacgccaaggugaagcugaucaagcaggagcuggacaaguacaagaacgccgugaccgagcugcagcugcugaugcagagcacccccgccgccaacaacagagccagaagagagcugcccagauucaugaacuacacccugaacaacaccaagaacaacaacgugacccugagcaagaagagaaagagaagauuccugggcuuccugcugggcgugggcagcgccaucgccagcggcaucgccgugugcaaggugcugcaccuggagggcgaggugaacaagaucaagaacgcccugcugagcaccaacaaggccguggugagccugagcaacggcgugagcgugcugaccuucaaggugcuggaccugaagaacuacaucgacaagcagcugcugcccauccugaacaagcagagcugcagcaucagcaacaucgagaccgugaucgaguuccagcagaagaacaacagacugcuggagaucaccagagaguucagcgugaacgccggcgugaccacccccgugagcaccuacaugcugaccaacagcgagcugcugagccugaucaacgacaugcccaucaccaacgaccagaagaagcugaugagcaacaacgugcagaucgugagacagcagagcuacagcaucaugugcaucaucaaggaggaggugcuggccuacguggugcagcugccccuguacggcgugaucgacacccccugcuggaagcugcacaccagcccccugugcaccaccaacaccaaggagggcagcaacaucugccugaccagaaccgacagaggcugguacugcgacaacgccggcagcgugagcuucuucccccaggccgagaccugcaaggugcagagcaacagaguguucugcgacaccaugaacagccugacccugcccagcgaggugaaccugugcaacaucgacaucuucaaccccaaguacgacugcaagaucaugaccagcaagaccgacgugagcagcagcgugaucaccagccugggcgccaucgugagcugcuacggcaagaccaagugcaccgccagcaacaagaacagaggcaucaucaagaccuucagcaacggcugcgacuacgugagcaacaagggcguggacaccgugagcgugggcaacacccuguacuacgugaacaagcaggagggcaagagccuguacgugaagggcgagcccaucaucaacuucuacgacccccugguguuccccagcgacgaguucgacgccagcaucagccaggugaacgagaagaucaaccagagccuggccuucaucagaaagagcgacgagcugcugcacaacgugaacgugggcaagagcaccaccaacaucaugaucaccaccaucaucaucgugaucaucgugauccugcugcugcugaucgccgugggccuguuccuguacugcaaggccagaugaggacuagucccuguucccagagcccacuuuuuuuucuuuuuuugaaauaaaauagccugucuuucagaucuaaaaaaaaaaaaaaaaaaaaaaaaaaaaaaaaaaaaaaaaaaaaaaaaaaaaaaaaaaaaaaaaugcaucccccccccccccccccccccccccccccccaaaggcucuuuucagagccaccagaauu

SEQ ID NO: 12959 - RNA, 1951 nt, Artificial Sequence
  mRNA product Design c-5 comprising derived and/or modified sequence from HRSV(Memphis-37)__AIY60640.1__F-del_DSCav1 (opt5)
gggagagcggcucggccauuuugucccagucaguccggaggcugcggcugcagaaguaccgccugcggaguaacugcaaagaagcuuaccauggagcugcccauccucaagaccaacgccauuacaacgauccuggcugccgugacccuuugcuucgcgagcucccagaauauuacagaagaguuuuaccaaucuaccuguagcgcugucuccaaaggcuaucugucugcccucagaacagggugguacaccagcguuaucacaauugaacuguccaacaucaaggagaauaaaugcaacggaaccgacgccaaggugaaacuuaucaagcaggaacuggauaaguauaaaaaugcugugacggagcuccagcugcugaugcagucuaccccugccgcuaacaaucgggcccgcagagagcucccgcgguucaugaacuacacacugaauaacaccaagaauaacaaugucacacuuagcaaaaagcgcaaaagacgguuucugggcuuccuccugggggugggauccgcgauugccagcggcaucgcuguuuguaaggugcuucaccuggaaggggaggucaacaagauuaaaaaugcccuccugucuaccaacaaggcugugguuucccugagcaacggagugucuguccucacguuuaaagugcuggaccuuaagaauuauaucgauaaacaacugcuccccauucugaacaagcaguccugcagcaucucuaauauugaaacagugaucgaguuccagcagaaaaacaaucgccuucuggagaucaccagagaauuuuccgucaacgccggcguuacaaccccugugagcaccuacaugcucacaaauuccgagcugcugucucucauuaacgacaugcccaucacgaaugaucaaaagaagcugaugagcaacaaugugcagauuguccggcagcaguccuauagcaucauguguauuaucaaagaagaggugcuugcguacguugugcaacugccucucuacggcgucaucgacacccccugcuggaagcugcauacaucuccucuuuguaccacaaacaccaaagaaggguccaauauuugccugacgcgcacagauagaggaugguauugugacaacgccggcagcgugucuuucuuuccgcaggcugagaccugcaagguucagagcaaucggguguucugugauaccaugaacucccucacacugcccucugaggucaaccugugcaauaucgacauuuuuaacccuaaauacgauugcaagaucaugaccagcaagacagacguguccagcucugucauuacgucccucggggccaucgugagcuguuauggaaaaaccaagugcacagcuucuaauaaaaaccgcggcaucauuaagaccuucuccaaugggugugauuacguuagcaacaaaggaguggacacagucuccgugggcaauacccuguauuacguuaacaagcaagaaggcaagucucuuuaugugaaaggggagcccaucauuaauuuuuacgacccucuggucuuccccagcgaugaguucgacgccuccaucucucaggugaacgaaaagauuaaucagagccucgccuuuaucagaaaauccgaugaacugcugcacaacgugaauguuggaaagagcacgaccaacauuaugaucacaaccaucauuaucgucauuaucgugauucuucuccugcugaucgcugugggccucuuccuguacugcaaagcgcggugaggacuagucccuguucccagagcccacuuuuuuuucuuuuuuugaaauaaaauagccugucuuucagaucuaaaaaaaaaaaaaaaaaaaaaaaaaaaaaaaaaaaaaaaaaaaaaaaaaaaaaaaaaaaaaaaaugcaucccccccccccccccccccccccccccccccaaaggcucuuuucagagccaccagaauu

SEQ ID NO: 12960 - RNA, 1951 nt, Artificial Sequence
  mRNA product Design c-5 comprising derived and/or modified sequence from HRSV(Memphis-37)__AIY60640.1__F-del_DSCav1 (opt6)
gggagagcggcucggccauuuugucccagucaguccggaggcugcggcugcagaaguaccgccugcggaguaacugcaaagaagcuuaccauggaauuaccaauccuuaaaacaaacgcaauaacaaccauccucgcagcaguaacucucugcuucgcuucaucucaaaacaucacagaagaauuuuaccaaagcacaugcucagcuguauccaaagguuaucuaucagccuugagaaccggaugguacacaucaguaauaacaauugaacuaucaaacauuaaagaaaacaaaugcaacggcaccgacgcaaaaguaaaacuaaucaaacaagaacuagacaaauauaaaaaugcaguaacagaauuacaauuauuaaugcaauccacaccagcugcaaacaaccgagcccgaagagaacuaccaagauucaugaacuacacacuaaacaacaccaaaaauaacaacgucacccuaucuaaaaaacguaaaagaagauucuuaggauuccucuuaggagucggauccgcaauagcaagcggcauagccguauguaaaguccuacacuuagaaggugaagugaauaaaauaaaaaacgcccuauuaagcacuaacaaagcaguagucucccuaucaaacggaguuucaguacucacauucaaaguacucgaccucaaaaacuacaucgacaaacaacuuuuaccaauucuaaacaaacaaucaugcuccauaucuaauaucgaaaccgucaucgaauuucaacaaaaaaacaauagacuacuagaaauaacuagagaauuuucaguaaacgccggcguuacgacaccagucucuacauacauguuaaccaauucagaacucuuaucauuaaucaacgacaugccaauaacaaacgaccaaaaaaaacuaauguccaauaacguacaaauagucagacaacaaucauacucaauuaugugcauaauaaaagaagaaguacuagcuuacguaguacaacucccccuauacggcguaauagacacuccauguuggaaauuacacacaucaccauuauguaccaccaauacaaaagaaggcucaaacauaugccuaacaagaacagauagaggaugguauugcgacaacgcaggcucaguuuccuuuuucccccaagcagaaaccugcaaaguacaaucaaaucguguuuuuugcgacaccaugaacucacucacauuaccaucagaaguaaaccuaugcaacauagacauauucaacccaaaauacgacugcaaaaucaugacaucaaaaacagacguauccucuucaguaauuacuagcuuaggagcaauagucucuuguuauggaaaaacaaaaugcacagccaguaacaaaaaccgcggaauaauaaaaaccuucucaaacgguugcgauuacgucucuaacaaaggagucgacacaguaucaguaggcaauacauuauacuacguuaacaaacaagaaggaaaaucuuuauacgucaaaggagaacccauuauaaacuuuuacgacccauuagucuucccuuccgacgaauuugacgccagcauuucacaaguaaacgaaaaaauaaaccaaucacucgcauuuauaagaaaaucugacgaauuacuccacaacguaaacguaggaaaauccacaacaaacauaaugauaacaaccauaaucaucgucauaauagucauacuucuccuauuaauugcaguaggcuuauuccuauacuguaaagcacgauaaggacuagucccuguucccagagcccacuuuuuuuucuuuuuuugaaauaaaauagccugucuuucagaucuaaaaaaaaaaaaaaaaaaaaaaaaaaaaaaaaaaaaaaaaaaaaaaaaaaaaaaaaaaaaaaaaugcaucccccccccccccccccccccccccccccccaaaggcucuuuucagagccaccagaauu

SEQ ID NO: 12961 - RNA, 1951 nt, Artificial Sequence
  mRNA product Design c-5 comprising derived and/or modified sequence from HRSV(Memphis-37)__AIY60640.1__F-del_DSCav1 (opt11)
gggagagcggcucggccauuuugucccagucaguccggaggcugcggcugcagaaguaccgccugcggaguaacugcaaagaagcuuaccauggaacuaccaauccuaaaaacuaacgcaaucaccacaauccucgccgccgucacccuuugcuuugcguccucccaaaacauuacugaagaguucuaccaauccacgugcuccgccgucuccaaagguuaccuauccgcccuuaggaccggcugguacaccagcgucaucaccaucgaacuuuccaacaucaaagaaaacaaauguaacggcaccgacgcaaaagucaaacuuauuaaacaggaacucgacaaauauaagaaugccgucaccgaauuacaacuccucaugcaauccacccccgccgccaacaaccgagcaaggcgcgaacucccucgauucaugaauuacacccucaacaauaccaaaaacaacaacgucacccuauccaagaaacgcaaaagacgcuucuugggcuuccuccucggcgugggcuccgcaauagccuccgguauugccgugugcaaagucuuacaccucgaaggcgaggucaacaaaaucaaaaacgcccuccucuccaccaacaaagccgucgucagccuauccaacggcguuuccguccucaccuucaaaguacucgaccucaaaaacuacaucgacaaacaacuccuacccauacuaaacaaacaauccugcuccauuuccaacaucgaaaccguaaucgaguuccaacagaaaaacaaucgccuccuagaaaucacacgugaauuuucaguuaacgccggaguaacaacuccuguaucuaccuacaugcucaccaauuccgaacuccucagccucauaaacgacaugccaauaacaaacgaccaaaagaaacucaugucuaacaacguacaaaucgucagacaacaaaguuacucaaucauguguaucaucaaagaggaaguccuagcauacgugguccaacucccccucuacggaguaaucgacaccccaugcuggaaacuacacaccagcccccucuguaccacaaacacgaaagaagguuccaacaucugccugacccgaaccgaccgcggcugguacugcgauaacgcuggcuccgucucauucuucccccaagcagaaaccugcaaaguacaauccaaccgaguauucugcgacaccaugaacucacucacccuccccagcgaaguaaaccucugcaacaucgacauauucaacccaaaauacgacugcaaaauuaugaccucuaaaacagacguauccuccucuguaaucacaucccucggggccaucgucuccugcuacggcaaaaccaaaugcaccgccuccaacaaaaaccgcggaaucauaaaaaccuucuccaacggaugcgacuacgucucaaauaaaggcgucgacaccgucuccgucggcaacacgcuauacuacgucaacaaacaagaaggcaaaucacucuacgucaaaggugagcccaucaucaauuucuacgauccccucgucuucccaagcgacgaguucgacgccagcauaucccaaguaaacgagaaaaucaaccaaagccuggccuucauccgcaaauccgacgaacuacuacacaacguaaacguaggcaaguccacuaccaacauaaugaucaccacaaucaucauagucauaaucguuauacuacuccugcucaucgccguaggccucuuccucuauugcaaagcccgauagggacuagucccuguucccagagcccacuuuuuuuucuuuuuuugaaauaaaauagccugucuuucagaucuaaaaaaaaaaaaaaaaaaaaaaaaaaaaaaaaaaaaaaaaaaaaaaaaaaaaaaaaaaaaaaaaugcaucccccccccccccccccccccccccccccccaaaggcucuuuucagagccaccagaauu

SEQ ID NO: 12962 - RNA, 1960 nt, Artificial Sequence
  mRNA product Design d-1 comprising derived and/or modified sequence from HRSV(Memphis-37)__AIY60640.1__F-del_DSCav1 (opt1)
gggagacccgugacccggaaguuguacggcuacgcgacuuucccucccacaaacccucgcgcccuuccuuuccuacuugggcccggcagaaagcuuaccauggagcugcccauccucaagaccaacgccaucaccacgauccuggccgcggugacccugugcuucgccagcucccagaacaucaccgaggaguucuaccagagcacgugcuccgccgucagcaagggcuaccucuccgcccugcgcaccgggugguacaccagcgugaucaccaucgagcuguccaacaucaaggagaacaagugcaacggcaccgacgccaaggugaagcucaucaagcaggagcuggacaaguacaagaacgcggucacggagcugcagcuccugaugcagagcaccccggccgccaacaaccgggcccgccgggagcugccccgcuucaugaacuacacccucaacaacaccaagaacaacaacgugacgcuguccaagaagcggaagcgccgguuccugggguuccuccugggcguggggagcgcgaucgccuccggcaucgccgucugcaaggugcugcaccucgagggcgaggugaacaagaucaagaacgcccugcuguccaccaacaaggccgucgugagccucuccaacggggugagcguccugaccuucaaggugcuggaccucaagaacuacaucgacaagcagcugcugcccauccugaacaagcagagcugcuccaucagcaacaucgagaccgucaucgaguuccagcagaagaacaaccgccuccuggagaucacgcgggaguucagcgugaacgcgggcgugaccacccccgucuccaccuacaugcugacgaacagcgagcuccugucccugaucaacgacaugccgaucaccaacgaccagaagaagcucaugagcaacaacgugcagaucgugcgccagcaguccuacagcaucaugugcaucaucaaggaggagguccuggccuacguggugcagcugccccucuacggggucaucgacacccccugcuggaagcugcacaccagcccccugugcacgaccaacaccaaggagggcuccaacaucugccucacccggacggaccgcgggugguacugcgacaacgccggcagcguguccuucuucccgcaggccgagaccugcaagguccagagcaaccggguguucugcgacaccaugaacucccugacccugcccagcgaggugaaccucugcaacaucgacaucuucaaccccaaguacgacugcaagaucaugacguccaagaccgacgucagcuccagcgugaucaccucccugggcgccaucgugagcugcuacgggaagaccaagugcacggcgagcaacaagaaccgcggcaucaucaagaccuucuccaacgggugcgacuacgucagcaacaagggcguggacaccguguccgucggcaacacccuguacuacgugaacaagcaggagggcaagagccucuacgugaagggggagcccaucaucaacuucuacgacccgcuggucuuccccuccgacgaguucgacgccagcaucucccaggugaacgagaagaucaaccagagccuggccuucauccggaaguccgacgagcuccugcacaacgugaacgucggcaagagcaccacgaacaucaugaucaccaccaucaucaucgugaucaucgugauccugcugcuccugaucgccgucgggcuguuccucuacugcaaggcccgcugaggacuagucccuguucccagagcccacuuuuuuuucuuuuuuugaaauaaaauagccugucuuucagaucuaaaaaaaaaaaaaaaaaaaaaaaaaaaaaaaaaaaaaaaaaaaaaaaaaaaaaaaaaaaaaaaaugcaucccccccccccccccccccccccccccccccaaaggcucuuuucagagccaccagaauu

SEQ ID NO: 12963 - RNA, 1960 nt, Artificial Sequence
  mRNA product Design d-1 comprising derived and/or modified sequence from HRSV(Memphis-37)__AIY60640.1__F-del_DSCav1 (opt1)
gggagacccgugacccggaaguuguacggcuacgcgacuuucccucccacaaacccucgcgcccuuccuuuccuacuugggcccggcagaaagcuuaccauggagcugcccauccucaagaccaacgccaucaccacgauccuggccgcggugacccugugcuucgccagcucccagaacaucaccgaggaguucuaccagagcacgugcuccgccgucagcaagggcuaccucuccgcccugcgcaccgggugguacaccagcgugaucaccaucgagcuguccaacaucaaggagaacaagugcaacggcaccgacgccaaggugaagcucaucaagcaggagcuggacaaguacaagaacgcggucacggagcugcagcuccugaugcagagcaccccggccgccaacaaccgggcccgccgggagcugccccgcuucaugaacuacacccucaacaacaccaagaacaacaacgugacgcuguccaagaagcggaagcgccgguuccugggguuccuccugggcguggggagcgcgaucgccuccggcaucgccgucugcaaggugcugcaccucgagggcgaggugaacaagaucaagaacgcccugcugagcaccaacaaggccgucgugucccucagcaacgggguguccguccugaccuucaaggugcuggaccucaagaacuacaucgacaagcagcugcugcccauccucaacaagcagagcugcuccaucagcaacaucgagaccgugaucgaguuccagcagaagaacaaccgccugcuggagaucacgcgggaguucuccgucaacgcgggcgugaccacccccgugagcaccuacaugcucacgaacagcgagcugcugucccucaucaacgacaugccgaucaccaacgaccagaagaagcugaugagcaacaacguccagaucgugcgccagcaguccuacagcaucaugugcaucaucaaggaggaggugcuggccuacgucgugcagcucccccuguacggggugaucgacacccccugcuggaagcugcacaccagcccccucugcacgaccaacaccaaggagggcagcaacaucugccugacccggacggaccgcgggugguacugcgacaacgccggcuccgucagcuucuucccgcaggccgagaccugcaaggugcaguccaaccgggucuucugcgacaccaugaacagccugacccuccccuccgaggugaaccugugcaacaucgacaucuucaaccccaaguacgacugcaagaucaugacgagcaagaccgacguguccagcuccgucaucaccagccugggcgccaucguguccugcuacgggaagaccaagugcacggcgagcaacaagaaccgcggcaucaucaagaccuucuccaacgggugcgacuacgugagcaacaagggcgucgacaccgugagcgugggcaacacccucuacuacgucaacaagcaggaggggaagucccuguacgugaagggcgagcccaucaucaacuucuacgacccgcugguguuccccagcgacgaguucgacgccuccaucagccaggucaacgagaagaucaaccagucccucgccuucauccggaaguccgacgagcugcugcacaacgugaacguggggaaguccaccacgaacaucaugaucaccaccaucaucaucgucaucaucgugauccugcuccugcugaucgccgugggccucuuccuguacugcaaggcccgcugaggacuagucccuguucccagagcccacuuuuuuuucuuuuuuugaaauaaaauagccugucuuucagaucuaaaaaaaaaaaaaaaaaaaaaaaaaaaaaaaaaaaaaaaaaaaaaaaaaaaaaaaaaaaaaaaaugcaucccccccccccccccccccccccccccccccaaaggcucuuuucagagccaccagaauu

SEQ ID NO: 12964 - RNA, 1960 nt, Artificial Sequence
  mRNA product Design d-1 comprising derived and/or modified sequence from HRSV(Memphis-37)__AIY60640.1__F-del_DSCav1 (opt2)
gggagacccgugacccggaaguuguacggcuacgcgacuuucccucccacaaacccucgcgcccuuccuuuccuacuugggcccggcagaaagcuuaccauggagcuccccauccucaagaccaacgccaucaccaccauccucgccgccgucacccucugcuucgccuccucccagaacaucaccgaggaguucuaccaguccaccugcuccgccgucuccaagggcuaccucuccgcccuccgcaccggcugguacaccuccgucaucaccaucgagcucuccaacaucaaggagaacaagugcaacggcaccgacgccaaggucaagcucaucaagcaggagcucgacaaguacaagaacgccgucaccgagcuccagcuccucaugcaguccacccccgccgccaacaaccgcgcccgccgcgagcucccccgcuucaugaacuacacccucaacaacaccaagaacaacaacgucacccucuccaagaagcgcaagcgccgcuuccucggcuuccuccucggcgucggcuccgccaucgccuccggcaucgccgucugcaagguccuccaccucgagggcgaggucaacaagaucaagaacgcccuccucuccaccaacaaggccgucgucucccucuccaacggcgucuccguccucaccuucaagguccucgaccucaagaacuacaucgacaagcagcuccuccccauccucaacaagcaguccugcuccaucuccaacaucgagaccgucaucgaguuccagcagaagaacaaccgccuccucgagaucacccgcgaguucuccgucaacgccggcgucaccacccccgucuccaccuacaugcucaccaacuccgagcuccucucccucaucaacgacaugcccaucaccaacgaccagaagaagcucauguccaacaacguccagaucguccgccagcaguccuacuccaucaugugcaucaucaaggaggagguccucgccuacgucguccagcucccccucuacggcgucaucgacacccccugcuggaagcuccacaccuccccccucugcaccaccaacaccaaggagggcuccaacaucugccucacccgcaccgaccgcggcugguacugcgacaacgccggcuccgucuccuucuucccccaggccgagaccugcaagguccaguccaaccgcgucuucugcgacaccaugaacucccucacccuccccuccgaggucaaccucugcaacaucgacaucuucaaccccaaguacgacugcaagaucaugaccuccaagaccgacgucuccuccuccgucaucaccucccucggcgccaucgucuccugcuacggcaagaccaagugcaccgccuccaacaagaaccgcggcaucaucaagaccuucuccaacggcugcgacuacgucuccaacaagggcgucgacaccgucuccgucggcaacacccucuacuacgucaacaagcaggagggcaagucccucuacgucaagggcgagcccaucaucaacuucuacgacccccucgucuuccccuccgacgaguucgacgccuccaucucccaggucaacgagaagaucaaccagucccucgccuucauccgcaaguccgacgagcuccuccacaacgucaacgucggcaaguccaccaccaacaucaugaucaccaccaucaucaucgucaucaucgucauccuccuccuccucaucgccgucggccucuuccucuacugcaaggcccgcugaggacuagucccuguucccagagcccacuuuuuuuucuuuuuuugaaauaaaauagccugucuuucagaucuaaaaaaaaaaaaaaaaaaaaaaaaaaaaaaaaaaaaaaaaaaaaaaaaaaaaaaaaaaaaaaaaugcaucccccccccccccccccccccccccccccccaaaggcucuuuucagagccaccagaauu

SEQ ID NO: 12965 - RNA, 1960 nt, Artificial Sequence
  mRNA product Design d-1 comprising derived and/or modified sequence from HRSV(Memphis-37)__AIY60640.1__F-del_DSCav1 (opt3)
gggagacccgugacccggaaguuguacggcuacgcgacuuucccucccacaaacccucgcgcccuuccuuuccuacuugggcccggcagaaagcuuaccauggagcugcccauccucaagaccaacgccauuacaacuauacuugcugcagugacgcugugcuucgccagcucccagaauaucaccgaagaguuuuaccaaucuacauguucagcggucaguaaaggcuauuugagcgcuuuaagaacugggugguacaccuccguuauuacaaucgaacugucuaacauuaaggagaauaaaugcaacggaaccgacgccaaggugaaacuaaucaagcaggaacucgauaaguauaaaaaugcaguaacugagcugcagcuucugaugcagucgaccccugccgcuaacaauagggcacggcgcgaguugccacgauucaugaacuacacacucaauaacacgaagaauaacaaugugacucugagcaaaaagcguaaaagaagguuucuggguuuccucuuaggcgucgggucagccauagcuaguggaaucgccguguguaagguucugcaccuugaaggcgaggugaacaagauuaaaaaugcguugcuguccaccaacaaggcagucgugucucuaagcaacgguguauccguucucacauuuaaagugcuggaccuuaagaauuauaucgauaaacaacuguugccgauucucaacaagcagucaugcaguaucagcaauauagaaacugucauugaguuccagcagaaaaacaaucggcuguuagagaucacccgcgaauuuucugugaacgccggggugacaacccccgucuccacguacaugcugacuaauucagagcuccuuagccugauuaacgacaugccuaucacaaaugaucaaaagaaguugaugaguaacaauguucagaucgugagacagcagucuuauuccauuauguguauaaucaaagaagagguacuagcuuacgugguccaacugccacucuacggagugauugacacccccugcuggaagcugcauacuagcccucuuuguacaaccaacacgaaagaaggcucgaauaucugccugaccaggacagaucggggcugguauugugacaacgccgggucuguuuccuucuuuccacaggcagagacuugcaaggugcagucaaaucgcgucuucugugauaccaugaacaguuugacacuccccagcgaggugaaccugugcaauauagacauuuuuaacccuaaauacgauugcaagaucaugacuuccaagaccgacguaucuagcucaguuaucacaaguuuaggagcuauuguguccuguuaugguaaaaccaagugcacugccagcaauaaaaaccgaggcaucauuaagacguucucuaaugggugugauuacgucucaaacaaaggaguggacacagucagugugggcaauacccuguauuacguuaacaagcaagaagguaagagccuauaugugaaaggggagccaauaaucaauuuuuacgacccgcucguauuccccuccgaugaguucgacgcgucuauuucgcaggucaacgaaaagaucaaucagagccuggccuuuaucagaaaauccgaugaacuuuugcacaacgugaauguuggaaagucaacuaccaacauuaugauaacaaccaucauuaucgugauuaucgucauacugcuccugcuuaucgcagugggccuguucuuguacugcaaagcuaggugaggacuagucccuguucccagagcccacuuuuuuuucuuuuuuugaaauaaaauagccugucuuucagaucuaaaaaaaaaaaaaaaaaaaaaaaaaaaaaaaaaaaaaaaaaaaaaaaaaaaaaaaaaaaaaaaaugcaucccccccccccccccccccccccccccccccaaaggcucuuuucagagccaccagaauu

SEQ ID NO: 12966 - RNA, 1960 nt, Artificial Sequence
  mRNA product Design d-1 comprising derived and/or modified sequence from HRSV(Memphis-37)__AIY60640.1__F-del_DSCav1 (opt4)
gggagacccgugacccggaaguuguacggcuacgcgacuuucccucccacaaacccucgcgcccuuccuuuccuacuugggcccggcagaaagcuuaccauggagcugcccauccugaagaccaacgccaucaccaccauccuggccgccgugacccugugcuucgccagcagccagaacaucaccgaggaguucuaccagagcaccugcagcgccgugagcaagggcuaccugagcgcccugagaaccggcugguacaccagcgugaucaccaucgagcugagcaacaucaaggagaacaagugcaacggcaccgacgccaaggugaagcugaucaagcaggagcuggacaaguacaagaacgccgugaccgagcugcagcugcugaugcagagcacccccgccgccaacaacagagccagaagagagcugcccagauucaugaacuacacccugaacaacaccaagaacaacaacgugacccugagcaagaagagaaagagaagauuccugggcuuccugcugggcgugggcagcgccaucgccagcggcaucgccgugugcaaggugcugcaccuggagggcgaggugaacaagaucaagaacgcccugcugagcaccaacaaggccguggugagccugagcaacggcgugagcgugcugaccuucaaggugcuggaccugaagaacuacaucgacaagcagcugcugcccauccugaacaagcagagcugcagcaucagcaacaucgagaccgugaucgaguuccagcagaagaacaacagacugcuggagaucaccagagaguucagcgugaacgccggcgugaccacccccgugagcaccuacaugcugaccaacagcgagcugcugagccugaucaacgacaugcccaucaccaacgaccagaagaagcugaugagcaacaacgugcagaucgugagacagcagagcuacagcaucaugugcaucaucaaggaggaggugcuggccuacguggugcagcugccccuguacggcgugaucgacacccccugcuggaagcugcacaccagcccccugugcaccaccaacaccaaggagggcagcaacaucugccugaccagaaccgacagaggcugguacugcgacaacgccggcagcgugagcuucuucccccaggccgagaccugcaaggugcagagcaacagaguguucugcgacaccaugaacagccugacccugcccagcgaggugaaccugugcaacaucgacaucuucaaccccaaguacgacugcaagaucaugaccagcaagaccgacgugagcagcagcgugaucaccagccugggcgccaucgugagcugcuacggcaagaccaagugcaccgccagcaacaagaacagaggcaucaucaagaccuucagcaacggcugcgacuacgugagcaacaagggcguggacaccgugagcgugggcaacacccuguacuacgugaacaagcaggagggcaagagccuguacgugaagggcgagcccaucaucaacuucuacgacccccugguguuccccagcgacgaguucgacgccagcaucagccaggugaacgagaagaucaaccagagccuggccuucaucagaaagagcgacgagcugcugcacaacgugaacgugggcaagagcaccaccaacaucaugaucaccaccaucaucaucgugaucaucgugauccugcugcugcugaucgccgugggccuguuccuguacugcaaggccagaugaggacuagucccuguucccagagcccacuuuuuuuucuuuuuuugaaauaaaauagccugucuuucagaucuaaaaaaaaaaaaaaaaaaaaaaaaaaaaaaaaaaaaaaaaaaaaaaaaaaaaaaaaaaaaaaaaugcaucccccccccccccccccccccccccccccccaaaggcucuuuucagagccaccagaauu

SEQ ID NO: 12967 - RNA, 1960 nt, Artificial Sequence
  mRNA product Design d-1 comprising derived and/or modified sequence from HRSV(Memphis-37)__AIY60640.1__F-del_DSCav1 (opt5)
gggagacccgugacccggaaguuguacggcuacgcgacuuucccucccacaaacccucgcgcccuuccuuuccuacuugggcccggcagaaagcuuaccauggagcugcccauccucaagaccaacgccauuacaacgauccuggcugccgugacccuuugcuucgcgagcucccagaauauuacagaagaguuuuaccaaucuaccuguagcgcugucuccaaaggcuaucugucugcccucagaacagggugguacaccagcguuaucacaauugaacuguccaacaucaaggagaauaaaugcaacggaaccgacgccaaggugaaacuuaucaagcaggaacuggauaaguauaaaaaugcugugacggagcuccagcugcugaugcagucuaccccugccgcuaacaaucgggcccgcagagagcucccgcgguucaugaacuacacacugaauaacaccaagaauaacaaugucacacuuagcaaaaagcgcaaaagacgguuucugggcuuccuccugggggugggauccgcgauugccagcggcaucgcuguuuguaaggugcuucaccuggaaggggaggucaacaagauuaaaaaugcccuccugucuaccaacaaggcugugguuucccugagcaacggagugucuguccucacguuuaaagugcuggaccuuaagaauuauaucgauaaacaacugcuccccauucugaacaagcaguccugcagcaucucuaauauugaaacagugaucgaguuccagcagaaaaacaaucgccuucuggagaucaccagagaauuuuccgucaacgccggcguuacaaccccugugagcaccuacaugcucacaaauuccgagcugcugucucucauuaacgacaugcccaucacgaaugaucaaaagaagcugaugagcaacaaugugcagauuguccggcagcaguccuauagcaucauguguauuaucaaagaagaggugcuugcguacguugugcaacugccucucuacggcgucaucgacacccccugcuggaagcugcauacaucuccucuuuguaccacaaacaccaaagaaggguccaauauuugccugacgcgcacagauagaggaugguauugugacaacgccggcagcgugucuuucuuuccgcaggcugagaccugcaagguucagagcaaucggguguucugugauaccaugaacucccucacacugcccucugaggucaaccugugcaauaucgacauuuuuaacccuaaauacgauugcaagaucaugaccagcaagacagacguguccagcucugucauuacgucccucggggccaucgugagcuguuauggaaaaaccaagugcacagcuucuaauaaaaaccgcggcaucauuaagaccuucuccaaugggugugauuacguuagcaacaaaggaguggacacagucuccgugggcaauacccuguauuacguuaacaagcaagaaggcaagucucuuuaugugaaaggggagcccaucauuaauuuuuacgacccucuggucuuccccagcgaugaguucgacgccuccaucucucaggugaacgaaaagauuaaucagagccucgccuuuaucagaaaauccgaugaacugcugcacaacgugaauguuggaaagagcacgaccaacauuaugaucacaaccaucauuaucgucauuaucgugauucuucuccugcugaucgcugugggccucuuccuguacugcaaagcgcggugaggacuagucccuguucccagagcccacuuuuuuuucuuuuuuugaaauaaaauagccugucuuucagaucuaaaaaaaaaaaaaaaaaaaaaaaaaaaaaaaaaaaaaaaaaaaaaaaaaaaaaaaaaaaaaaaaugcaucccccccccccccccccccccccccccccccaaaggcucuuuucagagccaccagaauu

SEQ ID NO: 12968 - RNA, 1960 nt, Artificial Sequence
  mRNA product Design d-1 comprising derived and/or modified sequence from HRSV(Memphis-37)__AIY60640.1__F-del_DSCav1 (opt6)
gggagacccgugacccggaaguuguacggcuacgcgacuuucccucccacaaacccucgcgcccuuccuuuccuacuugggcccggcagaaagcuuaccauggaauuaccaauccuuaaaacaaacgcaauaacaaccauccucgcagcaguaacucucugcuucgcuucaucucaaaacaucacagaagaauuuuaccaaagcacaugcucagcuguauccaaagguuaucuaucagccuugagaaccggaugguacacaucaguaauaacaauugaacuaucaaacauuaaagaaaacaaaugcaacggcaccgacgcaaaaguaaaacuaaucaaacaagaacuagacaaauauaaaaaugcaguaacagaauuacaauuauuaaugcaauccacaccagcugcaaacaaccgagcccgaagagaacuaccaagauucaugaacuacacacuaaacaacaccaaaaauaacaacgucacccuaucuaaaaaacguaaaagaagauucuuaggauuccucuuaggagucggauccgcaauagcaagcggcauagccguauguaaaguccuacacuuagaaggugaagugaauaaaauaaaaaacgcccuauuaagcacuaacaaagcaguagucucccuaucaaacggaguuucaguacucacauucaaaguacucgaccucaaaaacuacaucgacaaacaacuuuuaccaauucuaaacaaacaaucaugcuccauaucuaauaucgaaaccgucaucgaauuucaacaaaaaaacaauagacuacuagaaauaacuagagaauuuucaguaaacgccggcguuacgacaccagucucuacauacauguuaaccaauucagaacucuuaucauuaaucaacgacaugccaauaacaaacgaccaaaaaaaacuaauguccaauaacguacaaauagucagacaacaaucauacucaauuaugugcauaauaaaagaagaaguacuagcuuacguaguacaacucccccuauacggcguaauagacacuccauguuggaaauuacacacaucaccauuauguaccaccaauacaaaagaaggcucaaacauaugccuaacaagaacagauagaggaugguauugcgacaacgcaggcucaguuuccuuuuucccccaagcagaaaccugcaaaguacaaucaaaucguguuuuuugcgacaccaugaacucacucacauuaccaucagaaguaaaccuaugcaacauagacauauucaacccaaaauacgacugcaaaaucaugacaucaaaaacagacguauccucuucaguaauuacuagcuuaggagcaauagucucuuguuauggaaaaacaaaaugcacagccaguaacaaaaaccgcggaauaauaaaaaccuucucaaacgguugcgauuacgucucuaacaaaggagucgacacaguaucaguaggcaauacauuauacuacguuaacaaacaagaaggaaaaucuuuauacgucaaaggagaacccauuauaaacuuuuacgacccauuagucuucccuuccgacgaauuugacgccagcauuucacaaguaaacgaaaaaauaaaccaaucacucgcauuuauaagaaaaucugacgaauuacuccacaacguaaacguaggaaaauccacaacaaacauaaugauaacaaccauaaucaucgucauaauagucauacuucuccuauuaauugcaguaggcuuauuccuauacuguaaagcacgauaaggacuagucccuguucccagagcccacuuuuuuuucuuuuuuugaaauaaaauagccugucuuucagaucuaaaaaaaaaaaaaaaaaaaaaaaaaaaaaaaaaaaaaaaaaaaaaaaaaaaaaaaaaaaaaaaaugcaucccccccccccccccccccccccccccccccaaaggcucuuuucagagccaccagaauu

SEQ ID NO: 12969 - RNA, 1960 nt, Artificial Sequence
  mRNA product Design d-1 comprising derived and/or modified sequence from HRSV(Memphis-37)__AIY60640.1__F-del_DSCav1 (opt11)
gggagacccgugacccggaaguuguacggcuacgcgacuuucccucccacaaacccucgcgcccuuccuuuccuacuugggcccggcagaaagcuuaccauggaacuaccaauccuaaaaacuaacgcaaucaccacaauccucgccgccgucacccuuugcuuugcguccucccaaaacauuacugaagaguucuaccaauccacgugcuccgccgucuccaaagguuaccuauccgcccuuaggaccggcugguacaccagcgucaucaccaucgaacuuuccaacaucaaagaaaacaaauguaacggcaccgacgcaaaagucaaacuuauuaaacaggaacucgacaaauauaagaaugccgucaccgaauuacaacuccucaugcaauccacccccgccgccaacaaccgagcaaggcgcgaacucccucgauucaugaauuacacccucaacaauaccaaaaacaacaacgucacccuauccaagaaacgcaaaagacgcuucuugggcuuccuccucggcgugggcuccgcaauagccuccgguauugccgugugcaaagucuuacaccucgaaggcgaggucaacaaaaucaaaaacgcccuccucuccaccaacaaagccgucgucagccuauccaacggcguuuccguccucaccuucaaaguacucgaccucaaaaacuacaucgacaaacaacuccuacccauacuaaacaaacaauccugcuccauuuccaacaucgaaaccguaaucgaguuccaacagaaaaacaaucgccuccuagaaaucacacgugaauuuucaguuaacgccggaguaacaacuccuguaucuaccuacaugcucaccaauuccgaacuccucagccucauaaacgacaugccaauaacaaacgaccaaaagaaacucaugucuaacaacguacaaaucgucagacaacaaaguuacucaaucauguguaucaucaaagaggaaguccuagcauacgugguccaacucccccucuacggaguaaucgacaccccaugcuggaaacuacacaccagcccccucuguaccacaaacacgaaagaagguuccaacaucugccugacccgaaccgaccgcggcugguacugcgauaacgcuggcuccgucucauucuucccccaagcagaaaccugcaaaguacaauccaaccgaguauucugcgacaccaugaacucacucacccuccccagcgaaguaaaccucugcaacaucgacauauucaacccaaaauacgacugcaaaauuaugaccucuaaaacagacguauccuccucuguaaucacaucccucggggccaucgucuccugcuacggcaaaaccaaaugcaccgccuccaacaaaaaccgcggaaucauaaaaaccuucuccaacggaugcgacuacgucucaaauaaaggcgucgacaccgucuccgucggcaacacgcuauacuacgucaacaaacaagaaggcaaaucacucuacgucaaaggugagcccaucaucaauuucuacgauccccucgucuucccaagcgacgaguucgacgccagcauaucccaaguaaacgagaaaaucaaccaaagccuggccuucauccgcaaauccgacgaacuacuacacaacguaaacguaggcaaguccacuaccaacauaaugaucaccacaaucaucauagucauaaucguuauacuacuccugcucaucgccguaggccucuuccucuauugcaaagcccgauagggacuagucccuguucccagagcccacuuuuuuuucuuuuuuugaaauaaaauagccugucuuucagaucuaaaaaaaaaaaaaaaaaaaaaaaaaaaaaaaaaaaaaaaaaaaaaaaaaaaaaaaaaaaaaaaaugcaucccccccccccccccccccccccccccccccaaaggcucuuuucagagccaccagaauu

SEQ ID NO: 12970 - RNA, 2015 nt, Artificial Sequence
  mRNA product Design d-2 comprising derived and/or modified sequence from HRSV(Memphis-37)__AIY60640.1__F-del_DSCav1 (opt1)
gggagagcggcucggccauuuugucccagucaguccggaggcugcggcugcagaaguaccgccugcggaguaacugcaaagaagcuuaccauggagcugcccauccucaagaccaacgccaucaccacgauccuggccgcggugacccugugcuucgccagcucccagaacaucaccgaggaguucuaccagagcacgugcuccgccgucagcaagggcuaccucuccgcccugcgcaccgggugguacaccagcgugaucaccaucgagcuguccaacaucaaggagaacaagugcaacggcaccgacgccaaggugaagcucaucaagcaggagcuggacaaguacaagaacgcggucacggagcugcagcuccugaugcagagcaccccggccgccaacaaccgggcccgccgggagcugccccgcuucaugaacuacacccucaacaacaccaagaacaacaacgugacgcuguccaagaagcggaagcgccgguuccugggguuccuccugggcguggggagcgcgaucgccuccggcaucgccgucugcaaggugcugcaccucgagggcgaggugaacaagaucaagaacgcccugcuguccaccaacaaggccgucgugagccucuccaacggggugagcguccugaccuucaaggugcuggaccucaagaacuacaucgacaagcagcugcugcccauccugaacaagcagagcugcuccaucagcaacaucgagaccgucaucgaguuccagcagaagaacaaccgccuccuggagaucacgcgggaguucagcgugaacgcgggcgugaccacccccgucuccaccuacaugcugacgaacagcgagcuccugucccugaucaacgacaugccgaucaccaacgaccagaagaagcucaugagcaacaacgugcagaucgugcgccagcaguccuacagcaucaugugcaucaucaaggaggagguccuggccuacguggugcagcugccccucuacggggucaucgacacccccugcuggaagcugcacaccagcccccugugcacgaccaacaccaaggagggcuccaacaucugccucacccggacggaccgcgggugguacugcgacaacgccggcagcguguccuucuucccgcaggccgagaccugcaagguccagagcaaccggguguucugcgacaccaugaacucccugacccugcccagcgaggugaaccucugcaacaucgacaucuucaaccccaaguacgacugcaagaucaugacguccaagaccgacgucagcuccagcgugaucaccucccugggcgccaucgugagcugcuacgggaagaccaagugcacggcgagcaacaagaaccgcggcaucaucaagaccuucuccaacgggugcgacuacgucagcaacaagggcguggacaccguguccgucggcaacacccuguacuacgugaacaagcaggagggcaagagccucuacgugaagggggagcccaucaucaacuucuacgacccgcuggucuuccccuccgacgaguucgacgccagcaucucccaggugaacgagaagaucaaccagagccuggccuucauccggaaguccgacgagcuccugcacaacgugaacgucggcaagagcaccacgaacaucaugaucaccaccaucaucaucgugaucaucgugauccugcugcuccugaucgccgucgggcuguuccucuacugcaaggcccgcugaggacuaguaauaaggaaacuguaugaaugucugugggcaggaagugaagagauccuucuguaaagguuuuuggaauuaugucugcugaauaauaaacuuuuuugaaauaauaaaucugguagaaaaaugagaucuaaaaaaaaaaaaaaaaaaaaaaaaaaaaaaaaaaaaaaaaaaaaaaaaaaaaaaaaaaaaaaaaugcaucccccccccccccccccccccccccccccccaaaggcucuuuucagagccaccagaauu

SEQ ID NO: 12971 - RNA, 2015 nt, Artificial Sequence
  mRNA product Design d-2 comprising derived and/or modified sequence from HRSV(Memphis-37)__AIY60640.1__F-del_DSCav1 (opt1)
gggagagcggcucggccauuuugucccagucaguccggaggcugcggcugcagaaguaccgccugcggaguaacugcaaagaagcuuaccauggagcugcccauccucaagaccaacgccaucaccacgauccuggccgcggugacccugugcuucgccagcucccagaacaucaccgaggaguucuaccagagcacgugcuccgccgucagcaagggcuaccucuccgcccugcgcaccgggugguacaccagcgugaucaccaucgagcuguccaacaucaaggagaacaagugcaacggcaccgacgccaaggugaagcucaucaagcaggagcuggacaaguacaagaacgcggucacggagcugcagcuccugaugcagagcaccccggccgccaacaaccgggcccgccgggagcugccccgcuucaugaacuacacccucaacaacaccaagaacaacaacgugacgcuguccaagaagcggaagcgccgguuccugggguuccuccugggcguggggagcgcgaucgccuccggcaucgccgucugcaaggugcugcaccucgagggcgaggugaacaagaucaagaacgcccugcugagcaccaacaaggccgucgugucccucagcaacgggguguccguccugaccuucaaggugcuggaccucaagaacuacaucgacaagcagcugcugcccauccucaacaagcagagcugcuccaucagcaacaucgagaccgugaucgaguuccagcagaagaacaaccgccugcuggagaucacgcgggaguucuccgucaacgcgggcgugaccacccccgugagcaccuacaugcucacgaacagcgagcugcugucccucaucaacgacaugccgaucaccaacgaccagaagaagcugaugagcaacaacguccagaucgugcgccagcaguccuacagcaucaugugcaucaucaaggaggaggugcuggccuacgucgugcagcucccccuguacggggugaucgacacccccugcuggaagcugcacaccagcccccucugcacgaccaacaccaaggagggcagcaacaucugccugacccggacggaccgcgggugguacugcgacaacgccggcuccgucagcuucuucccgcaggccgagaccugcaaggugcaguccaaccgggucuucugcgacaccaugaacagccugacccuccccuccgaggugaaccugugcaacaucgacaucuucaaccccaaguacgacugcaagaucaugacgagcaagaccgacguguccagcuccgucaucaccagccugggcgccaucguguccugcuacgggaagaccaagugcacggcgagcaacaagaaccgcggcaucaucaagaccuucuccaacgggugcgacuacgugagcaacaagggcgucgacaccgugagcgugggcaacacccucuacuacgucaacaagcaggaggggaagucccuguacgugaagggcgagcccaucaucaacuucuacgacccgcugguguuccccagcgacgaguucgacgccuccaucagccaggucaacgagaagaucaaccagucccucgccuucauccggaaguccgacgagcugcugcacaacgugaacguggggaaguccaccacgaacaucaugaucaccaccaucaucaucgucaucaucgugauccugcuccugcugaucgccgugggccucuuccuguacugcaaggcccgcugaggacuaguaauaaggaaacuguaugaaugucugugggcaggaagugaagagauccuucuguaaagguuuuuggaauuaugucugcugaauaauaaacuuuuuugaaauaauaaaucugguagaaaaaugagaucuaaaaaaaaaaaaaaaaaaaaaaaaaaaaaaaaaaaaaaaaaaaaaaaaaaaaaaaaaaaaaaaaugcaucccccccccccccccccccccccccccccccaaaggcucuuuucagagccaccagaauu

SEQ ID NO: 12972 - RNA, 2015 nt, Artificial Sequence
  mRNA product Design d-2 comprising derived and/or modified sequence from HRSV(Memphis-37)__AIY60640.1__F-del_DSCav1 (opt2)
gggagagcggcucggccauuuugucccagucaguccggaggcugcggcugcagaaguaccgccugcggaguaacugcaaagaagcuuaccauggagcuccccauccucaagaccaacgccaucaccaccauccucgccgccgucacccucugcuucgccuccucccagaacaucaccgaggaguucuaccaguccaccugcuccgccgucuccaagggcuaccucuccgcccuccgcaccggcugguacaccuccgucaucaccaucgagcucuccaacaucaaggagaacaagugcaacggcaccgacgccaaggucaagcucaucaagcaggagcucgacaaguacaagaacgccgucaccgagcuccagcuccucaugcaguccacccccgccgccaacaaccgcgcccgccgcgagcucccccgcuucaugaacuacacccucaacaacaccaagaacaacaacgucacccucuccaagaagcgcaagcgccgcuuccucggcuuccuccucggcgucggcuccgccaucgccuccggcaucgccgucugcaagguccuccaccucgagggcgaggucaacaagaucaagaacgcccuccucuccaccaacaaggccgucgucucccucuccaacggcgucuccguccucaccuucaagguccucgaccucaagaacuacaucgacaagcagcuccuccccauccucaacaagcaguccugcuccaucuccaacaucgagaccgucaucgaguuccagcagaagaacaaccgccuccucgagaucacccgcgaguucuccgucaacgccggcgucaccacccccgucuccaccuacaugcucaccaacuccgagcuccucucccucaucaacgacaugcccaucaccaacgaccagaagaagcucauguccaacaacguccagaucguccgccagcaguccuacuccaucaugugcaucaucaaggaggagguccucgccuacgucguccagcucccccucuacggcgucaucgacacccccugcuggaagcuccacaccuccccccucugcaccaccaacaccaaggagggcuccaacaucugccucacccgcaccgaccgcggcugguacugcgacaacgccggcuccgucuccuucuucccccaggccgagaccugcaagguccaguccaaccgcgucuucugcgacaccaugaacucccucacccuccccuccgaggucaaccucugcaacaucgacaucuucaaccccaaguacgacugcaagaucaugaccuccaagaccgacgucuccuccuccgucaucaccucccucggcgccaucgucuccugcuacggcaagaccaagugcaccgccuccaacaagaaccgcggcaucaucaagaccuucuccaacggcugcgacuacgucuccaacaagggcgucgacaccgucuccgucggcaacacccucuacuacgucaacaagcaggagggcaagucccucuacgucaagggcgagcccaucaucaacuucuacgacccccucgucuuccccuccgacgaguucgacgccuccaucucccaggucaacgagaagaucaaccagucccucgccuucauccgcaaguccgacgagcuccuccacaacgucaacgucggcaaguccaccaccaacaucaugaucaccaccaucaucaucgucaucaucgucauccuccuccuccucaucgccgucggccucuuccucuacugcaaggcccgcugaggacuaguaauaaggaaacuguaugaaugucugugggcaggaagugaagagauccuucuguaaagguuuuuggaauuaugucugcugaauaauaaacuuuuuugaaauaauaaaucugguagaaaaaugagaucuaaaaaaaaaaaaaaaaaaaaaaaaaaaaaaaaaaaaaaaaaaaaaaaaaaaaaaaaaaaaaaaaugcaucccccccccccccccccccccccccccccccaaaggcucuuuucagagccaccagaauu

SEQ ID NO: 12973 - RNA, 2015 nt, Artificial Sequence
  mRNA product Design d-2 comprising derived and/or modified sequence from HRSV(Memphis-37)__AIY60640.1__F-del_DSCav1 (opt3)
gggagagcggcucggccauuuugucccagucaguccggaggcugcggcugcagaaguaccgccugcggaguaacugcaaagaagcuuaccauggagcugcccauccucaagaccaacgccauuacaacuauacuugcugcagugacgcugugcuucgccagcucccagaauaucaccgaagaguuuuaccaaucuacauguucagcggucaguaaaggcuauuugagcgcuuuaagaacugggugguacaccuccguuauuacaaucgaacugucuaacauuaaggagaauaaaugcaacggaaccgacgccaaggugaaacuaaucaagcaggaacucgauaaguauaaaaaugcaguaacugagcugcagcuucugaugcagucgaccccugccgcuaacaauagggcacggcgcgaguugccacgauucaugaacuacacacucaauaacacgaagaauaacaaugugacucugagcaaaaagcguaaaagaagguuucuggguuuccucuuaggcgucgggucagccauagcuaguggaaucgccguguguaagguucugcaccuugaaggcgaggugaacaagauuaaaaaugcguugcuguccaccaacaaggcagucgugucucuaagcaacgguguauccguucucacauuuaaagugcuggaccuuaagaauuauaucgauaaacaacuguugccgauucucaacaagcagucaugcaguaucagcaauauagaaacugucauugaguuccagcagaaaaacaaucggcuguuagagaucacccgcgaauuuucugugaacgccggggugacaacccccgucuccacguacaugcugacuaauucagagcuccuuagccugauuaacgacaugccuaucacaaaugaucaaaagaaguugaugaguaacaauguucagaucgugagacagcagucuuauuccauuauguguauaaucaaagaagagguacuagcuuacgugguccaacugccacucuacggagugauugacacccccugcuggaagcugcauacuagcccucuuuguacaaccaacacgaaagaaggcucgaauaucugccugaccaggacagaucggggcugguauugugacaacgccgggucuguuuccuucuuuccacaggcagagacuugcaaggugcagucaaaucgcgucuucugugauaccaugaacaguuugacacuccccagcgaggugaaccugugcaauauagacauuuuuaacccuaaauacgauugcaagaucaugacuuccaagaccgacguaucuagcucaguuaucacaaguuuaggagcuauuguguccuguuaugguaaaaccaagugcacugccagcaauaaaaaccgaggcaucauuaagacguucucuaaugggugugauuacgucucaaacaaaggaguggacacagucagugugggcaauacccuguauuacguuaacaagcaagaagguaagagccuauaugugaaaggggagccaauaaucaauuuuuacgacccgcucguauuccccuccgaugaguucgacgcgucuauuucgcaggucaacgaaaagaucaaucagagccuggccuuuaucagaaaauccgaugaacuuuugcacaacgugaauguuggaaagucaacuaccaacauuaugauaacaaccaucauuaucgugauuaucgucauacugcuccugcuuaucgcagugggccuguucuuguacugcaaagcuaggugaggacuaguaauaaggaaacuguaugaaugucugugggcaggaagugaagagauccuucuguaaagguuuuuggaauuaugucugcugaauaauaaacuuuuuugaaauaauaaaucugguagaaaaaugagaucuaaaaaaaaaaaaaaaaaaaaaaaaaaaaaaaaaaaaaaaaaaaaaaaaaaaaaaaaaaaaaaaaugcaucccccccccccccccccccccccccccccccaaaggcucuuuucagagccaccagaauu

SEQ ID NO: 12974 - RNA, 2015 nt, Artificial Sequence
  mRNA product Design d-2 comprising derived and/or modified sequence from HRSV(Memphis-37)__AIY60640.1__F-del_DSCav1 (opt4)
gggagagcggcucggccauuuugucccagucaguccggaggcugcggcugcagaaguaccgccugcggaguaacugcaaagaagcuuaccauggagcugcccauccugaagaccaacgccaucaccaccauccuggccgccgugacccugugcuucgccagcagccagaacaucaccgaggaguucuaccagagcaccugcagcgccgugagcaagggcuaccugagcgcccugagaaccggcugguacaccagcgugaucaccaucgagcugagcaacaucaaggagaacaagugcaacggcaccgacgccaaggugaagcugaucaagcaggagcuggacaaguacaagaacgccgugaccgagcugcagcugcugaugcagagcacccccgccgccaacaacagagccagaagagagcugcccagauucaugaacuacacccugaacaacaccaagaacaacaacgugacccugagcaagaagagaaagagaagauuccugggcuuccugcugggcgugggcagcgccaucgccagcggcaucgccgugugcaaggugcugcaccuggagggcgaggugaacaagaucaagaacgcccugcugagcaccaacaaggccguggugagccugagcaacggcgugagcgugcugaccuucaaggugcuggaccugaagaacuacaucgacaagcagcugcugcccauccugaacaagcagagcugcagcaucagcaacaucgagaccgugaucgaguuccagcagaagaacaacagacugcuggagaucaccagagaguucagcgugaacgccggcgugaccacccccgugagcaccuacaugcugaccaacagcgagcugcugagccugaucaacgacaugcccaucaccaacgaccagaagaagcugaugagcaacaacgugcagaucgugagacagcagagcuacagcaucaugugcaucaucaaggaggaggugcuggccuacguggugcagcugccccuguacggcgugaucgacacccccugcuggaagcugcacaccagcccccugugcaccaccaacaccaaggagggcagcaacaucugccugaccagaaccgacagaggcugguacugcgacaacgccggcagcgugagcuucuucccccaggccgagaccugcaaggugcagagcaacagaguguucugcgacaccaugaacagccugacccugcccagcgaggugaaccugugcaacaucgacaucuucaaccccaaguacgacugcaagaucaugaccagcaagaccgacgugagcagcagcgugaucaccagccugggcgccaucgugagcugcuacggcaagaccaagugcaccgccagcaacaagaacagaggcaucaucaagaccuucagcaacggcugcgacuacgugagcaacaagggcguggacaccgugagcgugggcaacacccuguacuacgugaacaagcaggagggcaagagccuguacgugaagggcgagcccaucaucaacuucuacgacccccugguguuccccagcgacgaguucgacgccagcaucagccaggugaacgagaagaucaaccagagccuggccuucaucagaaagagcgacgagcugcugcacaacgugaacgugggcaagagcaccaccaacaucaugaucaccaccaucaucaucgugaucaucgugauccugcugcugcugaucgccgugggccuguuccuguacugcaaggccagaugaggacuaguaauaaggaaacuguaugaaugucugugggcaggaagugaagagauccuucuguaaagguuuuuggaauuaugucugcugaauaauaaacuuuuuugaaauaauaaaucugguagaaaaaugagaucuaaaaaaaaaaaaaaaaaaaaaaaaaaaaaaaaaaaaaaaaaaaaaaaaaaaaaaaaaaaaaaaaugcaucccccccccccccccccccccccccccccccaaaggcucuuuucagagccaccagaauu

SEQ ID NO: 12975 - RNA, 2015 nt, Artificial Sequence
  mRNA product Design d-2 comprising derived and/or modified sequence from HRSV(Memphis-37)__AIY60640.1__F-del_DSCav1 (opt5)
gggagagcggcucggccauuuugucccagucaguccggaggcugcggcugcagaaguaccgccugcggaguaacugcaaagaagcuuaccauggagcugcccauccucaagaccaacgccauuacaacgauccuggcugccgugacccuuugcuucgcgagcucccagaauauuacagaagaguuuuaccaaucuaccuguagcgcugucuccaaaggcuaucugucugcccucagaacagggugguacaccagcguuaucacaauugaacuguccaacaucaaggagaauaaaugcaacggaaccgacgccaaggugaaacuuaucaagcaggaacuggauaaguauaaaaaugcugugacggagcuccagcugcugaugcagucuaccccugccgcuaacaaucgggcccgcagagagcucccgcgguucaugaacuacacacugaauaacaccaagaauaacaaugucacacuuagcaaaaagcgcaaaagacgguuucugggcuuccuccugggggugggauccgcgauugccagcggcaucgcuguuuguaaggugcuucaccuggaaggggaggucaacaagauuaaaaaugcccuccugucuaccaacaaggcugugguuucccugagcaacggagugucuguccucacguuuaaagugcuggaccuuaagaauuauaucgauaaacaacugcuccccauucugaacaagcaguccugcagcaucucuaauauugaaacagugaucgaguuccagcagaaaaacaaucgccuucuggagaucaccagagaauuuuccgucaacgccggcguuacaaccccugugagcaccuacaugcucacaaauuccgagcugcugucucucauuaacgacaugcccaucacgaaugaucaaaagaagcugaugagcaacaaugugcagauuguccggcagcaguccuauagcaucauguguauuaucaaagaagaggugcuugcguacguugugcaacugccucucuacggcgucaucgacacccccugcuggaagcugcauacaucuccucuuuguaccacaaacaccaaagaaggguccaauauuugccugacgcgcacagauagaggaugguauugugacaacgccggcagcgugucuuucuuuccgcaggcugagaccugcaagguucagagcaaucggguguucugugauaccaugaacucccucacacugcccucugaggucaaccugugcaauaucgacauuuuuaacccuaaauacgauugcaagaucaugaccagcaagacagacguguccagcucugucauuacgucccucggggccaucgugagcuguuauggaaaaaccaagugcacagcuucuaauaaaaaccgcggcaucauuaagaccuucuccaaugggugugauuacguuagcaacaaaggaguggacacagucuccgugggcaauacccuguauuacguuaacaagcaagaaggcaagucucuuuaugugaaaggggagcccaucauuaauuuuuacgacccucuggucuuccccagcgaugaguucgacgccuccaucucucaggugaacgaaaagauuaaucagagccucgccuuuaucagaaaauccgaugaacugcugcacaacgugaauguuggaaagagcacgaccaacauuaugaucacaaccaucauuaucgucauuaucgugauucuucuccugcugaucgcugugggccucuuccuguacugcaaagcgcggugaggacuaguaauaaggaaacuguaugaaugucugugggcaggaagugaagagauccuucuguaaagguuuuuggaauuaugucugcugaauaauaaacuuuuuugaaauaauaaaucugguagaaaaaugagaucuaaaaaaaaaaaaaaaaaaaaaaaaaaaaaaaaaaaaaaaaaaaaaaaaaaaaaaaaaaaaaaaaugcaucccccccccccccccccccccccccccccccaaaggcucuuuucagagccaccagaauu

SEQ ID NO: 12976 - RNA, 2015 nt, Artificial Sequence
  mRNA product Design d-2 comprising derived and/or modified sequence from HRSV(Memphis-37)__AIY60640.1__F-del_DSCav1 (opt6)
gggagagcggcucggccauuuugucccagucaguccggaggcugcggcugcagaaguaccgccugcggaguaacugcaaagaagcuuaccauggaauuaccaauccuuaaaacaaacgcaauaacaaccauccucgcagcaguaacucucugcuucgcuucaucucaaaacaucacagaagaauuuuaccaaagcacaugcucagcuguauccaaagguuaucuaucagccuugagaaccggaugguacacaucaguaauaacaauugaacuaucaaacauuaaagaaaacaaaugcaacggcaccgacgcaaaaguaaaacuaaucaaacaagaacuagacaaauauaaaaaugcaguaacagaauuacaauuauuaaugcaauccacaccagcugcaaacaaccgagcccgaagagaacuaccaagauucaugaacuacacacuaaacaacaccaaaaauaacaacgucacccuaucuaaaaaacguaaaagaagauucuuaggauuccucuuaggagucggauccgcaauagcaagcggcauagccguauguaaaguccuacacuuagaaggugaagugaauaaaauaaaaaacgcccuauuaagcacuaacaaagcaguagucucccuaucaaacggaguuucaguacucacauucaaaguacucgaccucaaaaacuacaucgacaaacaacuuuuaccaauucuaaacaaacaaucaugcuccauaucuaauaucgaaaccgucaucgaauuucaacaaaaaaacaauagacuacuagaaauaacuagagaauuuucaguaaacgccggcguuacgacaccagucucuacauacauguuaaccaauucagaacucuuaucauuaaucaacgacaugccaauaacaaacgaccaaaaaaaacuaauguccaauaacguacaaauagucagacaacaaucauacucaauuaugugcauaauaaaagaagaaguacuagcuuacguaguacaacucccccuauacggcguaauagacacuccauguuggaaauuacacacaucaccauuauguaccaccaauacaaaagaaggcucaaacauaugccuaacaagaacagauagaggaugguauugcgacaacgcaggcucaguuuccuuuuucccccaagcagaaaccugcaaaguacaaucaaaucguguuuuuugcgacaccaugaacucacucacauuaccaucagaaguaaaccuaugcaacauagacauauucaacccaaaauacgacugcaaaaucaugacaucaaaaacagacguauccucuucaguaauuacuagcuuaggagcaauagucucuuguuauggaaaaacaaaaugcacagccaguaacaaaaaccgcggaauaauaaaaaccuucucaaacgguugcgauuacgucucuaacaaaggagucgacacaguaucaguaggcaauacauuauacuacguuaacaaacaagaaggaaaaucuuuauacgucaaaggagaacccauuauaaacuuuuacgacccauuagucuucccuuccgacgaauuugacgccagcauuucacaaguaaacgaaaaaauaaaccaaucacucgcauuuauaagaaaaucugacgaauuacuccacaacguaaacguaggaaaauccacaacaaacauaaugauaacaaccauaaucaucgucauaauagucauacuucuccuauuaauugcaguaggcuuauuccuauacuguaaagcacgauaaggacuaguaauaaggaaacuguaugaaugucugugggcaggaagugaagagauccuucuguaaagguuuuuggaauuaugucugcugaauaauaaacuuuuuugaaauaauaaaucugguagaaaaaugagaucuaaaaaaaaaaaaaaaaaaaaaaaaaaaaaaaaaaaaaaaaaaaaaaaaaaaaaaaaaaaaaaaaugcaucccccccccccccccccccccccccccccccaaaggcucuuuucagagccaccagaauu

SEQ ID NO: 12977 - RNA, 2015 nt, Artificial Sequence
  mRNA product Design d-2 comprising derived and/or modified sequence from HRSV(Memphis-37)__AIY60640.1__F-del_DSCav1 (opt11)
gggagagcggcucggccauuuugucccagucaguccggaggcugcggcugcagaaguaccgccugcggaguaacugcaaagaagcuuaccauggaacuaccaauccuaaaaacuaacgcaaucaccacaauccucgccgccgucacccuuugcuuugcguccucccaaaacauuacugaagaguucuaccaauccacgugcuccgccgucuccaaagguuaccuauccgcccuuaggaccggcugguacaccagcgucaucaccaucgaacuuuccaacaucaaagaaaacaaauguaacggcaccgacgcaaaagucaaacuuauuaaacaggaacucgacaaauauaagaaugccgucaccgaauuacaacuccucaugcaauccacccccgccgccaacaaccgagcaaggcgcgaacucccucgauucaugaauuacacccucaacaauaccaaaaacaacaacgucacccuauccaagaaacgcaaaagacgcuucuugggcuuccuccucggcgugggcuccgcaauagccuccgguauugccgugugcaaagucuuacaccucgaaggcgaggucaacaaaaucaaaaacgcccuccucuccaccaacaaagccgucgucagccuauccaacggcguuuccguccucaccuucaaaguacucgaccucaaaaacuacaucgacaaacaacuccuacccauacuaaacaaacaauccugcuccauuuccaacaucgaaaccguaaucgaguuccaacagaaaaacaaucgccuccuagaaaucacacgugaauuuucaguuaacgccggaguaacaacuccuguaucuaccuacaugcucaccaauuccgaacuccucagccucauaaacgacaugccaauaacaaacgaccaaaagaaacucaugucuaacaacguacaaaucgucagacaacaaaguuacucaaucauguguaucaucaaagaggaaguccuagcauacgugguccaacucccccucuacggaguaaucgacaccccaugcuggaaacuacacaccagcccccucuguaccacaaacacgaaagaagguuccaacaucugccugacccgaaccgaccgcggcugguacugcgauaacgcuggcuccgucucauucuucccccaagcagaaaccugcaaaguacaauccaaccgaguauucugcgacaccaugaacucacucacccuccccagcgaaguaaaccucugcaacaucgacauauucaacccaaaauacgacugcaaaauuaugaccucuaaaacagacguauccuccucuguaaucacaucccucggggccaucgucuccugcuacggcaaaaccaaaugcaccgccuccaacaaaaaccgcggaaucauaaaaaccuucuccaacggaugcgacuacgucucaaauaaaggcgucgacaccgucuccgucggcaacacgcuauacuacgucaacaaacaagaaggcaaaucacucuacgucaaaggugagcccaucaucaauuucuacgauccccucgucuucccaagcgacgaguucgacgccagcauaucccaaguaaacgagaaaaucaaccaaagccuggccuucauccgcaaauccgacgaacuacuacacaacguaaacguaggcaaguccacuaccaacauaaugaucaccacaaucaucauagucauaaucguuauacuacuccugcucaucgccguaggccucuuccucuauugcaaagcccgauagggacuaguaauaaggaaacuguaugaaugucugugggcaggaagugaagagauccuucuguaaagguuuuuggaauuaugucugcugaauaauaaacuuuuuugaaauaauaaaucugguagaaaaaugagaucuaaaaaaaaaaaaaaaaaaaaaaaaaaaaaaaaaaaaaaaaaaaaaaaaaaaaaaaaaaaaaaaaugcaucccccccccccccccccccccccccccccccaaaggcucuuuucagagccaccagaauu

SEQ ID NO: 12978 - RNA, 2331 nt, Artificial Sequence
  mRNA product Design d-3 comprising derived and/or modified sequence from HRSV(Memphis-37)__AIY60640.1__F-del_DSCav1 (opt1)
gggagagggcgcuuggcuugcaaggacccugagcugcggcauugaagcacacccaacccaacucgacugaagucagccucacugaaccggaucugagaaucuucucucucugggcuugccagggcucuccgaaccuagcuagcauccucuucaauuccaacuagaaagcuuaccauggagcugcccauccucaagaccaacgccaucaccacgauccuggccgcggugacccugugcuucgccagcucccagaacaucaccgaggaguucuaccagagcacgugcuccgccgucagcaagggcuaccucuccgcccugcgcaccgggugguacaccagcgugaucaccaucgagcuguccaacaucaaggagaacaagugcaacggcaccgacgccaaggugaagcucaucaagcaggagcuggacaaguacaagaacgcggucacggagcugcagcuccugaugcagagcaccccggccgccaacaaccgggcccgccgggagcugccccgcuucaugaacuacacccucaacaacaccaagaacaacaacgugacgcuguccaagaagcggaagcgccgguuccugggguuccuccugggcguggggagcgcgaucgccuccggcaucgccgucugcaaggugcugcaccucgagggcgaggugaacaagaucaagaacgcccugcuguccaccaacaaggccgucgugagccucuccaacggggugagcguccugaccuucaaggugcuggaccucaagaacuacaucgacaagcagcugcugcccauccugaacaagcagagcugcuccaucagcaacaucgagaccgucaucgaguuccagcagaagaacaaccgccuccuggagaucacgcgggaguucagcgugaacgcgggcgugaccacccccgucuccaccuacaugcugacgaacagcgagcuccugucccugaucaacgacaugccgaucaccaacgaccagaagaagcucaugagcaacaacgugcagaucgugcgccagcaguccuacagcaucaugugcaucaucaaggaggagguccuggccuacguggugcagcugccccucuacggggucaucgacacccccugcuggaagcugcacaccagcccccugugcacgaccaacaccaaggagggcuccaacaucugccucacccggacggaccgcgggugguacugcgacaacgccggcagcguguccuucuucccgcaggccgagaccugcaagguccagagcaaccggguguucugcgacaccaugaacucccugacccugcccagcgaggugaaccucugcaacaucgacaucuucaaccccaaguacgacugcaagaucaugacguccaagaccgacgucagcuccagcgugaucaccucccugggcgccaucgugagcugcuacgggaagaccaagugcacggcgagcaacaagaaccgcggcaucaucaagaccuucuccaacgggugcgacuacgucagcaacaagggcguggacaccguguccgucggcaacacccuguacuacgugaacaagcaggagggcaagagccucuacgugaagggggagcccaucaucaacuucuacgacccgcuggucuuccccuccgacgaguucgacgccagcaucucccaggugaacgagaagaucaaccagagccuggccuucauccggaaguccgacgagcuccugcacaacgugaacgucggcaagagcaccacgaacaucaugaucaccaccaucaucaucgugaucaucgugauccugcugcuccugaucgccgucgggcuguuccucuacugcaaggcccgcugaggacuagugaagggaacacccaaauuuaauucagccuuaagcacaauuaauuaagagugaaacguaauuguacaagcaguuggucacccaccauagggcaugaucaacaccgcaaccuuuccuuuuucccccagugauucugaaaaaccccucuucccuucagcuugcuuagauguuccaaauuuaguaagcuuaaggcggccuacagaagaaaaagaaaaaaaaggccacaaaaguucccucucacuuucaguaaauaaaauaaaagcagcaacagaaauaaagaaauaaaugaaauucaaaaugaaauaaauauuguguugugcagcauuaaaaaaucaauaaaaauuaaaaaugagcaagaucuaaaaaaaaaaaaaaaaaaaaaaaaaaaaaaaaaaaaaaaaaaaaaaaaaaaaaaaaaaaaaaaaugcaucccccccccccccccccccccccccccccccaaaggcucuuuucagagccaccagaauu

SEQ ID NO: 12979 - RNA, 2331 nt, Artificial Sequence
  mRNA product Design d-3 comprising derived and/or modified sequence from HRSV(Memphis-37)__AIY60640.1__F-del_DSCav1 (opt1)
gggagagggcgcuuggcuugcaaggacccugagcugcggcauugaagcacacccaacccaacucgacugaagucagccucacugaaccggaucugagaaucuucucucucugggcuugccagggcucuccgaaccuagcuagcauccucuucaauuccaacuagaaagcuuaccauggagcugcccauccucaagaccaacgccaucaccacgauccuggccgcggugacccugugcuucgccagcucccagaacaucaccgaggaguucuaccagagcacgugcuccgccgucagcaagggcuaccucuccgcccugcgcaccgggugguacaccagcgugaucaccaucgagcuguccaacaucaaggagaacaagugcaacggcaccgacgccaaggugaagcucaucaagcaggagcuggacaaguacaagaacgcggucacggagcugcagcuccugaugcagagcaccccggccgccaacaaccgggcccgccgggagcugccccgcuucaugaacuacacccucaacaacaccaagaacaacaacgugacgcuguccaagaagcggaagcgccgguuccugggguuccuccugggcguggggagcgcgaucgccuccggcaucgccgucugcaaggugcugcaccucgagggcgaggugaacaagaucaagaacgcccugcugagcaccaacaaggccgucgugucccucagcaacgggguguccguccugaccuucaaggugcuggaccucaagaacuacaucgacaagcagcugcugcccauccucaacaagcagagcugcuccaucagcaacaucgagaccgugaucgaguuccagcagaagaacaaccgccugcuggagaucacgcgggaguucuccgucaacgcgggcgugaccacccccgugagcaccuacaugcucacgaacagcgagcugcugucccucaucaacgacaugccgaucaccaacgaccagaagaagcugaugagcaacaacguccagaucgugcgccagcaguccuacagcaucaugugcaucaucaaggaggaggugcuggccuacgucgugcagcucccccuguacggggugaucgacacccccugcuggaagcugcacaccagcccccucugcacgaccaacaccaaggagggcagcaacaucugccugacccggacggaccgcgggugguacugcgacaacgccggcuccgucagcuucuucccgcaggccgagaccugcaaggugcaguccaaccgggucuucugcgacaccaugaacagccugacccuccccuccgaggugaaccugugcaacaucgacaucuucaaccccaaguacgacugcaagaucaugacgagcaagaccgacguguccagcuccgucaucaccagccugggcgccaucguguccugcuacgggaagaccaagugcacggcgagcaacaagaaccgcggcaucaucaagaccuucuccaacgggugcgacuacgugagcaacaagggcgucgacaccgugagcgugggcaacacccucuacuacgucaacaagcaggaggggaagucccuguacgugaagggcgagcccaucaucaacuucuacgacccgcugguguuccccagcgacgaguucgacgccuccaucagccaggucaacgagaagaucaaccagucccucgccuucauccggaaguccgacgagcugcugcacaacgugaacguggggaaguccaccacgaacaucaugaucaccaccaucaucaucgucaucaucgugauccugcuccugcugaucgccgugggccucuuccuguacugcaaggcccgcugaggacuagugaagggaacacccaaauuuaauucagccuuaagcacaauuaauuaagagugaaacguaauuguacaagcaguuggucacccaccauagggcaugaucaacaccgcaaccuuuccuuuuucccccagugauucugaaaaaccccucuucccuucagcuugcuuagauguuccaaauuuaguaagcuuaaggcggccuacagaagaaaaagaaaaaaaaggccacaaaaguucccucucacuuucaguaaauaaaauaaaagcagcaacagaaauaaagaaauaaaugaaauucaaaaugaaauaaauauuguguugugcagcauuaaaaaaucaauaaaaauuaaaaaugagcaagaucuaaaaaaaaaaaaaaaaaaaaaaaaaaaaaaaaaaaaaaaaaaaaaaaaaaaaaaaaaaaaaaaaugcaucccccccccccccccccccccccccccccccaaaggcucuuuucagagccaccagaauu

SEQ ID NO: 12980 - RNA, 2331 nt, Artificial Sequence
  mRNA product Design d-3 comprising derived and/or modified sequence from HRSV(Memphis-37)__AIY60640.1__F-del_DSCav1 (opt2)
gggagagggcgcuuggcuugcaaggacccugagcugcggcauugaagcacacccaacccaacucgacugaagucagccucacugaaccggaucugagaaucuucucucucugggcuugccagggcucuccgaaccuagcuagcauccucuucaauuccaacuagaaagcuuaccauggagcuccccauccucaagaccaacgccaucaccaccauccucgccgccgucacccucugcuucgccuccucccagaacaucaccgaggaguucuaccaguccaccugcuccgccgucuccaagggcuaccucuccgcccuccgcaccggcugguacaccuccgucaucaccaucgagcucuccaacaucaaggagaacaagugcaacggcaccgacgccaaggucaagcucaucaagcaggagcucgacaaguacaagaacgccgucaccgagcuccagcuccucaugcaguccacccccgccgccaacaaccgcgcccgccgcgagcucccccgcuucaugaacuacacccucaacaacaccaagaacaacaacgucacccucuccaagaagcgcaagcgccgcuuccucggcuuccuccucggcgucggcuccgccaucgccuccggcaucgccgucugcaagguccuccaccucgagggcgaggucaacaagaucaagaacgcccuccucuccaccaacaaggccgucgucucccucuccaacggcgucuccguccucaccuucaagguccucgaccucaagaacuacaucgacaagcagcuccuccccauccucaacaagcaguccugcuccaucuccaacaucgagaccgucaucgaguuccagcagaagaacaaccgccuccucgagaucacccgcgaguucuccgucaacgccggcgucaccacccccgucuccaccuacaugcucaccaacuccgagcuccucucccucaucaacgacaugcccaucaccaacgaccagaagaagcucauguccaacaacguccagaucguccgccagcaguccuacuccaucaugugcaucaucaaggaggagguccucgccuacgucguccagcucccccucuacggcgucaucgacacccccugcuggaagcuccacaccuccccccucugcaccaccaacaccaaggagggcuccaacaucugccucacccgcaccgaccgcggcugguacugcgacaacgccggcuccgucuccuucuucccccaggccgagaccugcaagguccaguccaaccgcgucuucugcgacaccaugaacucccucacccuccccuccgaggucaaccucugcaacaucgacaucuucaaccccaaguacgacugcaagaucaugaccuccaagaccgacgucuccuccuccgucaucaccucccucggcgccaucgucuccugcuacggcaagaccaagugcaccgccuccaacaagaaccgcggcaucaucaagaccuucuccaacggcugcgacuacgucuccaacaagggcgucgacaccgucuccgucggcaacacccucuacuacgucaacaagcaggagggcaagucccucuacgucaagggcgagcccaucaucaacuucuacgacccccucgucuuccccuccgacgaguucgacgccuccaucucccaggucaacgagaagaucaaccagucccucgccuucauccgcaaguccgacgagcuccuccacaacgucaacgucggcaaguccaccaccaacaucaugaucaccaccaucaucaucgucaucaucgucauccuccuccuccucaucgccgucggccucuuccucuacugcaaggcccgcugaggacuagugaagggaacacccaaauuuaauucagccuuaagcacaauuaauuaagagugaaacguaauuguacaagcaguuggucacccaccauagggcaugaucaacaccgcaaccuuuccuuuuucccccagugauucugaaaaaccccucuucccuucagcuugcuuagauguuccaaauuuaguaagcuuaaggcggccuacagaagaaaaagaaaaaaaaggccacaaaaguucccucucacuuucaguaaauaaaauaaaagcagcaacagaaauaaagaaauaaaugaaauucaaaaugaaauaaauauuguguugugcagcauuaaaaaaucaauaaaaauuaaaaaugagcaagaucuaaaaaaaaaaaaaaaaaaaaaaaaaaaaaaaaaaaaaaaaaaaaaaaaaaaaaaaaaaaaaaaaugcaucccccccccccccccccccccccccccccccaaaggcucuuuucagagccaccagaauu

SEQ ID NO: 12981 - RNA, 2331 nt, Artificial Sequence
  mRNA product Design d-3 comprising derived and/or modified sequence from HRSV(Memphis-37)__AIY60640.1__F-del_DSCav1 (opt3)
gggagagggcgcuuggcuugcaaggacccugagcugcggcauugaagcacacccaacccaacucgacugaagucagccucacugaaccggaucugagaaucuucucucucugggcuugccagggcucuccgaaccuagcuagcauccucuucaauuccaacuagaaagcuuaccauggagcugcccauccucaagaccaacgccauuacaacuauacuugcugcagugacgcugugcuucgccagcucccagaauaucaccgaagaguuuuaccaaucuacauguucagcggucaguaaaggcuauuugagcgcuuuaagaacugggugguacaccuccguuauuacaaucgaacugucuaacauuaaggagaauaaaugcaacggaaccgacgccaaggugaaacuaaucaagcaggaacucgauaaguauaaaaaugcaguaacugagcugcagcuucugaugcagucgaccccugccgcuaacaauagggcacggcgcgaguugccacgauucaugaacuacacacucaauaacacgaagaauaacaaugugacucugagcaaaaagcguaaaagaagguuucuggguuuccucuuaggcgucgggucagccauagcuaguggaaucgccguguguaagguucugcaccuugaaggcgaggugaacaagauuaaaaaugcguugcuguccaccaacaaggcagucgugucucuaagcaacgguguauccguucucacauuuaaagugcuggaccuuaagaauuauaucgauaaacaacuguugccgauucucaacaagcagucaugcaguaucagcaauauagaaacugucauugaguuccagcagaaaaacaaucggcuguuagagaucacccgcgaauuuucugugaacgccggggugacaacccccgucuccacguacaugcugacuaauucagagcuccuuagccugauuaacgacaugccuaucacaaaugaucaaaagaaguugaugaguaacaauguucagaucgugagacagcagucuuauuccauuauguguauaaucaaagaagagguacuagcuuacgugguccaacugccacucuacggagugauugacacccccugcuggaagcugcauacuagcccucuuuguacaaccaacacgaaagaaggcucgaauaucugccugaccaggacagaucggggcugguauugugacaacgccgggucuguuuccuucuuuccacaggcagagacuugcaaggugcagucaaaucgcgucuucugugauaccaugaacaguuugacacuccccagcgaggugaaccugugcaauauagacauuuuuaacccuaaauacgauugcaagaucaugacuuccaagaccgacguaucuagcucaguuaucacaaguuuaggagcuauuguguccuguuaugguaaaaccaagugcacugccagcaauaaaaaccgaggcaucauuaagacguucucuaaugggugugauuacgucucaaacaaaggaguggacacagucagugugggcaauacccuguauuacguuaacaagcaagaagguaagagccuauaugugaaaggggagccaauaaucaauuuuuacgacccgcucguauuccccuccgaugaguucgacgcgucuauuucgcaggucaacgaaaagaucaaucagagccuggccuuuaucagaaaauccgaugaacuuuugcacaacgugaauguuggaaagucaacuaccaacauuaugauaacaaccaucauuaucgugauuaucgucauacugcuccugcuuaucgcagugggccuguucuuguacugcaaagcuaggugaggacuagugaagggaacacccaaauuuaauucagccuuaagcacaauuaauuaagagugaaacguaauuguacaagcaguuggucacccaccauagggcaugaucaacaccgcaaccuuuccuuuuucccccagugauucugaaaaaccccucuucccuucagcuugcuuagauguuccaaauuuaguaagcuuaaggcggccuacagaagaaaaagaaaaaaaaggccacaaaaguucccucucacuuucaguaaauaaaauaaaagcagcaacagaaauaaagaaauaaaugaaauucaaaaugaaauaaauauuguguugugcagcauuaaaaaaucaauaaaaauuaaaaaugagcaagaucuaaaaaaaaaaaaaaaaaaaaaaaaaaaaaaaaaaaaaaaaaaaaaaaaaaaaaaaaaaaaaaaaugcaucccccccccccccccccccccccccccccccaaaggcucuuuucagagccaccagaauu

SEQ ID NO: 12982 - RNA, 2331 nt, Artificial Sequence
  mRNA product Design d-3 comprising derived and/or modified sequence from HRSV(Memphis-37)__AIY60640.1__F-del_DSCav1 (opt4)
gggagagggcgcuuggcuugcaaggacccugagcugcggcauugaagcacacccaacccaacucgacugaagucagccucacugaaccggaucugagaaucuucucucucugggcuugccagggcucuccgaaccuagcuagcauccucuucaauuccaacuagaaagcuuaccauggagcugcccauccugaagaccaacgccaucaccaccauccuggccgccgugacccugugcuucgccagcagccagaacaucaccgaggaguucuaccagagcaccugcagcgccgugagcaagggcuaccugagcgcccugagaaccggcugguacaccagcgugaucaccaucgagcugagcaacaucaaggagaacaagugcaacggcaccgacgccaaggugaagcugaucaagcaggagcuggacaaguacaagaacgccgugaccgagcugcagcugcugaugcagagcacccccgccgccaacaacagagccagaagagagcugcccagauucaugaacuacacccugaacaacaccaagaacaacaacgugacccugagcaagaagagaaagagaagauuccugggcuuccugcugggcgugggcagcgccaucgccagcggcaucgccgugugcaaggugcugcaccuggagggcgaggugaacaagaucaagaacgcccugcugagcaccaacaaggccguggugagccugagcaacggcgugagcgugcugaccuucaaggugcuggaccugaagaacuacaucgacaagcagcugcugcccauccugaacaagcagagcugcagcaucagcaacaucgagaccgugaucgaguuccagcagaagaacaacagacugcuggagaucaccagagaguucagcgugaacgccggcgugaccacccccgugagcaccuacaugcugaccaacagcgagcugcugagccugaucaacgacaugcccaucaccaacgaccagaagaagcugaugagcaacaacgugcagaucgugagacagcagagcuacagcaucaugugcaucaucaaggaggaggugcuggccuacguggugcagcugccccuguacggcgugaucgacacccccugcuggaagcugcacaccagcccccugugcaccaccaacaccaaggagggcagcaacaucugccugaccagaaccgacagaggcugguacugcgacaacgccggcagcgugagcuucuucccccaggccgagaccugcaaggugcagagcaacagaguguucugcgacaccaugaacagccugacccugcccagcgaggugaaccugugcaacaucgacaucuucaaccccaaguacgacugcaagaucaugaccagcaagaccgacgugagcagcagcgugaucaccagccugggcgccaucgugagcugcuacggcaagaccaagugcaccgccagcaacaagaacagaggcaucaucaagaccuucagcaacggcugcgacuacgugagcaacaagggcguggacaccgugagcgugggcaacacccuguacuacgugaacaagcaggagggcaagagccuguacgugaagggcgagcccaucaucaacuucuacgacccccugguguuccccagcgacgaguucgacgccagcaucagccaggugaacgagaagaucaaccagagccuggccuucaucagaaagagcgacgagcugcugcacaacgugaacgugggcaagagcaccaccaacaucaugaucaccaccaucaucaucgugaucaucgugauccugcugcugcugaucgccgugggccuguuccuguacugcaaggccagaugaggacuagugaagggaacacccaaauuuaauucagccuuaagcacaauuaauuaagagugaaacguaauuguacaagcaguuggucacccaccauagggcaugaucaacaccgcaaccuuuccuuuuucccccagugauucugaaaaaccccucuucccuucagcuugcuuagauguuccaaauuuaguaagcuuaaggcggccuacagaagaaaaagaaaaaaaaggccacaaaaguucccucucacuuucaguaaauaaaauaaaagcagcaacagaaauaaagaaauaaaugaaauucaaaaugaaauaaauauuguguugugcagcauuaaaaaaucaauaaaaauuaaaaaugagcaagaucuaaaaaaaaaaaaaaaaaaaaaaaaaaaaaaaaaaaaaaaaaaaaaaaaaaaaaaaaaaaaaaaaugcaucccccccccccccccccccccccccccccccaaaggcucuuuucagagccaccagaauu

SEQ ID NO: 12983 - RNA, 2331 nt, Artificial Sequence
  mRNA product Design d-3 comprising derived and/or modified sequence from HRSV(Memphis-37)__AIY60640.1__F-del_DSCav1 (opt5)
gggagagggcgcuuggcuugcaaggacccugagcugcggcauugaagcacacccaacccaacucgacugaagucagccucacugaaccggaucugagaaucuucucucucugggcuugccagggcucuccgaaccuagcuagcauccucuucaauuccaacuagaaagcuuaccauggagcugcccauccucaagaccaacgccauuacaacgauccuggcugccgugacccuuugcuucgcgagcucccagaauauuacagaagaguuuuaccaaucuaccuguagcgcugucuccaaaggcuaucugucugcccucagaacagggugguacaccagcguuaucacaauugaacuguccaacaucaaggagaauaaaugcaacggaaccgacgccaaggugaaacuuaucaagcaggaacuggauaaguauaaaaaugcugugacggagcuccagcugcugaugcagucuaccccugccgcuaacaaucgggcccgcagagagcucccgcgguucaugaacuacacacugaauaacaccaagaauaacaaugucacacuuagcaaaaagcgcaaaagacgguuucugggcuuccuccugggggugggauccgcgauugccagcggcaucgcuguuuguaaggugcuucaccuggaaggggaggucaacaagauuaaaaaugcccuccugucuaccaacaaggcugugguuucccugagcaacggagugucuguccucacguuuaaagugcuggaccuuaagaauuauaucgauaaacaacugcuccccauucugaacaagcaguccugcagcaucucuaauauugaaacagugaucgaguuccagcagaaaaacaaucgccuucuggagaucaccagagaauuuuccgucaacgccggcguuacaaccccugugagcaccuacaugcucacaaauuccgagcugcugucucucauuaacgacaugcccaucacgaaugaucaaaagaagcugaugagcaacaaugugcagauuguccggcagcaguccuauagcaucauguguauuaucaaagaagaggugcuugcguacguugugcaacugccucucuacggcgucaucgacacccccugcuggaagcugcauacaucuccucuuuguaccacaaacaccaaagaaggguccaauauuugccugacgcgcacagauagaggaugguauugugacaacgccggcagcgugucuuucuuuccgcaggcugagaccugcaagguucagagcaaucggguguucugugauaccaugaacucccucacacugcccucugaggucaaccugugcaauaucgacauuuuuaacccuaaauacgauugcaagaucaugaccagcaagacagacguguccagcucugucauuacgucccucggggccaucgugagcuguuauggaaaaaccaagugcacagcuucuaauaaaaaccgcggcaucauuaagaccuucuccaaugggugugauuacguuagcaacaaaggaguggacacagucuccgugggcaauacccuguauuacguuaacaagcaagaaggcaagucucuuuaugugaaaggggagcccaucauuaauuuuuacgacccucuggucuuccccagcgaugaguucgacgccuccaucucucaggugaacgaaaagauuaaucagagccucgccuuuaucagaaaauccgaugaacugcugcacaacgugaauguuggaaagagcacgaccaacauuaugaucacaaccaucauuaucgucauuaucgugauucuucuccugcugaucgcugugggccucuuccuguacugcaaagcgcggugaggacuagugaagggaacacccaaauuuaauucagccuuaagcacaauuaauuaagagugaaacguaauuguacaagcaguuggucacccaccauagggcaugaucaacaccgcaaccuuuccuuuuucccccagugauucugaaaaaccccucuucccuucagcuugcuuagauguuccaaauuuaguaagcuuaaggcggccuacagaagaaaaagaaaaaaaaggccacaaaaguucccucucacuuucaguaaauaaaauaaaagcagcaacagaaauaaagaaauaaaugaaauucaaaaugaaauaaauauuguguugugcagcauuaaaaaaucaauaaaaauuaaaaaugagcaagaucuaaaaaaaaaaaaaaaaaaaaaaaaaaaaaaaaaaaaaaaaaaaaaaaaaaaaaaaaaaaaaaaaugcaucccccccccccccccccccccccccccccccaaaggcucuuuucagagccaccagaauu

SEQ ID NO: 12984 - RNA, 2331 nt, Artificial Sequence
  mRNA product Design d-3 comprising derived and/or modified sequence from HRSV(Memphis-37)__AIY60640.1__F-del_DSCav1 (opt6)
gggagagggcgcuuggcuugcaaggacccugagcugcggcauugaagcacacccaacccaacucgacugaagucagccucacugaaccggaucugagaaucuucucucucugggcuugccagggcucuccgaaccuagcuagcauccucuucaauuccaacuagaaagcuuaccauggaauuaccaauccuuaaaacaaacgcaauaacaaccauccucgcagcaguaacucucugcuucgcuucaucucaaaacaucacagaagaauuuuaccaaagcacaugcucagcuguauccaaagguuaucuaucagccuugagaaccggaugguacacaucaguaauaacaauugaacuaucaaacauuaaagaaaacaaaugcaacggcaccgacgcaaaaguaaaacuaaucaaacaagaacuagacaaauauaaaaaugcaguaacagaauuacaauuauuaaugcaauccacaccagcugcaaacaaccgagcccgaagagaacuaccaagauucaugaacuacacacuaaacaacaccaaaaauaacaacgucacccuaucuaaaaaacguaaaagaagauucuuaggauuccucuuaggagucggauccgcaauagcaagcggcauagccguauguaaaguccuacacuuagaaggugaagugaauaaaauaaaaaacgcccuauuaagcacuaacaaagcaguagucucccuaucaaacggaguuucaguacucacauucaaaguacucgaccucaaaaacuacaucgacaaacaacuuuuaccaauucuaaacaaacaaucaugcuccauaucuaauaucgaaaccgucaucgaauuucaacaaaaaaacaauagacuacuagaaauaacuagagaauuuucaguaaacgccggcguuacgacaccagucucuacauacauguuaaccaauucagaacucuuaucauuaaucaacgacaugccaauaacaaacgaccaaaaaaaacuaauguccaauaacguacaaauagucagacaacaaucauacucaauuaugugcauaauaaaagaagaaguacuagcuuacguaguacaacucccccuauacggcguaauagacacuccauguuggaaauuacacacaucaccauuauguaccaccaauacaaaagaaggcucaaacauaugccuaacaagaacagauagaggaugguauugcgacaacgcaggcucaguuuccuuuuucccccaagcagaaaccugcaaaguacaaucaaaucguguuuuuugcgacaccaugaacucacucacauuaccaucagaaguaaaccuaugcaacauagacauauucaacccaaaauacgacugcaaaaucaugacaucaaaaacagacguauccucuucaguaauuacuagcuuaggagcaauagucucuuguuauggaaaaacaaaaugcacagccaguaacaaaaaccgcggaauaauaaaaaccuucucaaacgguugcgauuacgucucuaacaaaggagucgacacaguaucaguaggcaauacauuauacuacguuaacaaacaagaaggaaaaucuuuauacgucaaaggagaacccauuauaaacuuuuacgacccauuagucuucccuuccgacgaauuugacgccagcauuucacaaguaaacgaaaaaauaaaccaaucacucgcauuuauaagaaaaucugacgaauuacuccacaacguaaacguaggaaaauccacaacaaacauaaugauaacaaccauaaucaucgucauaauagucauacuucuccuauuaauugcaguaggcuuauuccuauacuguaaagcacgauaaggacuagugaagggaacacccaaauuuaauucagccuuaagcacaauuaauuaagagugaaacguaauuguacaagcaguuggucacccaccauagggcaugaucaacaccgcaaccuuuccuuuuucccccagugauucugaaaaaccccucuucccuucagcuugcuuagauguuccaaauuuaguaagcuuaaggcggccuacagaagaaaaagaaaaaaaaggccacaaaaguucccucucacuuucaguaaauaaaauaaaagcagcaacagaaauaaagaaauaaaugaaauucaaaaugaaauaaauauuguguugugcagcauuaaaaaaucaauaaaaauuaaaaaugagcaagaucuaaaaaaaaaaaaaaaaaaaaaaaaaaaaaaaaaaaaaaaaaaaaaaaaaaaaaaaaaaaaaaaaugcaucccccccccccccccccccccccccccccccaaaggcucuuuucagagccaccagaauu

SEQ ID NO: 12985 - RNA, 2331 nt, Artificial Sequence
  mRNA product Design d-3 comprising derived and/or modified sequence from HRSV(Memphis-37)__AIY60640.1__F-del_DSCav1 (opt11)
gggagagggcgcuuggcuugcaaggacccugagcugcggcauugaagcacacccaacccaacucgacugaagucagccucacugaaccggaucugagaaucuucucucucugggcuugccagggcucuccgaaccuagcuagcauccucuucaauuccaacuagaaagcuuaccauggaacuaccaauccuaaaaacuaacgcaaucaccacaauccucgccgccgucacccuuugcuuugcguccucccaaaacauuacugaagaguucuaccaauccacgugcuccgccgucuccaaagguuaccuauccgcccuuaggaccggcugguacaccagcgucaucaccaucgaacuuuccaacaucaaagaaaacaaauguaacggcaccgacgcaaaagucaaacuuauuaaacaggaacucgacaaauauaagaaugccgucaccgaauuacaacuccucaugcaauccacccccgccgccaacaaccgagcaaggcgcgaacucccucgauucaugaauuacacccucaacaauaccaaaaacaacaacgucacccuauccaagaaacgcaaaagacgcuucuugggcuuccuccucggcgugggcuccgcaauagccuccgguauugccgugugcaaagucuuacaccucgaaggcgaggucaacaaaaucaaaaacgcccuccucuccaccaacaaagccgucgucagccuauccaacggcguuuccguccucaccuucaaaguacucgaccucaaaaacuacaucgacaaacaacuccuacccauacuaaacaaacaauccugcuccauuuccaacaucgaaaccguaaucgaguuccaacagaaaaacaaucgccuccuagaaaucacacgugaauuuucaguuaacgccggaguaacaacuccuguaucuaccuacaugcucaccaauuccgaacuccucagccucauaaacgacaugccaauaacaaacgaccaaaagaaacucaugucuaacaacguacaaaucgucagacaacaaaguuacucaaucauguguaucaucaaagaggaaguccuagcauacgugguccaacucccccucuacggaguaaucgacaccccaugcuggaaacuacacaccagcccccucuguaccacaaacacgaaagaagguuccaacaucugccugacccgaaccgaccgcggcugguacugcgauaacgcuggcuccgucucauucuucccccaagcagaaaccugcaaaguacaauccaaccgaguauucugcgacaccaugaacucacucacccuccccagcgaaguaaaccucugcaacaucgacauauucaacccaaaauacgacugcaaaauuaugaccucuaaaacagacguauccuccucuguaaucacaucccucggggccaucgucuccugcuacggcaaaaccaaaugcaccgccuccaacaaaaaccgcggaaucauaaaaaccuucuccaacggaugcgacuacgucucaaauaaaggcgucgacaccgucuccgucggcaacacgcuauacuacgucaacaaacaagaaggcaaaucacucuacgucaaaggugagcccaucaucaauuucuacgauccccucgucuucccaagcgacgaguucgacgccagcauaucccaaguaaacgagaaaaucaaccaaagccuggccuucauccgcaaauccgacgaacuacuacacaacguaaacguaggcaaguccacuaccaacauaaugaucaccacaaucaucauagucauaaucguuauacuacuccugcucaucgccguaggccucuuccucuauugcaaagcccgauagggacuagugaagggaacacccaaauuuaauucagccuuaagcacaauuaauuaagagugaaacguaauuguacaagcaguuggucacccaccauagggcaugaucaacaccgcaaccuuuccuuuuucccccagugauucugaaaaaccccucuucccuucagcuugcuuagauguuccaaauuuaguaagcuuaaggcggccuacagaagaaaaagaaaaaaaaggccacaaaaguucccucucacuuucaguaaauaaaauaaaagcagcaacagaaauaaagaaauaaaugaaauucaaaaugaaauaaauauuguguugugcagcauuaaaaaaucaauaaaaauuaaaaaugagcaagaucuaaaaaaaaaaaaaaaaaaaaaaaaaaaaaaaaaaaaaaaaaaaaaaaaaaaaaaaaaaaaaaaaugcaucccccccccccccccccccccccccccccccaaaggcucuuuucagagccaccagaauu

SEQ ID NO: 12986 - RNA, 2014 nt, Artificial Sequence
  mRNA product Design d-4 comprising derived and/or modified sequence from HRSV(Memphis-37)__AIY60640.1__F-del_DSCav1 (opt1)
gggagagucccgcagucggcguccagcggcucugcuuguucgugugugugucguugcaggccuuauucaagcuuaccauggagcugcccauccucaagaccaacgccaucaccacgauccuggccgcggugacccugugcuucgccagcucccagaacaucaccgaggaguucuaccagagcacgugcuccgccgucagcaagggcuaccucuccgcccugcgcaccgggugguacaccagcgugaucaccaucgagcuguccaacaucaaggagaacaagugcaacggcaccgacgccaaggugaagcucaucaagcaggagcuggacaaguacaagaacgcggucacggagcugcagcuccugaugcagagcaccccggccgccaacaaccgggcccgccgggagcugccccgcuucaugaacuacacccucaacaacaccaagaacaacaacgugacgcuguccaagaagcggaagcgccgguuccugggguuccuccugggcguggggagcgcgaucgccuccggcaucgccgucugcaaggugcugcaccucgagggcgaggugaacaagaucaagaacgcccugcuguccaccaacaaggccgucgugagccucuccaacggggugagcguccugaccuucaaggugcuggaccucaagaacuacaucgacaagcagcugcugcccauccugaacaagcagagcugcuccaucagcaacaucgagaccgucaucgaguuccagcagaagaacaaccgccuccuggagaucacgcgggaguucagcgugaacgcgggcgugaccacccccgucuccaccuacaugcugacgaacagcgagcuccugucccugaucaacgacaugccgaucaccaacgaccagaagaagcucaugagcaacaacgugcagaucgugcgccagcaguccuacagcaucaugugcaucaucaaggaggagguccuggccuacguggugcagcugccccucuacggggucaucgacacccccugcuggaagcugcacaccagcccccugugcacgaccaacaccaaggagggcuccaacaucugccucacccggacggaccgcgggugguacugcgacaacgccggcagcguguccuucuucccgcaggccgagaccugcaagguccagagcaaccggguguucugcgacaccaugaacucccugacccugcccagcgaggugaaccucugcaacaucgacaucuucaaccccaaguacgacugcaagaucaugacguccaagaccgacgucagcuccagcgugaucaccucccugggcgccaucgugagcugcuacgggaagaccaagugcacggcgagcaacaagaaccgcggcaucaucaagaccuucuccaacgggugcgacuacgucagcaacaagggcguggacaccguguccgucggcaacacccuguacuacgugaacaagcaggagggcaagagccucuacgugaagggggagcccaucaucaacuucuacgacccgcuggucuuccccuccgacgaguucgacgccagcaucucccaggugaacgagaagaucaaccagagccuggccuucauccggaaguccgacgagcuccugcacaacgugaacgucggcaagagcaccacgaacaucaugaucaccaccaucaucaucgugaucaucgugauccugcugcuccugaucgccgucgggcuguuccucuacugcaaggcccgcugaggacuaguggaagcauuuuccuggcugauuaaaagaaauuacucagcuauggucaucuguuccuguuagaaggcuaugcagcauauuauauacuaugcgcauguuaugaaaugcauaauaaaaaauuuuaaaaaaucuaaaagaucuaaaaaaaaaaaaaaaaaaaaaaaaaaaaaaaaaaaaaaaaaaaaaaaaaaaaaaaaaaaaaaaaugcaucccccccccccccccccccccccccccccccaaaggcucuuuucagagccaccagaauu

SEQ ID NO: 12987 - RNA, 2014 nt, Artificial Sequence
  mRNA product Design d-4 comprising derived and/or modified sequence from HRSV(Memphis-37)__AIY60640.1__F-del_DSCav1 (opt1)
gggagagucccgcagucggcguccagcggcucugcuuguucgugugugugucguugcaggccuuauucaagcuuaccauggagcugcccauccucaagaccaacgccaucaccacgauccuggccgcggugacccugugcuucgccagcucccagaacaucaccgaggaguucuaccagagcacgugcuccgccgucagcaagggcuaccucuccgcccugcgcaccgggugguacaccagcgugaucaccaucgagcuguccaacaucaaggagaacaagugcaacggcaccgacgccaaggugaagcucaucaagcaggagcuggacaaguacaagaacgcggucacggagcugcagcuccugaugcagagcaccccggccgccaacaaccgggcccgccgggagcugccccgcuucaugaacuacacccucaacaacaccaagaacaacaacgugacgcuguccaagaagcggaagcgccgguuccugggguuccuccugggcguggggagcgcgaucgccuccggcaucgccgucugcaaggugcugcaccucgagggcgaggugaacaagaucaagaacgcccugcugagcaccaacaaggccgucgugucccucagcaacgggguguccguccugaccuucaaggugcuggaccucaagaacuacaucgacaagcagcugcugcccauccucaacaagcagagcugcuccaucagcaacaucgagaccgugaucgaguuccagcagaagaacaaccgccugcuggagaucacgcgggaguucuccgucaacgcgggcgugaccacccccgugagcaccuacaugcucacgaacagcgagcugcugucccucaucaacgacaugccgaucaccaacgaccagaagaagcugaugagcaacaacguccagaucgugcgccagcaguccuacagcaucaugugcaucaucaaggaggaggugcuggccuacgucgugcagcucccccuguacggggugaucgacacccccugcuggaagcugcacaccagcccccucugcacgaccaacaccaaggagggcagcaacaucugccugacccggacggaccgcgggugguacugcgacaacgccggcuccgucagcuucuucccgcaggccgagaccugcaaggugcaguccaaccgggucuucugcgacaccaugaacagccugacccuccccuccgaggugaaccugugcaacaucgacaucuucaaccccaaguacgacugcaagaucaugacgagcaagaccgacguguccagcuccgucaucaccagccugggcgccaucguguccugcuacgggaagaccaagugcacggcgagcaacaagaaccgcggcaucaucaagaccuucuccaacgggugcgacuacgugagcaacaagggcgucgacaccgugagcgugggcaacacccucuacuacgucaacaagcaggaggggaagucccuguacgugaagggcgagcccaucaucaacuucuacgacccgcugguguuccccagcgacgaguucgacgccuccaucagccaggucaacgagaagaucaaccagucccucgccuucauccggaaguccgacgagcugcugcacaacgugaacguggggaaguccaccacgaacaucaugaucaccaccaucaucaucgucaucaucgugauccugcuccugcugaucgccgugggccucuuccuguacugcaaggcccgcugaggacuaguggaagcauuuuccuggcugauuaaaagaaauuacucagcuauggucaucuguuccuguuagaaggcuaugcagcauauuauauacuaugcgcauguuaugaaaugcauaauaaaaaauuuuaaaaaaucuaaaagaucuaaaaaaaaaaaaaaaaaaaaaaaaaaaaaaaaaaaaaaaaaaaaaaaaaaaaaaaaaaaaaaaaugcaucccccccccccccccccccccccccccccccaaaggcucuuuucagagccaccagaauu

SEQ ID NO: 12988 - RNA, 2014 nt, Artificial Sequence
  mRNA product Design d-4 comprising derived and/or modified sequence from HRSV(Memphis-37)__AIY60640.1__F-del_DSCav1 (opt2)
gggagagucccgcagucggcguccagcggcucugcuuguucgugugugugucguugcaggccuuauucaagcuuaccauggagcuccccauccucaagaccaacgccaucaccaccauccucgccgccgucacccucugcuucgccuccucccagaacaucaccgaggaguucuaccaguccaccugcuccgccgucuccaagggcuaccucuccgcccuccgcaccggcugguacaccuccgucaucaccaucgagcucuccaacaucaaggagaacaagugcaacggcaccgacgccaaggucaagcucaucaagcaggagcucgacaaguacaagaacgccgucaccgagcuccagcuccucaugcaguccacccccgccgccaacaaccgcgcccgccgcgagcucccccgcuucaugaacuacacccucaacaacaccaagaacaacaacgucacccucuccaagaagcgcaagcgccgcuuccucggcuuccuccucggcgucggcuccgccaucgccuccggcaucgccgucugcaagguccuccaccucgagggcgaggucaacaagaucaagaacgcccuccucuccaccaacaaggccgucgucucccucuccaacggcgucuccguccucaccuucaagguccucgaccucaagaacuacaucgacaagcagcuccuccccauccucaacaagcaguccugcuccaucuccaacaucgagaccgucaucgaguuccagcagaagaacaaccgccuccucgagaucacccgcgaguucuccgucaacgccggcgucaccacccccgucuccaccuacaugcucaccaacuccgagcuccucucccucaucaacgacaugcccaucaccaacgaccagaagaagcucauguccaacaacguccagaucguccgccagcaguccuacuccaucaugugcaucaucaaggaggagguccucgccuacgucguccagcucccccucuacggcgucaucgacacccccugcuggaagcuccacaccuccccccucugcaccaccaacaccaaggagggcuccaacaucugccucacccgcaccgaccgcggcugguacugcgacaacgccggcuccgucuccuucuucccccaggccgagaccugcaagguccaguccaaccgcgucuucugcgacaccaugaacucccucacccuccccuccgaggucaaccucugcaacaucgacaucuucaaccccaaguacgacugcaagaucaugaccuccaagaccgacgucuccuccuccgucaucaccucccucggcgccaucgucuccugcuacggcaagaccaagugcaccgccuccaacaagaaccgcggcaucaucaagaccuucuccaacggcugcgacuacgucuccaacaagggcgucgacaccgucuccgucggcaacacccucuacuacgucaacaagcaggagggcaagucccucuacgucaagggcgagcccaucaucaacuucuacgacccccucgucuuccccuccgacgaguucgacgccuccaucucccaggucaacgagaagaucaaccagucccucgccuucauccgcaaguccgacgagcuccuccacaacgucaacgucggcaaguccaccaccaacaucaugaucaccaccaucaucaucgucaucaucgucauccuccuccuccucaucgccgucggccucuuccucuacugcaaggcccgcugaggacuaguggaagcauuuuccuggcugauuaaaagaaauuacucagcuauggucaucuguuccuguuagaaggcuaugcagcauauuauauacuaugcgcauguuaugaaaugcauaauaaaaaauuuuaaaaaaucuaaaagaucuaaaaaaaaaaaaaaaaaaaaaaaaaaaaaaaaaaaaaaaaaaaaaaaaaaaaaaaaaaaaaaaaugcaucccccccccccccccccccccccccccccccaaaggcucuuuucagagccaccagaauu

SEQ ID NO: 12989 - RNA, 2014 nt, Artificial Sequence
  mRNA product Design d-4 comprising derived and/or modified sequence from HRSV(Memphis-37)__AIY60640.1__F-del_DSCav1 (opt3)
gggagagucccgcagucggcguccagcggcucugcuuguucgugugugugucguugcaggccuuauucaagcuuaccauggagcugcccauccucaagaccaacgccauuacaacuauacuugcugcagugacgcugugcuucgccagcucccagaauaucaccgaagaguuuuaccaaucuacauguucagcggucaguaaaggcuauuugagcgcuuuaagaacugggugguacaccuccguuauuacaaucgaacugucuaacauuaaggagaauaaaugcaacggaaccgacgccaaggugaaacuaaucaagcaggaacucgauaaguauaaaaaugcaguaacugagcugcagcuucugaugcagucgaccccugccgcuaacaauagggcacggcgcgaguugccacgauucaugaacuacacacucaauaacacgaagaauaacaaugugacucugagcaaaaagcguaaaagaagguuucuggguuuccucuuaggcgucgggucagccauagcuaguggaaucgccguguguaagguucugcaccuugaaggcgaggugaacaagauuaaaaaugcguugcuguccaccaacaaggcagucgugucucuaagcaacgguguauccguucucacauuuaaagugcuggaccuuaagaauuauaucgauaaacaacuguugccgauucucaacaagcagucaugcaguaucagcaauauagaaacugucauugaguuccagcagaaaaacaaucggcuguuagagaucacccgcgaauuuucugugaacgccggggugacaacccccgucuccacguacaugcugacuaauucagagcuccuuagccugauuaacgacaugccuaucacaaaugaucaaaagaaguugaugaguaacaauguucagaucgugagacagcagucuuauuccauuauguguauaaucaaagaagagguacuagcuuacgugguccaacugccacucuacggagugauugacacccccugcuggaagcugcauacuagcccucuuuguacaaccaacacgaaagaaggcucgaauaucugccugaccaggacagaucggggcugguauugugacaacgccgggucuguuuccuucuuuccacaggcagagacuugcaaggugcagucaaaucgcgucuucugugauaccaugaacaguuugacacuccccagcgaggugaaccugugcaauauagacauuuuuaacccuaaauacgauugcaagaucaugacuuccaagaccgacguaucuagcucaguuaucacaaguuuaggagcuauuguguccuguuaugguaaaaccaagugcacugccagcaauaaaaaccgaggcaucauuaagacguucucuaaugggugugauuacgucucaaacaaaggaguggacacagucagugugggcaauacccuguauuacguuaacaagcaagaagguaagagccuauaugugaaaggggagccaauaaucaauuuuuacgacccgcucguauuccccuccgaugaguucgacgcgucuauuucgcaggucaacgaaaagaucaaucagagccuggccuuuaucagaaaauccgaugaacuuuugcacaacgugaauguuggaaagucaacuaccaacauuaugauaacaaccaucauuaucgugauuaucgucauacugcuccugcuuaucgcagugggccuguucuuguacugcaaagcuaggugaggacuaguggaagcauuuuccuggcugauuaaaagaaauuacucagcuauggucaucuguuccuguuagaaggcuaugcagcauauuauauacuaugcgcauguuaugaaaugcauaauaaaaaauuuuaaaaaaucuaaaagaucuaaaaaaaaaaaaaaaaaaaaaaaaaaaaaaaaaaaaaaaaaaaaaaaaaaaaaaaaaaaaaaaaugcaucccccccccccccccccccccccccccccccaaaggcucuuuucagagccaccagaauu

SEQ ID NO: 12990 - RNA, 2014 nt, Artificial Sequence
  mRNA product Design d-4 comprising derived and/or modified sequence from HRSV(Memphis-37)__AIY60640.1__F-del_DSCav1 (opt4)
gggagagucccgcagucggcguccagcggcucugcuuguucgugugugugucguugcaggccuuauucaagcuuaccauggagcugcccauccugaagaccaacgccaucaccaccauccuggccgccgugacccugugcuucgccagcagccagaacaucaccgaggaguucuaccagagcaccugcagcgccgugagcaagggcuaccugagcgcccugagaaccggcugguacaccagcgugaucaccaucgagcugagcaacaucaaggagaacaagugcaacggcaccgacgccaaggugaagcugaucaagcaggagcuggacaaguacaagaacgccgugaccgagcugcagcugcugaugcagagcacccccgccgccaacaacagagccagaagagagcugcccagauucaugaacuacacccugaacaacaccaagaacaacaacgugacccugagcaagaagagaaagagaagauuccugggcuuccugcugggcgugggcagcgccaucgccagcggcaucgccgugugcaaggugcugcaccuggagggcgaggugaacaagaucaagaacgcccugcugagcaccaacaaggccguggugagccugagcaacggcgugagcgugcugaccuucaaggugcuggaccugaagaacuacaucgacaagcagcugcugcccauccugaacaagcagagcugcagcaucagcaacaucgagaccgugaucgaguuccagcagaagaacaacagacugcuggagaucaccagagaguucagcgugaacgccggcgugaccacccccgugagcaccuacaugcugaccaacagcgagcugcugagccugaucaacgacaugcccaucaccaacgaccagaagaagcugaugagcaacaacgugcagaucgugagacagcagagcuacagcaucaugugcaucaucaaggaggaggugcuggccuacguggugcagcugccccuguacggcgugaucgacacccccugcuggaagcugcacaccagcccccugugcaccaccaacaccaaggagggcagcaacaucugccugaccagaaccgacagaggcugguacugcgacaacgccggcagcgugagcuucuucccccaggccgagaccugcaaggugcagagcaacagaguguucugcgacaccaugaacagccugacccugcccagcgaggugaaccugugcaacaucgacaucuucaaccccaaguacgacugcaagaucaugaccagcaagaccgacgugagcagcagcgugaucaccagccugggcgccaucgugagcugcuacggcaagaccaagugcaccgccagcaacaagaacagaggcaucaucaagaccuucagcaacggcugcgacuacgugagcaacaagggcguggacaccgugagcgugggcaacacccuguacuacgugaacaagcaggagggcaagagccuguacgugaagggcgagcccaucaucaacuucuacgacccccugguguuccccagcgacgaguucgacgccagcaucagccaggugaacgagaagaucaaccagagccuggccuucaucagaaagagcgacgagcugcugcacaacgugaacgugggcaagagcaccaccaacaucaugaucaccaccaucaucaucgugaucaucgugauccugcugcugcugaucgccgugggccuguuccuguacugcaaggccagaugaggacuaguggaagcauuuuccuggcugauuaaaagaaauuacucagcuauggucaucuguuccuguuagaaggcuaugcagcauauuauauacuaugcgcauguuaugaaaugcauaauaaaaaauuuuaaaaaaucuaaaagaucuaaaaaaaaaaaaaaaaaaaaaaaaaaaaaaaaaaaaaaaaaaaaaaaaaaaaaaaaaaaaaaaaugcaucccccccccccccccccccccccccccccccaaaggcucuuuucagagccaccagaauu

SEQ ID NO: 12991 - RNA, 2014 nt, Artificial Sequence
  mRNA product Design d-4 comprising derived and/or modified sequence from HRSV(Memphis-37)__AIY60640.1__F-del_DSCav1 (opt5)
gggagagucccgcagucggcguccagcggcucugcuuguucgugugugugucguugcaggccuuauucaagcuuaccauggagcugcccauccucaagaccaacgccauuacaacgauccuggcugccgugacccuuugcuucgcgagcucccagaauauuacagaagaguuuuaccaaucuaccuguagcgcugucuccaaaggcuaucugucugcccucagaacagggugguacaccagcguuaucacaauugaacuguccaacaucaaggagaauaaaugcaacggaaccgacgccaaggugaaacuuaucaagcaggaacuggauaaguauaaaaaugcugugacggagcuccagcugcugaugcagucuaccccugccgcuaacaaucgggcccgcagagagcucccgcgguucaugaacuacacacugaauaacaccaagaauaacaaugucacacuuagcaaaaagcgcaaaagacgguuucugggcuuccuccugggggugggauccgcgauugccagcggcaucgcuguuuguaaggugcuucaccuggaaggggaggucaacaagauuaaaaaugcccuccugucuaccaacaaggcugugguuucccugagcaacggagugucuguccucacguuuaaagugcuggaccuuaagaauuauaucgauaaacaacugcuccccauucugaacaagcaguccugcagcaucucuaauauugaaacagugaucgaguuccagcagaaaaacaaucgccuucuggagaucaccagagaauuuuccgucaacgccggcguuacaaccccugugagcaccuacaugcucacaaauuccgagcugcugucucucauuaacgacaugcccaucacgaaugaucaaaagaagcugaugagcaacaaugugcagauuguccggcagcaguccuauagcaucauguguauuaucaaagaagaggugcuugcguacguugugcaacugccucucuacggcgucaucgacacccccugcuggaagcugcauacaucuccucuuuguaccacaaacaccaaagaaggguccaauauuugccugacgcgcacagauagaggaugguauugugacaacgccggcagcgugucuuucuuuccgcaggcugagaccugcaagguucagagcaaucggguguucugugauaccaugaacucccucacacugcccucugaggucaaccugugcaauaucgacauuuuuaacccuaaauacgauugcaagaucaugaccagcaagacagacguguccagcucugucauuacgucccucggggccaucgugagcuguuauggaaaaaccaagugcacagcuucuaauaaaaaccgcggcaucauuaagaccuucuccaaugggugugauuacguuagcaacaaaggaguggacacagucuccgugggcaauacccuguauuacguuaacaagcaagaaggcaagucucuuuaugugaaaggggagcccaucauuaauuuuuacgacccucuggucuuccccagcgaugaguucgacgccuccaucucucaggugaacgaaaagauuaaucagagccucgccuuuaucagaaaauccgaugaacugcugcacaacgugaauguuggaaagagcacgaccaacauuaugaucacaaccaucauuaucgucauuaucgugauucuucuccugcugaucgcugugggccucuuccuguacugcaaagcgcggugaggacuaguggaagcauuuuccuggcugauuaaaagaaauuacucagcuauggucaucuguuccuguuagaaggcuaugcagcauauuauauacuaugcgcauguuaugaaaugcauaauaaaaaauuuuaaaaaaucuaaaagaucuaaaaaaaaaaaaaaaaaaaaaaaaaaaaaaaaaaaaaaaaaaaaaaaaaaaaaaaaaaaaaaaaugcaucccccccccccccccccccccccccccccccaaaggcucuuuucagagccaccagaauu

SEQ ID NO: 12992 - RNA, 2014 nt, Artificial Sequence
  mRNA product Design d-4 comprising derived and/or modified sequence from HRSV(Memphis-37)__AIY60640.1__F-del_DSCav1 (opt6)
gggagagucccgcagucggcguccagcggcucugcuuguucgugugugugucguugcaggccuuauucaagcuuaccauggaauuaccaauccuuaaaacaaacgcaauaacaaccauccucgcagcaguaacucucugcuucgcuucaucucaaaacaucacagaagaauuuuaccaaagcacaugcucagcuguauccaaagguuaucuaucagccuugagaaccggaugguacacaucaguaauaacaauugaacuaucaaacauuaaagaaaacaaaugcaacggcaccgacgcaaaaguaaaacuaaucaaacaagaacuagacaaauauaaaaaugcaguaacagaauuacaauuauuaaugcaauccacaccagcugcaaacaaccgagcccgaagagaacuaccaagauucaugaacuacacacuaaacaacaccaaaaauaacaacgucacccuaucuaaaaaacguaaaagaagauucuuaggauuccucuuaggagucggauccgcaauagcaagcggcauagccguauguaaaguccuacacuuagaaggugaagugaauaaaauaaaaaacgcccuauuaagcacuaacaaagcaguagucucccuaucaaacggaguuucaguacucacauucaaaguacucgaccucaaaaacuacaucgacaaacaacuuuuaccaauucuaaacaaacaaucaugcuccauaucuaauaucgaaaccgucaucgaauuucaacaaaaaaacaauagacuacuagaaauaacuagagaauuuucaguaaacgccggcguuacgacaccagucucuacauacauguuaaccaauucagaacucuuaucauuaaucaacgacaugccaauaacaaacgaccaaaaaaaacuaauguccaauaacguacaaauagucagacaacaaucauacucaauuaugugcauaauaaaagaagaaguacuagcuuacguaguacaacucccccuauacggcguaauagacacuccauguuggaaauuacacacaucaccauuauguaccaccaauacaaaagaaggcucaaacauaugccuaacaagaacagauagaggaugguauugcgacaacgcaggcucaguuuccuuuuucccccaagcagaaaccugcaaaguacaaucaaaucguguuuuuugcgacaccaugaacucacucacauuaccaucagaaguaaaccuaugcaacauagacauauucaacccaaaauacgacugcaaaaucaugacaucaaaaacagacguauccucuucaguaauuacuagcuuaggagcaauagucucuuguuauggaaaaacaaaaugcacagccaguaacaaaaaccgcggaauaauaaaaaccuucucaaacgguugcgauuacgucucuaacaaaggagucgacacaguaucaguaggcaauacauuauacuacguuaacaaacaagaaggaaaaucuuuauacgucaaaggagaacccauuauaaacuuuuacgacccauuagucuucccuuccgacgaauuugacgccagcauuucacaaguaaacgaaaaaauaaaccaaucacucgcauuuauaagaaaaucugacgaauuacuccacaacguaaacguaggaaaauccacaacaaacauaaugauaacaaccauaaucaucgucauaauagucauacuucuccuauuaauugcaguaggcuuauuccuauacuguaaagcacgauaaggacuaguggaagcauuuuccuggcugauuaaaagaaauuacucagcuauggucaucuguuccuguuagaaggcuaugcagcauauuauauacuaugcgcauguuaugaaaugcauaauaaaaaauuuuaaaaaaucuaaaagaucuaaaaaaaaaaaaaaaaaaaaaaaaaaaaaaaaaaaaaaaaaaaaaaaaaaaaaaaaaaaaaaaaugcaucccccccccccccccccccccccccccccccaaaggcucuuuucagagccaccagaauu

SEQ ID NO: 12993 - RNA, 2014 nt, Artificial Sequence
  mRNA product Design d-4 comprising derived and/or modified sequence from HRSV(Memphis-37)__AIY60640.1__F-del_DSCav1 (opt11)
gggagagucccgcagucggcguccagcggcucugcuuguucgugugugugucguugcaggccuuauucaagcuuaccauggaacuaccaauccuaaaaacuaacgcaaucaccacaauccucgccgccgucacccuuugcuuugcguccucccaaaacauuacugaagaguucuaccaauccacgugcuccgccgucuccaaagguuaccuauccgcccuuaggaccggcugguacaccagcgucaucaccaucgaacuuuccaacaucaaagaaaacaaauguaacggcaccgacgcaaaagucaaacuuauuaaacaggaacucgacaaauauaagaaugccgucaccgaauuacaacuccucaugcaauccacccccgccgccaacaaccgagcaaggcgcgaacucccucgauucaugaauuacacccucaacaauaccaaaaacaacaacgucacccuauccaagaaacgcaaaagacgcuucuugggcuuccuccucggcgugggcuccgcaauagccuccgguauugccgugugcaaagucuuacaccucgaaggcgaggucaacaaaaucaaaaacgcccuccucuccaccaacaaagccgucgucagccuauccaacggcguuuccguccucaccuucaaaguacucgaccucaaaaacuacaucgacaaacaacuccuacccauacuaaacaaacaauccugcuccauuuccaacaucgaaaccguaaucgaguuccaacagaaaaacaaucgccuccuagaaaucacacgugaauuuucaguuaacgccggaguaacaacuccuguaucuaccuacaugcucaccaauuccgaacuccucagccucauaaacgacaugccaauaacaaacgaccaaaagaaacucaugucuaacaacguacaaaucgucagacaacaaaguuacucaaucauguguaucaucaaagaggaaguccuagcauacgugguccaacucccccucuacggaguaaucgacaccccaugcuggaaacuacacaccagcccccucuguaccacaaacacgaaagaagguuccaacaucugccugacccgaaccgaccgcggcugguacugcgauaacgcuggcuccgucucauucuucccccaagcagaaaccugcaaaguacaauccaaccgaguauucugcgacaccaugaacucacucacccuccccagcgaaguaaaccucugcaacaucgacauauucaacccaaaauacgacugcaaaauuaugaccucuaaaacagacguauccuccucuguaaucacaucccucggggccaucgucuccugcuacggcaaaaccaaaugcaccgccuccaacaaaaaccgcggaaucauaaaaaccuucuccaacggaugcgacuacgucucaaauaaaggcgucgacaccgucuccgucggcaacacgcuauacuacgucaacaaacaagaaggcaaaucacucuacgucaaaggugagcccaucaucaauuucuacgauccccucgucuucccaagcgacgaguucgacgccagcauaucccaaguaaacgagaaaaucaaccaaagccuggccuucauccgcaaauccgacgaacuacuacacaacguaaacguaggcaaguccacuaccaacauaaugaucaccacaaucaucauagucauaaucguuauacuacuccugcucaucgccguaggccucuuccucuauugcaaagcccgauagggacuaguggaagcauuuuccuggcugauuaaaagaaauuacucagcuauggucaucuguuccuguuagaaggcuaugcagcauauuauauacuaugcgcauguuaugaaaugcauaauaaaaaauuuuaaaaaaucuaaaagaucuaaaaaaaaaaaaaaaaaaaaaaaaaaaaaaaaaaaaaaaaaaaaaaaaaaaaaaaaaaaaaaaaugcaucccccccccccccccccccccccccccccccaaaggcucuuuucagagccaccagaauu

SEQ ID NO: 12994 - RNA, 2111 nt, Artificial Sequence
  mRNA product Design d-5 comprising derived and/or modified sequence from HRSV(Memphis-37)__AIY60640.1__F-del_DSCav1 (opt1)
gggagagggcgcuuggcuugcaaggacccugagcugcggcauugaagcacacccaacccaacucgacugaagucagccucacugaaccggaucugagaaucuucucucucugggcuugccagggcucuccgaaccuagcuagcauccucuucaauuccaacuagaaagcuuaccauggagcugcccauccucaagaccaacgccaucaccacgauccuggccgcggugacccugugcuucgccagcucccagaacaucaccgaggaguucuaccagagcacgugcuccgccgucagcaagggcuaccucuccgcccugcgcaccgggugguacaccagcgugaucaccaucgagcuguccaacaucaaggagaacaagugcaacggcaccgacgccaaggugaagcucaucaagcaggagcuggacaaguacaagaacgcggucacggagcugcagcuccugaugcagagcaccccggccgccaacaaccgggcccgccgggagcugccccgcuucaugaacuacacccucaacaacaccaagaacaacaacgugacgcuguccaagaagcggaagcgccgguuccugggguuccuccugggcguggggagcgcgaucgccuccggcaucgccgucugcaaggugcugcaccucgagggcgaggugaacaagaucaagaacgcccugcuguccaccaacaaggccgucgugagccucuccaacggggugagcguccugaccuucaaggugcuggaccucaagaacuacaucgacaagcagcugcugcccauccugaacaagcagagcugcuccaucagcaacaucgagaccgucaucgaguuccagcagaagaacaaccgccuccuggagaucacgcgggaguucagcgugaacgcgggcgugaccacccccgucuccaccuacaugcugacgaacagcgagcuccugucccugaucaacgacaugccgaucaccaacgaccagaagaagcucaugagcaacaacgugcagaucgugcgccagcaguccuacagcaucaugugcaucaucaaggaggagguccuggccuacguggugcagcugccccucuacggggucaucgacacccccugcuggaagcugcacaccagcccccugugcacgaccaacaccaaggagggcuccaacaucugccucacccggacggaccgcgggugguacugcgacaacgccggcagcguguccuucuucccgcaggccgagaccugcaagguccagagcaaccggguguucugcgacaccaugaacucccugacccugcccagcgaggugaaccucugcaacaucgacaucuucaaccccaaguacgacugcaagaucaugacguccaagaccgacgucagcuccagcgugaucaccucccugggcgccaucgugagcugcuacgggaagaccaagugcacggcgagcaacaagaaccgcggcaucaucaagaccuucuccaacgggugcgacuacgucagcaacaagggcguggacaccguguccgucggcaacacccuguacuacgugaacaagcaggagggcaagagccucuacgugaagggggagcccaucaucaacuucuacgacccgcuggucuuccccuccgacgaguucgacgccagcaucucccaggugaacgagaagaucaaccagagccuggccuucauccggaaguccgacgagcuccugcacaacgugaacgucggcaagagcaccacgaacaucaugaucaccaccaucaucaucgugaucaucgugauccugcugcuccugaucgccgucgggcuguuccucuacugcaaggcccgcugaggacuaguggaagcauuuuccuggcugauuaaaagaaauuacucagcuauggucaucuguuccuguuagaaggcuaugcagcauauuauauacuaugcgcauguuaugaaaugcauaauaaaaaauuuuaaaaaaucuaaaagaucuaaaaaaaaaaaaaaaaaaaaaaaaaaaaaaaaaaaaaaaaaaaaaaaaaaaaaaaaaaaaaaaaugcaucccccccccccccccccccccccccccccccaaaggcucuuuucagagccaccagaauu

SEQ ID NO: 12995 - RNA, 2111 nt, Artificial Sequence
  mRNA product Design d-5 comprising derived and/or modified sequence from HRSV(Memphis-37)__AIY60640.1__F-del_DSCav1 (opt1)
gggagagggcgcuuggcuugcaaggacccugagcugcggcauugaagcacacccaacccaacucgacugaagucagccucacugaaccggaucugagaaucuucucucucugggcuugccagggcucuccgaaccuagcuagcauccucuucaauuccaacuagaaagcuuaccauggagcugcccauccucaagaccaacgccaucaccacgauccuggccgcggugacccugugcuucgccagcucccagaacaucaccgaggaguucuaccagagcacgugcuccgccgucagcaagggcuaccucuccgcccugcgcaccgggugguacaccagcgugaucaccaucgagcuguccaacaucaaggagaacaagugcaacggcaccgacgccaaggugaagcucaucaagcaggagcuggacaaguacaagaacgcggucacggagcugcagcuccugaugcagagcaccccggccgccaacaaccgggcccgccgggagcugccccgcuucaugaacuacacccucaacaacaccaagaacaacaacgugacgcuguccaagaagcggaagcgccgguuccugggguuccuccugggcguggggagcgcgaucgccuccggcaucgccgucugcaaggugcugcaccucgagggcgaggugaacaagaucaagaacgcccugcugagcaccaacaaggccgucgugucccucagcaacgggguguccguccugaccuucaaggugcuggaccucaagaacuacaucgacaagcagcugcugcccauccucaacaagcagagcugcuccaucagcaacaucgagaccgugaucgaguuccagcagaagaacaaccgccugcuggagaucacgcgggaguucuccgucaacgcgggcgugaccacccccgugagcaccuacaugcucacgaacagcgagcugcugucccucaucaacgacaugccgaucaccaacgaccagaagaagcugaugagcaacaacguccagaucgugcgccagcaguccuacagcaucaugugcaucaucaaggaggaggugcuggccuacgucgugcagcucccccuguacggggugaucgacacccccugcuggaagcugcacaccagcccccucugcacgaccaacaccaaggagggcagcaacaucugccugacccggacggaccgcgggugguacugcgacaacgccggcuccgucagcuucuucccgcaggccgagaccugcaaggugcaguccaaccgggucuucugcgacaccaugaacagccugacccuccccuccgaggugaaccugugcaacaucgacaucuucaaccccaaguacgacugcaagaucaugacgagcaagaccgacguguccagcuccgucaucaccagccugggcgccaucguguccugcuacgggaagaccaagugcacggcgagcaacaagaaccgcggcaucaucaagaccuucuccaacgggugcgacuacgugagcaacaagggcgucgacaccgugagcgugggcaacacccucuacuacgucaacaagcaggaggggaagucccuguacgugaagggcgagcccaucaucaacuucuacgacccgcugguguuccccagcgacgaguucgacgccuccaucagccaggucaacgagaagaucaaccagucccucgccuucauccggaaguccgacgagcugcugcacaacgugaacguggggaaguccaccacgaacaucaugaucaccaccaucaucaucgucaucaucgugauccugcuccugcugaucgccgugggccucuuccuguacugcaaggcccgcugaggacuaguggaagcauuuuccuggcugauuaaaagaaauuacucagcuauggucaucuguuccuguuagaaggcuaugcagcauauuauauacuaugcgcauguuaugaaaugcauaauaaaaaauuuuaaaaaaucuaaaagaucuaaaaaaaaaaaaaaaaaaaaaaaaaaaaaaaaaaaaaaaaaaaaaaaaaaaaaaaaaaaaaaaaugcaucccccccccccccccccccccccccccccccaaaggcucuuuucagagccaccagaauu

SEQ ID NO: 12996 - RNA, 2111 nt, Artificial Sequence
  mRNA product Design d-5 comprising derived and/or modified sequence from HRSV(Memphis-37)__AIY60640.1__F-del_DSCav1 (opt2)
gggagagggcgcuuggcuugcaaggacccugagcugcggcauugaagcacacccaacccaacucgacugaagucagccucacugaaccggaucugagaaucuucucucucugggcuugccagggcucuccgaaccuagcuagcauccucuucaauuccaacuagaaagcuuaccauggagcuccccauccucaagaccaacgccaucaccaccauccucgccgccgucacccucugcuucgccuccucccagaacaucaccgaggaguucuaccaguccaccugcuccgccgucuccaagggcuaccucuccgcccuccgcaccggcugguacaccuccgucaucaccaucgagcucuccaacaucaaggagaacaagugcaacggcaccgacgccaaggucaagcucaucaagcaggagcucgacaaguacaagaacgccgucaccgagcuccagcuccucaugcaguccacccccgccgccaacaaccgcgcccgccgcgagcucccccgcuucaugaacuacacccucaacaacaccaagaacaacaacgucacccucuccaagaagcgcaagcgccgcuuccucggcuuccuccucggcgucggcuccgccaucgccuccggcaucgccgucugcaagguccuccaccucgagggcgaggucaacaagaucaagaacgcccuccucuccaccaacaaggccgucgucucccucuccaacggcgucuccguccucaccuucaagguccucgaccucaagaacuacaucgacaagcagcuccuccccauccucaacaagcaguccugcuccaucuccaacaucgagaccgucaucgaguuccagcagaagaacaaccgccuccucgagaucacccgcgaguucuccgucaacgccggcgucaccacccccgucuccaccuacaugcucaccaacuccgagcuccucucccucaucaacgacaugcccaucaccaacgaccagaagaagcucauguccaacaacguccagaucguccgccagcaguccuacuccaucaugugcaucaucaaggaggagguccucgccuacgucguccagcucccccucuacggcgucaucgacacccccugcuggaagcuccacaccuccccccucugcaccaccaacaccaaggagggcuccaacaucugccucacccgcaccgaccgcggcugguacugcgacaacgccggcuccgucuccuucuucccccaggccgagaccugcaagguccaguccaaccgcgucuucugcgacaccaugaacucccucacccuccccuccgaggucaaccucugcaacaucgacaucuucaaccccaaguacgacugcaagaucaugaccuccaagaccgacgucuccuccuccgucaucaccucccucggcgccaucgucuccugcuacggcaagaccaagugcaccgccuccaacaagaaccgcggcaucaucaagaccuucuccaacggcugcgacuacgucuccaacaagggcgucgacaccgucuccgucggcaacacccucuacuacgucaacaagcaggagggcaagucccucuacgucaagggcgagcccaucaucaacuucuacgacccccucgucuuccccuccgacgaguucgacgccuccaucucccaggucaacgagaagaucaaccagucccucgccuucauccgcaaguccgacgagcuccuccacaacgucaacgucggcaaguccaccaccaacaucaugaucaccaccaucaucaucgucaucaucgucauccuccuccuccucaucgccgucggccucuuccucuacugcaaggcccgcugaggacuaguggaagcauuuuccuggcugauuaaaagaaauuacucagcuauggucaucuguuccuguuagaaggcuaugcagcauauuauauacuaugcgcauguuaugaaaugcauaauaaaaaauuuuaaaaaaucuaaaagaucuaaaaaaaaaaaaaaaaaaaaaaaaaaaaaaaaaaaaaaaaaaaaaaaaaaaaaaaaaaaaaaaaugcaucccccccccccccccccccccccccccccccaaaggcucuuuucagagccaccagaauu

SEQ ID NO: 12997 - RNA, 2111 nt, Artificial Sequence
  mRNA product Design d-5 comprising derived and/or modified sequence from HRSV(Memphis-37)__AIY60640.1__F-del_DSCav1 (opt3)
gggagagggcgcuuggcuugcaaggacccugagcugcggcauugaagcacacccaacccaacucgacugaagucagccucacugaaccggaucugagaaucuucucucucugggcuugccagggcucuccgaaccuagcuagcauccucuucaauuccaacuagaaagcuuaccauggagcugcccauccucaagaccaacgccauuacaacuauacuugcugcagugacgcugugcuucgccagcucccagaauaucaccgaagaguuuuaccaaucuacauguucagcggucaguaaaggcuauuugagcgcuuuaagaacugggugguacaccuccguuauuacaaucgaacugucuaacauuaaggagaauaaaugcaacggaaccgacgccaaggugaaacuaaucaagcaggaacucgauaaguauaaaaaugcaguaacugagcugcagcuucugaugcagucgaccccugccgcuaacaauagggcacggcgcgaguugccacgauucaugaacuacacacucaauaacacgaagaauaacaaugugacucugagcaaaaagcguaaaagaagguuucuggguuuccucuuaggcgucgggucagccauagcuaguggaaucgccguguguaagguucugcaccuugaaggcgaggugaacaagauuaaaaaugcguugcuguccaccaacaaggcagucgugucucuaagcaacgguguauccguucucacauuuaaagugcuggaccuuaagaauuauaucgauaaacaacuguugccgauucucaacaagcagucaugcaguaucagcaauauagaaacugucauugaguuccagcagaaaaacaaucggcuguuagagaucacccgcgaauuuucugugaacgccggggugacaacccccgucuccacguacaugcugacuaauucagagcuccuuagccugauuaacgacaugccuaucacaaaugaucaaaagaaguugaugaguaacaauguucagaucgugagacagcagucuuauuccauuauguguauaaucaaagaagagguacuagcuuacgugguccaacugccacucuacggagugauugacacccccugcuggaagcugcauacuagcccucuuuguacaaccaacacgaaagaaggcucgaauaucugccugaccaggacagaucggggcugguauugugacaacgccgggucuguuuccuucuuuccacaggcagagacuugcaaggugcagucaaaucgcgucuucugugauaccaugaacaguuugacacuccccagcgaggugaaccugugcaauauagacauuuuuaacccuaaauacgauugcaagaucaugacuuccaagaccgacguaucuagcucaguuaucacaaguuuaggagcuauuguguccuguuaugguaaaaccaagugcacugccagcaauaaaaaccgaggcaucauuaagacguucucuaaugggugugauuacgucucaaacaaaggaguggacacagucagugugggcaauacccuguauuacguuaacaagcaagaagguaagagccuauaugugaaaggggagccaauaaucaauuuuuacgacccgcucguauuccccuccgaugaguucgacgcgucuauuucgcaggucaacgaaaagaucaaucagagccuggccuuuaucagaaaauccgaugaacuuuugcacaacgugaauguuggaaagucaacuaccaacauuaugauaacaaccaucauuaucgugauuaucgucauacugcuccugcuuaucgcagugggccuguucuuguacugcaaagcuaggugaggacuaguggaagcauuuuccuggcugauuaaaagaaauuacucagcuauggucaucuguuccuguuagaaggcuaugcagcauauuauauacuaugcgcauguuaugaaaugcauaauaaaaaauuuuaaaaaaucuaaaagaucuaaaaaaaaaaaaaaaaaaaaaaaaaaaaaaaaaaaaaaaaaaaaaaaaaaaaaaaaaaaaaaaaugcaucccccccccccccccccccccccccccccccaaaggcucuuuucagagccaccagaauu

SEQ ID NO: 12998 - RNA, 2111 nt, Artificial Sequence
  mRNA product Design d-5 comprising derived and/or modified sequence from HRSV(Memphis-37)__AIY60640.1__F-del_DSCav1 (opt4)
gggagagggcgcuuggcuugcaaggacccugagcugcggcauugaagcacacccaacccaacucgacugaagucagccucacugaaccggaucugagaaucuucucucucugggcuugccagggcucuccgaaccuagcuagcauccucuucaauuccaacuagaaagcuuaccauggagcugcccauccugaagaccaacgccaucaccaccauccuggccgccgugacccugugcuucgccagcagccagaacaucaccgaggaguucuaccagagcaccugcagcgccgugagcaagggcuaccugagcgcccugagaaccggcugguacaccagcgugaucaccaucgagcugagcaacaucaaggagaacaagugcaacggcaccgacgccaaggugaagcugaucaagcaggagcuggacaaguacaagaacgccgugaccgagcugcagcugcugaugcagagcacccccgccgccaacaacagagccagaagagagcugcccagauucaugaacuacacccugaacaacaccaagaacaacaacgugacccugagcaagaagagaaagagaagauuccugggcuuccugcugggcgugggcagcgccaucgccagcggcaucgccgugugcaaggugcugcaccuggagggcgaggugaacaagaucaagaacgcccugcugagcaccaacaaggccguggugagccugagcaacggcgugagcgugcugaccuucaaggugcuggaccugaagaacuacaucgacaagcagcugcugcccauccugaacaagcagagcugcagcaucagcaacaucgagaccgugaucgaguuccagcagaagaacaacagacugcuggagaucaccagagaguucagcgugaacgccggcgugaccacccccgugagcaccuacaugcugaccaacagcgagcugcugagccugaucaacgacaugcccaucaccaacgaccagaagaagcugaugagcaacaacgugcagaucgugagacagcagagcuacagcaucaugugcaucaucaaggaggaggugcuggccuacguggugcagcugccccuguacggcgugaucgacacccccugcuggaagcugcacaccagcccccugugcaccaccaacaccaaggagggcagcaacaucugccugaccagaaccgacagaggcugguacugcgacaacgccggcagcgugagcuucuucccccaggccgagaccugcaaggugcagagcaacagaguguucugcgacaccaugaacagccugacccugcccagcgaggugaaccugugcaacaucgacaucuucaaccccaaguacgacugcaagaucaugaccagcaagaccgacgugagcagcagcgugaucaccagccugggcgccaucgugagcugcuacggcaagaccaagugcaccgccagcaacaagaacagaggcaucaucaagaccuucagcaacggcugcgacuacgugagcaacaagggcguggacaccgugagcgugggcaacacccuguacuacgugaacaagcaggagggcaagagccuguacgugaagggcgagcccaucaucaacuucuacgacccccugguguuccccagcgacgaguucgacgccagcaucagccaggugaacgagaagaucaaccagagccuggccuucaucagaaagagcgacgagcugcugcacaacgugaacgugggcaagagcaccaccaacaucaugaucaccaccaucaucaucgugaucaucgugauccugcugcugcugaucgccgugggccuguuccuguacugcaaggccagaugaggacuaguggaagcauuuuccuggcugauuaaaagaaauuacucagcuauggucaucuguuccuguuagaaggcuaugcagcauauuauauacuaugcgcauguuaugaaaugcauaauaaaaaauuuuaaaaaaucuaaaagaucuaaaaaaaaaaaaaaaaaaaaaaaaaaaaaaaaaaaaaaaaaaaaaaaaaaaaaaaaaaaaaaaaugcaucccccccccccccccccccccccccccccccaaaggcucuuuucagagccaccagaauu

SEQ ID NO: 12999 - RNA, 2111 nt, Artificial Sequence
  mRNA product Design d-5 comprising derived and/or modified sequence from HRSV(Memphis-37)__AIY60640.1__F-del_DSCav1 (opt5)
gggagagggcgcuuggcuugcaaggacccugagcugcggcauugaagcacacccaacccaacucgacugaagucagccucacugaaccggaucugagaaucuucucucucugggcuugccagggcucuccgaaccuagcuagcauccucuucaauuccaacuagaaagcuuaccauggagcugcccauccucaagaccaacgccauuacaacgauccuggcugccgugacccuuugcuucgcgagcucccagaauauuacagaagaguuuuaccaaucuaccuguagcgcugucuccaaaggcuaucugucugcccucagaacagggugguacaccagcguuaucacaauugaacuguccaacaucaaggagaauaaaugcaacggaaccgacgccaaggugaaacuuaucaagcaggaacuggauaaguauaaaaaugcugugacggagcuccagcugcugaugcagucuaccccugccgcuaacaaucgggcccgcagagagcucccgcgguucaugaacuacacacugaauaacaccaagaauaacaaugucacacuuagcaaaaagcgcaaaagacgguuucugggcuuccuccugggggugggauccgcgauugccagcggcaucgcuguuuguaaggugcuucaccuggaaggggaggucaacaagauuaaaaaugcccuccugucuaccaacaaggcugugguuucccugagcaacggagugucuguccucacguuuaaagugcuggaccuuaagaauuauaucgauaaacaacugcuccccauucugaacaagcaguccugcagcaucucuaauauugaaacagugaucgaguuccagcagaaaaacaaucgccuucuggagaucaccagagaauuuuccgucaacgccggcguuacaaccccugugagcaccuacaugcucacaaauuccgagcugcugucucucauuaacgacaugcccaucacgaaugaucaaaagaagcugaugagcaacaaugugcagauuguccggcagcaguccuauagcaucauguguauuaucaaagaagaggugcuugcguacguugugcaacugccucucuacggcgucaucgacacccccugcuggaagcugcauacaucuccucuuuguaccacaaacaccaaagaaggguccaauauuugccugacgcgcacagauagaggaugguauugugacaacgccggcagcgugucuuucuuuccgcaggcugagaccugcaagguucagagcaaucggguguucugugauaccaugaacucccucacacugcccucugaggucaaccugugcaauaucgacauuuuuaacccuaaauacgauugcaagaucaugaccagcaagacagacguguccagcucugucauuacgucccucggggccaucgugagcuguuauggaaaaaccaagugcacagcuucuaauaaaaaccgcggcaucauuaagaccuucuccaaugggugugauuacguuagcaacaaaggaguggacacagucuccgugggcaauacccuguauuacguuaacaagcaagaaggcaagucucuuuaugugaaaggggagcccaucauuaauuuuuacgacccucuggucuuccccagcgaugaguucgacgccuccaucucucaggugaacgaaaagauuaaucagagccucgccuuuaucagaaaauccgaugaacugcugcacaacgugaauguuggaaagagcacgaccaacauuaugaucacaaccaucauuaucgucauuaucgugauucuucuccugcugaucgcugugggccucuuccuguacugcaaagcgcggugaggacuaguggaagcauuuuccuggcugauuaaaagaaauuacucagcuauggucaucuguuccuguuagaaggcuaugcagcauauuauauacuaugcgcauguuaugaaaugcauaauaaaaaauuuuaaaaaaucuaaaagaucuaaaaaaaaaaaaaaaaaaaaaaaaaaaaaaaaaaaaaaaaaaaaaaaaaaaaaaaaaaaaaaaaugcaucccccccccccccccccccccccccccccccaaaggcucuuuucagagccaccagaauu

SEQ ID NO: 13000 - RNA, 2111 nt, Artificial Sequence
  mRNA product Design d-5 comprising derived and/or modified sequence from HRSV(Memphis-37)__AIY60640.1__F-del_DSCav1 (opt6)
gggagagggcgcuuggcuugcaaggacccugagcugcggcauugaagcacacccaacccaacucgacugaagucagccucacugaaccggaucugagaaucuucucucucugggcuugccagggcucuccgaaccuagcuagcauccucuucaauuccaacuagaaagcuuaccauggaauuaccaauccuuaaaacaaacgcaauaacaaccauccucgcagcaguaacucucugcuucgcuucaucucaaaacaucacagaagaauuuuaccaaagcacaugcucagcuguauccaaagguuaucuaucagccuugagaaccggaugguacacaucaguaauaacaauugaacuaucaaacauuaaagaaaacaaaugcaacggcaccgacgcaaaaguaaaacuaaucaaacaagaacuagacaaauauaaaaaugcaguaacagaauuacaauuauuaaugcaauccacaccagcugcaaacaaccgagcccgaagagaacuaccaagauucaugaacuacacacuaaacaacaccaaaaauaacaacgucacccuaucuaaaaaacguaaaagaagauucuuaggauuccucuuaggagucggauccgcaauagcaagcggcauagccguauguaaaguccuacacuuagaaggugaagugaauaaaauaaaaaacgcccuauuaagcacuaacaaagcaguagucucccuaucaaacggaguuucaguacucacauucaaaguacucgaccucaaaaacuacaucgacaaacaacuuuuaccaauucuaaacaaacaaucaugcuccauaucuaauaucgaaaccgucaucgaauuucaacaaaaaaacaauagacuacuagaaauaacuagagaauuuucaguaaacgccggcguuacgacaccagucucuacauacauguuaaccaauucagaacucuuaucauuaaucaacgacaugccaauaacaaacgaccaaaaaaaacuaauguccaauaacguacaaauagucagacaacaaucauacucaauuaugugcauaauaaaagaagaaguacuagcuuacguaguacaacucccccuauacggcguaauagacacuccauguuggaaauuacacacaucaccauuauguaccaccaauacaaaagaaggcucaaacauaugccuaacaagaacagauagaggaugguauugcgacaacgcaggcucaguuuccuuuuucccccaagcagaaaccugcaaaguacaaucaaaucguguuuuuugcgacaccaugaacucacucacauuaccaucagaaguaaaccuaugcaacauagacauauucaacccaaaauacgacugcaaaaucaugacaucaaaaacagacguauccucuucaguaauuacuagcuuaggagcaauagucucuuguuauggaaaaacaaaaugcacagccaguaacaaaaaccgcggaauaauaaaaaccuucucaaacgguugcgauuacgucucuaacaaaggagucgacacaguaucaguaggcaauacauuauacuacguuaacaaacaagaaggaaaaucuuuauacgucaaaggagaacccauuauaaacuuuuacgacccauuagucuucccuuccgacgaauuugacgccagcauuucacaaguaaacgaaaaaauaaaccaaucacucgcauuuauaagaaaaucugacgaauuacuccacaacguaaacguaggaaaauccacaacaaacauaaugauaacaaccauaaucaucgucauaauagucauacuucuccuauuaauugcaguaggcuuauuccuauacuguaaagcacgauaaggacuaguggaagcauuuuccuggcugauuaaaagaaauuacucagcuauggucaucuguuccuguuagaaggcuaugcagcauauuauauacuaugcgcauguuaugaaaugcauaauaaaaaauuuuaaaaaaucuaaaagaucuaaaaaaaaaaaaaaaaaaaaaaaaaaaaaaaaaaaaaaaaaaaaaaaaaaaaaaaaaaaaaaaaugcaucccccccccccccccccccccccccccccccaaaggcucuuuucagagccaccagaauu

SEQ ID NO: 13001 - RNA, 2111 nt, Artificial Sequence
  mRNA product Design d-5 comprising derived and/or modified sequence from HRSV(Memphis-37)__AIY60640.1__F-del_DSCav1 (opt11)
gggagagggcgcuuggcuugcaaggacccugagcugcggcauugaagcacacccaacccaacucgacugaagucagccucacugaaccggaucugagaaucuucucucucugggcuugccagggcucuccgaaccuagcuagcauccucuucaauuccaacuagaaagcuuaccauggaacuaccaauccuaaaaacuaacgcaaucaccacaauccucgccgccgucacccuuugcuuugcguccucccaaaacauuacugaagaguucuaccaauccacgugcuccgccgucuccaaagguuaccuauccgcccuuaggaccggcugguacaccagcgucaucaccaucgaacuuuccaacaucaaagaaaacaaauguaacggcaccgacgcaaaagucaaacuuauuaaacaggaacucgacaaauauaagaaugccgucaccgaauuacaacuccucaugcaauccacccccgccgccaacaaccgagcaaggcgcgaacucccucgauucaugaauuacacccucaacaauaccaaaaacaacaacgucacccuauccaagaaacgcaaaagacgcuucuugggcuuccuccucggcgugggcuccgcaauagccuccgguauugccgugugcaaagucuuacaccucgaaggcgaggucaacaaaaucaaaaacgcccuccucuccaccaacaaagccgucgucagccuauccaacggcguuuccguccucaccuucaaaguacucgaccucaaaaacuacaucgacaaacaacuccuacccauacuaaacaaacaauccugcuccauuuccaacaucgaaaccguaaucgaguuccaacagaaaaacaaucgccuccuagaaaucacacgugaauuuucaguuaacgccggaguaacaacuccuguaucuaccuacaugcucaccaauuccgaacuccucagccucauaaacgacaugccaauaacaaacgaccaaaagaaacucaugucuaacaacguacaaaucgucagacaacaaaguuacucaaucauguguaucaucaaagaggaaguccuagcauacgugguccaacucccccucuacggaguaaucgacaccccaugcuggaaacuacacaccagcccccucuguaccacaaacacgaaagaagguuccaacaucugccugacccgaaccgaccgcggcugguacugcgauaacgcuggcuccgucucauucuucccccaagcagaaaccugcaaaguacaauccaaccgaguauucugcgacaccaugaacucacucacccuccccagcgaaguaaaccucugcaacaucgacauauucaacccaaaauacgacugcaaaauuaugaccucuaaaacagacguauccuccucuguaaucacaucccucggggccaucgucuccugcuacggcaaaaccaaaugcaccgccuccaacaaaaaccgcggaaucauaaaaaccuucuccaacggaugcgacuacgucucaaauaaaggcgucgacaccgucuccgucggcaacacgcuauacuacgucaacaaacaagaaggcaaaucacucuacgucaaaggugagcccaucaucaauuucuacgauccccucgucuucccaagcgacgaguucgacgccagcauaucccaaguaaacgagaaaaucaaccaaagccuggccuucauccgcaaauccgacgaacuacuacacaacguaaacguaggcaaguccacuaccaacauaaugaucaccacaaucaucauagucauaaucguuauacuacuccugcucaucgccguaggccucuuccucuauugcaaagcccgauagggacuaguggaagcauuuuccuggcugauuaaaagaaauuacucagcuauggucaucuguuccuguuagaaggcuaugcagcauauuauauacuaugcgcauguuaugaaaugcauaauaaaaaauuuuaaaaaaucuaaaagaucuaaaaaaaaaaaaaaaaaaaaaaaaaaaaaaaaaaaaaaaaaaaaaaaaaaaaaaaaaaaaaaaaugcaucccccccccccccccccccccccccccccccaaaggcucuuuucagagccaccagaauu

SEQ ID NO: 13002 - RNA, 1991 nt, Artificial Sequence
  mRNA product Design e-1 comprising derived and/or modified sequence from HRSV(Memphis-37)__AIY60640.1__F-del_DSCav1 (opt1)
gggagaauauaagcguuggcggagcgucgguuguagcacucugcgcgcccgcucuucugcugcuguuugucuacuuccuccugcuuccccgccgccgccgccgccaucaagcuuaccauggagcugcccauccucaagaccaacgccaucaccacgauccuggccgcggugacccugugcuucgccagcucccagaacaucaccgaggaguucuaccagagcacgugcuccgccgucagcaagggcuaccucuccgcccugcgcaccgggugguacaccagcgugaucaccaucgagcuguccaacaucaaggagaacaagugcaacggcaccgacgccaaggugaagcucaucaagcaggagcuggacaaguacaagaacgcggucacggagcugcagcuccugaugcagagcaccccggccgccaacaaccgggcccgccgggagcugccccgcuucaugaacuacacccucaacaacaccaagaacaacaacgugacgcuguccaagaagcggaagcgccgguuccugggguuccuccugggcguggggagcgcgaucgccuccggcaucgccgucugcaaggugcugcaccucgagggcgaggugaacaagaucaagaacgcccugcuguccaccaacaaggccgucgugagccucuccaacggggugagcguccugaccuucaaggugcuggaccucaagaacuacaucgacaagcagcugcugcccauccugaacaagcagagcugcuccaucagcaacaucgagaccgucaucgaguuccagcagaagaacaaccgccuccuggagaucacgcgggaguucagcgugaacgcgggcgugaccacccccgucuccaccuacaugcugacgaacagcgagcuccugucccugaucaacgacaugccgaucaccaacgaccagaagaagcucaugagcaacaacgugcagaucgugcgccagcaguccuacagcaucaugugcaucaucaaggaggagguccuggccuacguggugcagcugccccucuacggggucaucgacacccccugcuggaagcugcacaccagcccccugugcacgaccaacaccaaggagggcuccaacaucugccucacccggacggaccgcgggugguacugcgacaacgccggcagcguguccuucuucccgcaggccgagaccugcaagguccagagcaaccggguguucugcgacaccaugaacucccugacccugcccagcgaggugaaccucugcaacaucgacaucuucaaccccaaguacgacugcaagaucaugacguccaagaccgacgucagcuccagcgugaucaccucccugggcgccaucgugagcugcuacgggaagaccaagugcacggcgagcaacaagaaccgcggcaucaucaagaccuucuccaacgggugcgacuacgucagcaacaagggcguggacaccguguccgucggcaacacccuguacuacgugaacaagcaggagggcaagagccucuacgugaagggggagcccaucaucaacuucuacgacccgcuggucuuccccuccgacgaguucgacgccagcaucucccaggugaacgagaagaucaaccagagccuggccuucauccggaaguccgacgagcuccugcacaacgugaacgucggcaagagcaccacgaacaucaugaucaccaccaucaucaucgugaucaucgugauccugcugcuccugaucgccgucgggcuguuccucuacugcaaggcccgcugaggacuaguguccaccugucccuccugggcugcuggauugucucguuuuccugccaaauaaacaggaucagcgcuuuacagaucuaaaaaaaaaaaaaaaaaaaaaaaaaaaaaaaaaaaaaaaaaaaaaaaaaaaaaaaaaaaaaaaaugcaucccccccccccccccccccccccccccccccaaaggcucuuuucagagccaccagaauu

SEQ ID NO: 13003 - RNA, 1991 nt, Artificial Sequence
  mRNA product Design e-1 comprising derived and/or modified sequence from HRSV(Memphis-37)__AIY60640.1__F-del_DSCav1 (opt1)
gggagaauauaagcguuggcggagcgucgguuguagcacucugcgcgcccgcucuucugcugcuguuugucuacuuccuccugcuuccccgccgccgccgccgccaucaagcuuaccauggagcugcccauccucaagaccaacgccaucaccacgauccuggccgcggugacccugugcuucgccagcucccagaacaucaccgaggaguucuaccagagcacgugcuccgccgucagcaagggcuaccucuccgcccugcgcaccgggugguacaccagcgugaucaccaucgagcuguccaacaucaaggagaacaagugcaacggcaccgacgccaaggugaagcucaucaagcaggagcuggacaaguacaagaacgcggucacggagcugcagcuccugaugcagagcaccccggccgccaacaaccgggcccgccgggagcugccccgcuucaugaacuacacccucaacaacaccaagaacaacaacgugacgcuguccaagaagcggaagcgccgguuccugggguuccuccugggcguggggagcgcgaucgccuccggcaucgccgucugcaaggugcugcaccucgagggcgaggugaacaagaucaagaacgcccugcugagcaccaacaaggccgucgugucccucagcaacgggguguccguccugaccuucaaggugcuggaccucaagaacuacaucgacaagcagcugcugcccauccucaacaagcagagcugcuccaucagcaacaucgagaccgugaucgaguuccagcagaagaacaaccgccugcuggagaucacgcgggaguucuccgucaacgcgggcgugaccacccccgugagcaccuacaugcucacgaacagcgagcugcugucccucaucaacgacaugccgaucaccaacgaccagaagaagcugaugagcaacaacguccagaucgugcgccagcaguccuacagcaucaugugcaucaucaaggaggaggugcuggccuacgucgugcagcucccccuguacggggugaucgacacccccugcuggaagcugcacaccagcccccucugcacgaccaacaccaaggagggcagcaacaucugccugacccggacggaccgcgggugguacugcgacaacgccggcuccgucagcuucuucccgcaggccgagaccugcaaggugcaguccaaccgggucuucugcgacaccaugaacagccugacccuccccuccgaggugaaccugugcaacaucgacaucuucaaccccaaguacgacugcaagaucaugacgagcaagaccgacguguccagcuccgucaucaccagccugggcgccaucguguccugcuacgggaagaccaagugcacggcgagcaacaagaaccgcggcaucaucaagaccuucuccaacgggugcgacuacgugagcaacaagggcgucgacaccgugagcgugggcaacacccucuacuacgucaacaagcaggaggggaagucccuguacgugaagggcgagcccaucaucaacuucuacgacccgcugguguuccccagcgacgaguucgacgccuccaucagccaggucaacgagaagaucaaccagucccucgccuucauccggaaguccgacgagcugcugcacaacgugaacguggggaaguccaccacgaacaucaugaucaccaccaucaucaucgucaucaucgugauccugcuccugcugaucgccgugggccucuuccuguacugcaaggcccgcugaggacuaguguccaccugucccuccugggcugcuggauugucucguuuuccugccaaauaaacaggaucagcgcuuuacagaucuaaaaaaaaaaaaaaaaaaaaaaaaaaaaaaaaaaaaaaaaaaaaaaaaaaaaaaaaaaaaaaaaugcaucccccccccccccccccccccccccccccccaaaggcucuuuucagagccaccagaauu

SEQ ID NO: 13004 - RNA, 1991 nt, Artificial Sequence
  mRNA product Design e-1 comprising derived and/or modified sequence from HRSV(Memphis-37)__AIY60640.1__F-del_DSCav1 (opt2)
gggagaauauaagcguuggcggagcgucgguuguagcacucugcgcgcccgcucuucugcugcuguuugucuacuuccuccugcuuccccgccgccgccgccgccaucaagcuuaccauggagcuccccauccucaagaccaacgccaucaccaccauccucgccgccgucacccucugcuucgccuccucccagaacaucaccgaggaguucuaccaguccaccugcuccgccgucuccaagggcuaccucuccgcccuccgcaccggcugguacaccuccgucaucaccaucgagcucuccaacaucaaggagaacaagugcaacggcaccgacgccaaggucaagcucaucaagcaggagcucgacaaguacaagaacgccgucaccgagcuccagcuccucaugcaguccacccccgccgccaacaaccgcgcccgccgcgagcucccccgcuucaugaacuacacccucaacaacaccaagaacaacaacgucacccucuccaagaagcgcaagcgccgcuuccucggcuuccuccucggcgucggcuccgccaucgccuccggcaucgccgucugcaagguccuccaccucgagggcgaggucaacaagaucaagaacgcccuccucuccaccaacaaggccgucgucucccucuccaacggcgucuccguccucaccuucaagguccucgaccucaagaacuacaucgacaagcagcuccuccccauccucaacaagcaguccugcuccaucuccaacaucgagaccgucaucgaguuccagcagaagaacaaccgccuccucgagaucacccgcgaguucuccgucaacgccggcgucaccacccccgucuccaccuacaugcucaccaacuccgagcuccucucccucaucaacgacaugcccaucaccaacgaccagaagaagcucauguccaacaacguccagaucguccgccagcaguccuacuccaucaugugcaucaucaaggaggagguccucgccuacgucguccagcucccccucuacggcgucaucgacacccccugcuggaagcuccacaccuccccccucugcaccaccaacaccaaggagggcuccaacaucugccucacccgcaccgaccgcggcugguacugcgacaacgccggcuccgucuccuucuucccccaggccgagaccugcaagguccaguccaaccgcgucuucugcgacaccaugaacucccucacccuccccuccgaggucaaccucugcaacaucgacaucuucaaccccaaguacgacugcaagaucaugaccuccaagaccgacgucuccuccuccgucaucaccucccucggcgccaucgucuccugcuacggcaagaccaagugcaccgccuccaacaagaaccgcggcaucaucaagaccuucuccaacggcugcgacuacgucuccaacaagggcgucgacaccgucuccgucggcaacacccucuacuacgucaacaagcaggagggcaagucccucuacgucaagggcgagcccaucaucaacuucuacgacccccucgucuuccccuccgacgaguucgacgccuccaucucccaggucaacgagaagaucaaccagucccucgccuucauccgcaaguccgacgagcuccuccacaacgucaacgucggcaaguccaccaccaacaucaugaucaccaccaucaucaucgucaucaucgucauccuccuccuccucaucgccgucggccucuuccucuacugcaaggcccgcugaggacuaguguccaccugucccuccugggcugcuggauugucucguuuuccugccaaauaaacaggaucagcgcuuuacagaucuaaaaaaaaaaaaaaaaaaaaaaaaaaaaaaaaaaaaaaaaaaaaaaaaaaaaaaaaaaaaaaaaugcaucccccccccccccccccccccccccccccccaaaggcucuuuucagagccaccagaauu

SEQ ID NO: 13005 - RNA, 1991 nt, Artificial Sequence
  mRNA product Design e-1 comprising derived and/or modified sequence from HRSV(Memphis-37)__AIY60640.1__F-del_DSCav1 (opt3)
gggagaauauaagcguuggcggagcgucgguuguagcacucugcgcgcccgcucuucugcugcuguuugucuacuuccuccugcuuccccgccgccgccgccgccaucaagcuuaccauggagcugcccauccucaagaccaacgccauuacaacuauacuugcugcagugacgcugugcuucgccagcucccagaauaucaccgaagaguuuuaccaaucuacauguucagcggucaguaaaggcuauuugagcgcuuuaagaacugggugguacaccuccguuauuacaaucgaacugucuaacauuaaggagaauaaaugcaacggaaccgacgccaaggugaaacuaaucaagcaggaacucgauaaguauaaaaaugcaguaacugagcugcagcuucugaugcagucgaccccugccgcuaacaauagggcacggcgcgaguugccacgauucaugaacuacacacucaauaacacgaagaauaacaaugugacucugagcaaaaagcguaaaagaagguuucuggguuuccucuuaggcgucgggucagccauagcuaguggaaucgccguguguaagguucugcaccuugaaggcgaggugaacaagauuaaaaaugcguugcuguccaccaacaaggcagucgugucucuaagcaacgguguauccguucucacauuuaaagugcuggaccuuaagaauuauaucgauaaacaacuguugccgauucucaacaagcagucaugcaguaucagcaauauagaaacugucauugaguuccagcagaaaaacaaucggcuguuagagaucacccgcgaauuuucugugaacgccggggugacaacccccgucuccacguacaugcugacuaauucagagcuccuuagccugauuaacgacaugccuaucacaaaugaucaaaagaaguugaugaguaacaauguucagaucgugagacagcagucuuauuccauuauguguauaaucaaagaagagguacuagcuuacgugguccaacugccacucuacggagugauugacacccccugcuggaagcugcauacuagcccucuuuguacaaccaacacgaaagaaggcucgaauaucugccugaccaggacagaucggggcugguauugugacaacgccgggucuguuuccuucuuuccacaggcagagacuugcaaggugcagucaaaucgcgucuucugugauaccaugaacaguuugacacuccccagcgaggugaaccugugcaauauagacauuuuuaacccuaaauacgauugcaagaucaugacuuccaagaccgacguaucuagcucaguuaucacaaguuuaggagcuauuguguccuguuaugguaaaaccaagugcacugccagcaauaaaaaccgaggcaucauuaagacguucucuaaugggugugauuacgucucaaacaaaggaguggacacagucagugugggcaauacccuguauuacguuaacaagcaagaagguaagagccuauaugugaaaggggagccaauaaucaauuuuuacgacccgcucguauuccccuccgaugaguucgacgcgucuauuucgcaggucaacgaaaagaucaaucagagccuggccuuuaucagaaaauccgaugaacuuuugcacaacgugaauguuggaaagucaacuaccaacauuaugauaacaaccaucauuaucgugauuaucgucauacugcuccugcuuaucgcagugggccuguucuuguacugcaaagcuaggugaggacuaguguccaccugucccuccugggcugcuggauugucucguuuuccugccaaauaaacaggaucagcgcuuuacagaucuaaaaaaaaaaaaaaaaaaaaaaaaaaaaaaaaaaaaaaaaaaaaaaaaaaaaaaaaaaaaaaaaugcaucccccccccccccccccccccccccccccccaaaggcucuuuucagagccaccagaauu

SEQ ID NO: 13006 - RNA, 1991 nt, Artificial Sequence
  mRNA product Design e-1 comprising derived and/or modified sequence from HRSV(Memphis-37)__AIY60640.1__F-del_DSCav1 (opt4)
gggagaauauaagcguuggcggagcgucgguuguagcacucugcgcgcccgcucuucugcugcuguuugucuacuuccuccugcuuccccgccgccgccgccgccaucaagcuuaccauggagcugcccauccugaagaccaacgccaucaccaccauccuggccgccgugacccugugcuucgccagcagccagaacaucaccgaggaguucuaccagagcaccugcagcgccgugagcaagggcuaccugagcgcccugagaaccggcugguacaccagcgugaucaccaucgagcugagcaacaucaaggagaacaagugcaacggcaccgacgccaaggugaagcugaucaagcaggagcuggacaaguacaagaacgccgugaccgagcugcagcugcugaugcagagcacccccgccgccaacaacagagccagaagagagcugcccagauucaugaacuacacccugaacaacaccaagaacaacaacgugacccugagcaagaagagaaagagaagauuccugggcuuccugcugggcgugggcagcgccaucgccagcggcaucgccgugugcaaggugcugcaccuggagggcgaggugaacaagaucaagaacgcccugcugagcaccaacaaggccguggugagccugagcaacggcgugagcgugcugaccuucaaggugcuggaccugaagaacuacaucgacaagcagcugcugcccauccugaacaagcagagcugcagcaucagcaacaucgagaccgugaucgaguuccagcagaagaacaacagacugcuggagaucaccagagaguucagcgugaacgccggcgugaccacccccgugagcaccuacaugcugaccaacagcgagcugcugagccugaucaacgacaugcccaucaccaacgaccagaagaagcugaugagcaacaacgugcagaucgugagacagcagagcuacagcaucaugugcaucaucaaggaggaggugcuggccuacguggugcagcugccccuguacggcgugaucgacacccccugcuggaagcugcacaccagcccccugugcaccaccaacaccaaggagggcagcaacaucugccugaccagaaccgacagaggcugguacugcgacaacgccggcagcgugagcuucuucccccaggccgagaccugcaaggugcagagcaacagaguguucugcgacaccaugaacagccugacccugcccagcgaggugaaccugugcaacaucgacaucuucaaccccaaguacgacugcaagaucaugaccagcaagaccgacgugagcagcagcgugaucaccagccugggcgccaucgugagcugcuacggcaagaccaagugcaccgccagcaacaagaacagaggcaucaucaagaccuucagcaacggcugcgacuacgugagcaacaagggcguggacaccgugagcgugggcaacacccuguacuacgugaacaagcaggagggcaagagccuguacgugaagggcgagcccaucaucaacuucuacgacccccugguguuccccagcgacgaguucgacgccagcaucagccaggugaacgagaagaucaaccagagccuggccuucaucagaaagagcgacgagcugcugcacaacgugaacgugggcaagagcaccaccaacaucaugaucaccaccaucaucaucgugaucaucgugauccugcugcugcugaucgccgugggccuguuccuguacugcaaggccagaugaggacuaguguccaccugucccuccugggcugcuggauugucucguuuuccugccaaauaaacaggaucagcgcuuuacagaucuaaaaaaaaaaaaaaaaaaaaaaaaaaaaaaaaaaaaaaaaaaaaaaaaaaaaaaaaaaaaaaaaugcaucccccccccccccccccccccccccccccccaaaggcucuuuucagagccaccagaauu

SEQ ID NO: 13007 - RNA, 1991 nt, Artificial Sequence
  mRNA product Design e-1 comprising derived and/or modified sequence from HRSV(Memphis-37)__AIY60640.1__F-del_DSCav1 (opt5)
gggagaauauaagcguuggcggagcgucgguuguagcacucugcgcgcccgcucuucugcugcuguuugucuacuuccuccugcuuccccgccgccgccgccgccaucaagcuuaccauggagcugcccauccucaagaccaacgccauuacaacgauccuggcugccgugacccuuugcuucgcgagcucccagaauauuacagaagaguuuuaccaaucuaccuguagcgcugucuccaaaggcuaucugucugcccucagaacagggugguacaccagcguuaucacaauugaacuguccaacaucaaggagaauaaaugcaacggaaccgacgccaaggugaaacuuaucaagcaggaacuggauaaguauaaaaaugcugugacggagcuccagcugcugaugcagucuaccccugccgcuaacaaucgggcccgcagagagcucccgcgguucaugaacuacacacugaauaacaccaagaauaacaaugucacacuuagcaaaaagcgcaaaagacgguuucugggcuuccuccugggggugggauccgcgauugccagcggcaucgcuguuuguaaggugcuucaccuggaaggggaggucaacaagauuaaaaaugcccuccugucuaccaacaaggcugugguuucccugagcaacggagugucuguccucacguuuaaagugcuggaccuuaagaauuauaucgauaaacaacugcuccccauucugaacaagcaguccugcagcaucucuaauauugaaacagugaucgaguuccagcagaaaaacaaucgccuucuggagaucaccagagaauuuuccgucaacgccggcguuacaaccccugugagcaccuacaugcucacaaauuccgagcugcugucucucauuaacgacaugcccaucacgaaugaucaaaagaagcugaugagcaacaaugugcagauuguccggcagcaguccuauagcaucauguguauuaucaaagaagaggugcuugcguacguugugcaacugccucucuacggcgucaucgacacccccugcuggaagcugcauacaucuccucuuuguaccacaaacaccaaagaaggguccaauauuugccugacgcgcacagauagaggaugguauugugacaacgccggcagcgugucuuucuuuccgcaggcugagaccugcaagguucagagcaaucggguguucugugauaccaugaacucccucacacugcccucugaggucaaccugugcaauaucgacauuuuuaacccuaaauacgauugcaagaucaugaccagcaagacagacguguccagcucugucauuacgucccucggggccaucgugagcuguuauggaaaaaccaagugcacagcuucuaauaaaaaccgcggcaucauuaagaccuucuccaaugggugugauuacguuagcaacaaaggaguggacacagucuccgugggcaauacccuguauuacguuaacaagcaagaaggcaagucucuuuaugugaaaggggagcccaucauuaauuuuuacgacccucuggucuuccccagcgaugaguucgacgccuccaucucucaggugaacgaaaagauuaaucagagccucgccuuuaucagaaaauccgaugaacugcugcacaacgugaauguuggaaagagcacgaccaacauuaugaucacaaccaucauuaucgucauuaucgugauucuucuccugcugaucgcugugggccucuuccuguacugcaaagcgcggugaggacuaguguccaccugucccuccugggcugcuggauugucucguuuuccugccaaauaaacaggaucagcgcuuuacagaucuaaaaaaaaaaaaaaaaaaaaaaaaaaaaaaaaaaaaaaaaaaaaaaaaaaaaaaaaaaaaaaaaugcaucccccccccccccccccccccccccccccccaaaggcucuuuucagagccaccagaauu

SEQ ID NO: 13008 - RNA, 1991 nt, Artificial Sequence
  mRNA product Design e-1 comprising derived and/or modified sequence from HRSV(Memphis-37)__AIY60640.1__F-del_DSCav1 (opt6)
gggagaauauaagcguuggcggagcgucgguuguagcacucugcgcgcccgcucuucugcugcuguuugucuacuuccuccugcuuccccgccgccgccgccgccaucaagcuuaccauggaauuaccaauccuuaaaacaaacgcaauaacaaccauccucgcagcaguaacucucugcuucgcuucaucucaaaacaucacagaagaauuuuaccaaagcacaugcucagcuguauccaaagguuaucuaucagccuugagaaccggaugguacacaucaguaauaacaauugaacuaucaaacauuaaagaaaacaaaugcaacggcaccgacgcaaaaguaaaacuaaucaaacaagaacuagacaaauauaaaaaugcaguaacagaauuacaauuauuaaugcaauccacaccagcugcaaacaaccgagcccgaagagaacuaccaagauucaugaacuacacacuaaacaacaccaaaaauaacaacgucacccuaucuaaaaaacguaaaagaagauucuuaggauuccucuuaggagucggauccgcaauagcaagcggcauagccguauguaaaguccuacacuuagaaggugaagugaauaaaauaaaaaacgcccuauuaagcacuaacaaagcaguagucucccuaucaaacggaguuucaguacucacauucaaaguacucgaccucaaaaacuacaucgacaaacaacuuuuaccaauucuaaacaaacaaucaugcuccauaucuaauaucgaaaccgucaucgaauuucaacaaaaaaacaauagacuacuagaaauaacuagagaauuuucaguaaacgccggcguuacgacaccagucucuacauacauguuaaccaauucagaacucuuaucauuaaucaacgacaugccaauaacaaacgaccaaaaaaaacuaauguccaauaacguacaaauagucagacaacaaucauacucaauuaugugcauaauaaaagaagaaguacuagcuuacguaguacaacucccccuauacggcguaauagacacuccauguuggaaauuacacacaucaccauuauguaccaccaauacaaaagaaggcucaaacauaugccuaacaagaacagauagaggaugguauugcgacaacgcaggcucaguuuccuuuuucccccaagcagaaaccugcaaaguacaaucaaaucguguuuuuugcgacaccaugaacucacucacauuaccaucagaaguaaaccuaugcaacauagacauauucaacccaaaauacgacugcaaaaucaugacaucaaaaacagacguauccucuucaguaauuacuagcuuaggagcaauagucucuuguuauggaaaaacaaaaugcacagccaguaacaaaaaccgcggaauaauaaaaaccuucucaaacgguugcgauuacgucucuaacaaaggagucgacacaguaucaguaggcaauacauuauacuacguuaacaaacaagaaggaaaaucuuuauacgucaaaggagaacccauuauaaacuuuuacgacccauuagucuucccuuccgacgaauuugacgccagcauuucacaaguaaacgaaaaaauaaaccaaucacucgcauuuauaagaaaaucugacgaauuacuccacaacguaaacguaggaaaauccacaacaaacauaaugauaacaaccauaaucaucgucauaauagucauacuucuccuauuaauugcaguaggcuuauuccuauacuguaaagcacgauaaggacuaguguccaccugucccuccugggcugcuggauugucucguuuuccugccaaauaaacaggaucagcgcuuuacagaucuaaaaaaaaaaaaaaaaaaaaaaaaaaaaaaaaaaaaaaaaaaaaaaaaaaaaaaaaaaaaaaaaugcaucccccccccccccccccccccccccccccccaaaggcucuuuucagagccaccagaauu

SEQ ID NO: 13009 - RNA, 1991 nt, Artificial Sequence
  mRNA product Design e-1 comprising derived and/or modified sequence from HRSV(Memphis-37)__AIY60640.1__F-del_DSCav1 (opt11)
gggagaauauaagcguuggcggagcgucgguuguagcacucugcgcgcccgcucuucugcugcuguuugucuacuuccuccugcuuccccgccgccgccgccgccaucaagcuuaccauggaacuaccaauccuaaaaacuaacgcaaucaccacaauccucgccgccgucacccuuugcuuugcguccucccaaaacauuacugaagaguucuaccaauccacgugcuccgccgucuccaaagguuaccuauccgcccuuaggaccggcugguacaccagcgucaucaccaucgaacuuuccaacaucaaagaaaacaaauguaacggcaccgacgcaaaagucaaacuuauuaaacaggaacucgacaaauauaagaaugccgucaccgaauuacaacuccucaugcaauccacccccgccgccaacaaccgagcaaggcgcgaacucccucgauucaugaauuacacccucaacaauaccaaaaacaacaacgucacccuauccaagaaacgcaaaagacgcuucuugggcuuccuccucggcgugggcuccgcaauagccuccgguauugccgugugcaaagucuuacaccucgaaggcgaggucaacaaaaucaaaaacgcccuccucuccaccaacaaagccgucgucagccuauccaacggcguuuccguccucaccuucaaaguacucgaccucaaaaacuacaucgacaaacaacuccuacccauacuaaacaaacaauccugcuccauuuccaacaucgaaaccguaaucgaguuccaacagaaaaacaaucgccuccuagaaaucacacgugaauuuucaguuaacgccggaguaacaacuccuguaucuaccuacaugcucaccaauuccgaacuccucagccucauaaacgacaugccaauaacaaacgaccaaaagaaacucaugucuaacaacguacaaaucgucagacaacaaaguuacucaaucauguguaucaucaaagaggaaguccuagcauacgugguccaacucccccucuacggaguaaucgacaccccaugcuggaaacuacacaccagcccccucuguaccacaaacacgaaagaagguuccaacaucugccugacccgaaccgaccgcggcugguacugcgauaacgcuggcuccgucucauucuucccccaagcagaaaccugcaaaguacaauccaaccgaguauucugcgacaccaugaacucacucacccuccccagcgaaguaaaccucugcaacaucgacauauucaacccaaaauacgacugcaaaauuaugaccucuaaaacagacguauccuccucuguaaucacaucccucggggccaucgucuccugcuacggcaaaaccaaaugcaccgccuccaacaaaaaccgcggaaucauaaaaaccuucuccaacggaugcgacuacgucucaaauaaaggcgucgacaccgucuccgucggcaacacgcuauacuacgucaacaaacaagaaggcaaaucacucuacgucaaaggugagcccaucaucaauuucuacgauccccucgucuucccaagcgacgaguucgacgccagcauaucccaaguaaacgagaaaaucaaccaaagccuggccuucauccgcaaauccgacgaacuacuacacaacguaaacguaggcaaguccacuaccaacauaaugaucaccacaaucaucauagucauaaucguuauacuacuccugcucaucgccguaggccucuuccucuauugcaaagcccgauagggacuaguguccaccugucccuccugggcugcuggauugucucguuuuccugccaaauaaacaggaucagcgcuuuacagaucuaaaaaaaaaaaaaaaaaaaaaaaaaaaaaaaaaaaaaaaaaaaaaaaaaaaaaaaaaaaaaaaaugcaucccccccccccccccccccccccccccccccaaaggcucuuuucagagccaccagaauu

SEQ ID NO: 13010 - RNA, 1973 nt, Artificial Sequence
  mRNA product Design e-2 comprising derived and/or modified sequence from HRSV(Memphis-37)__AIY60640.1__F-del_DSCav1 (opt1)
gggagacccgugacccggaaguuguacggcuacgcgacuuucccucccacaaacccucgcgcccuuccuuuccuacuugggcccggcagaaagcuuaccauggagcugcccauccucaagaccaacgccaucaccacgauccuggccgcggugacccugugcuucgccagcucccagaacaucaccgaggaguucuaccagagcacgugcuccgccgucagcaagggcuaccucuccgcccugcgcaccgggugguacaccagcgugaucaccaucgagcuguccaacaucaaggagaacaagugcaacggcaccgacgccaaggugaagcucaucaagcaggagcuggacaaguacaagaacgcggucacggagcugcagcuccugaugcagagcaccccggccgccaacaaccgggcccgccgggagcugccccgcuucaugaacuacacccucaacaacaccaagaacaacaacgugacgcuguccaagaagcggaagcgccgguuccugggguuccuccugggcguggggagcgcgaucgccuccggcaucgccgucugcaaggugcugcaccucgagggcgaggugaacaagaucaagaacgcccugcuguccaccaacaaggccgucgugagccucuccaacggggugagcguccugaccuucaaggugcuggaccucaagaacuacaucgacaagcagcugcugcccauccugaacaagcagagcugcuccaucagcaacaucgagaccgucaucgaguuccagcagaagaacaaccgccuccuggagaucacgcgggaguucagcgugaacgcgggcgugaccacccccgucuccaccuacaugcugacgaacagcgagcuccugucccugaucaacgacaugccgaucaccaacgaccagaagaagcucaugagcaacaacgugcagaucgugcgccagcaguccuacagcaucaugugcaucaucaaggaggagguccuggccuacguggugcagcugccccucuacggggucaucgacacccccugcuggaagcugcacaccagcccccugugcacgaccaacaccaaggagggcuccaacaucugccucacccggacggaccgcgggugguacugcgacaacgccggcagcguguccuucuucccgcaggccgagaccugcaagguccagagcaaccggguguucugcgacaccaugaacucccugacccugcccagcgaggugaaccucugcaacaucgacaucuucaaccccaaguacgacugcaagaucaugacguccaagaccgacgucagcuccagcgugaucaccucccugggcgccaucgugagcugcuacgggaagaccaagugcacggcgagcaacaagaaccgcggcaucaucaagaccuucuccaacgggugcgacuacgucagcaacaagggcguggacaccguguccgucggcaacacccuguacuacgugaacaagcaggagggcaagagccucuacgugaagggggagcccaucaucaacuucuacgacccgcuggucuuccccuccgacgaguucgacgccagcaucucccaggugaacgagaagaucaaccagagccuggccuucauccggaaguccgacgagcuccugcacaacgugaacgucggcaagagcaccacgaacaucaugaucaccaccaucaucaucgugaucaucgugauccugcugcuccugaucgccgucgggcuguuccucuacugcaaggcccgcugaggacuaguguccaccugucccuccugggcugcuggauugucucguuuuccugccaaauaaacaggaucagcgcuuuacagaucuaaaaaaaaaaaaaaaaaaaaaaaaaaaaaaaaaaaaaaaaaaaaaaaaaaaaaaaaaaaaaaaaugcaucccccccccccccccccccccccccccccccaaaggcucuuuucagagccaccagaauu

SEQ ID NO: 13011 - RNA, 1973 nt, Artificial Sequence
  mRNA product Design e-2 comprising derived and/or modified sequence from HRSV(Memphis-37)__AIY60640.1__F-del_DSCav1 (opt1)
gggagacccgugacccggaaguuguacggcuacgcgacuuucccucccacaaacccucgcgcccuuccuuuccuacuugggcccggcagaaagcuuaccauggagcugcccauccucaagaccaacgccaucaccacgauccuggccgcggugacccugugcuucgccagcucccagaacaucaccgaggaguucuaccagagcacgugcuccgccgucagcaagggcuaccucuccgcccugcgcaccgggugguacaccagcgugaucaccaucgagcuguccaacaucaaggagaacaagugcaacggcaccgacgccaaggugaagcucaucaagcaggagcuggacaaguacaagaacgcggucacggagcugcagcuccugaugcagagcaccccggccgccaacaaccgggcccgccgggagcugccccgcuucaugaacuacacccucaacaacaccaagaacaacaacgugacgcuguccaagaagcggaagcgccgguuccugggguuccuccugggcguggggagcgcgaucgccuccggcaucgccgucugcaaggugcugcaccucgagggcgaggugaacaagaucaagaacgcccugcugagcaccaacaaggccgucgugucccucagcaacgggguguccguccugaccuucaaggugcuggaccucaagaacuacaucgacaagcagcugcugcccauccucaacaagcagagcugcuccaucagcaacaucgagaccgugaucgaguuccagcagaagaacaaccgccugcuggagaucacgcgggaguucuccgucaacgcgggcgugaccacccccgugagcaccuacaugcucacgaacagcgagcugcugucccucaucaacgacaugccgaucaccaacgaccagaagaagcugaugagcaacaacguccagaucgugcgccagcaguccuacagcaucaugugcaucaucaaggaggaggugcuggccuacgucgugcagcucccccuguacggggugaucgacacccccugcuggaagcugcacaccagcccccucugcacgaccaacaccaaggagggcagcaacaucugccugacccggacggaccgcgggugguacugcgacaacgccggcuccgucagcuucuucccgcaggccgagaccugcaaggugcaguccaaccgggucuucugcgacaccaugaacagccugacccuccccuccgaggugaaccugugcaacaucgacaucuucaaccccaaguacgacugcaagaucaugacgagcaagaccgacguguccagcuccgucaucaccagccugggcgccaucguguccugcuacgggaagaccaagugcacggcgagcaacaagaaccgcggcaucaucaagaccuucuccaacgggugcgacuacgugagcaacaagggcgucgacaccgugagcgugggcaacacccucuacuacgucaacaagcaggaggggaagucccuguacgugaagggcgagcccaucaucaacuucuacgacccgcugguguuccccagcgacgaguucgacgccuccaucagccaggucaacgagaagaucaaccagucccucgccuucauccggaaguccgacgagcugcugcacaacgugaacguggggaaguccaccacgaacaucaugaucaccaccaucaucaucgucaucaucgugauccugcuccugcugaucgccgugggccucuuccuguacugcaaggcccgcugaggacuaguguccaccugucccuccugggcugcuggauugucucguuuuccugccaaauaaacaggaucagcgcuuuacagaucuaaaaaaaaaaaaaaaaaaaaaaaaaaaaaaaaaaaaaaaaaaaaaaaaaaaaaaaaaaaaaaaaugcaucccccccccccccccccccccccccccccccaaaggcucuuuucagagccaccagaauu

SEQ ID NO: 13012 - RNA, 1973 nt, Artificial Sequence
  mRNA product Design e-2 comprising derived and/or modified sequence from HRSV(Memphis-37)__AIY60640.1__F-del_DSCav1 (opt2)
gggagacccgugacccggaaguuguacggcuacgcgacuuucccucccacaaacccucgcgcccuuccuuuccuacuugggcccggcagaaagcuuaccauggagcuccccauccucaagaccaacgccaucaccaccauccucgccgccgucacccucugcuucgccuccucccagaacaucaccgaggaguucuaccaguccaccugcuccgccgucuccaagggcuaccucuccgcccuccgcaccggcugguacaccuccgucaucaccaucgagcucuccaacaucaaggagaacaagugcaacggcaccgacgccaaggucaagcucaucaagcaggagcucgacaaguacaagaacgccgucaccgagcuccagcuccucaugcaguccacccccgccgccaacaaccgcgcccgccgcgagcucccccgcuucaugaacuacacccucaacaacaccaagaacaacaacgucacccucuccaagaagcgcaagcgccgcuuccucggcuuccuccucggcgucggcuccgccaucgccuccggcaucgccgucugcaagguccuccaccucgagggcgaggucaacaagaucaagaacgcccuccucuccaccaacaaggccgucgucucccucuccaacggcgucuccguccucaccuucaagguccucgaccucaagaacuacaucgacaagcagcuccuccccauccucaacaagcaguccugcuccaucuccaacaucgagaccgucaucgaguuccagcagaagaacaaccgccuccucgagaucacccgcgaguucuccgucaacgccggcgucaccacccccgucuccaccuacaugcucaccaacuccgagcuccucucccucaucaacgacaugcccaucaccaacgaccagaagaagcucauguccaacaacguccagaucguccgccagcaguccuacuccaucaugugcaucaucaaggaggagguccucgccuacgucguccagcucccccucuacggcgucaucgacacccccugcuggaagcuccacaccuccccccucugcaccaccaacaccaaggagggcuccaacaucugccucacccgcaccgaccgcggcugguacugcgacaacgccggcuccgucuccuucuucccccaggccgagaccugcaagguccaguccaaccgcgucuucugcgacaccaugaacucccucacccuccccuccgaggucaaccucugcaacaucgacaucuucaaccccaaguacgacugcaagaucaugaccuccaagaccgacgucuccuccuccgucaucaccucccucggcgccaucgucuccugcuacggcaagaccaagugcaccgccuccaacaagaaccgcggcaucaucaagaccuucuccaacggcugcgacuacgucuccaacaagggcgucgacaccgucuccgucggcaacacccucuacuacgucaacaagcaggagggcaagucccucuacgucaagggcgagcccaucaucaacuucuacgacccccucgucuuccccuccgacgaguucgacgccuccaucucccaggucaacgagaagaucaaccagucccucgccuucauccgcaaguccgacgagcuccuccacaacgucaacgucggcaaguccaccaccaacaucaugaucaccaccaucaucaucgucaucaucgucauccuccuccuccucaucgccgucggccucuuccucuacugcaaggcccgcugaggacuaguguccaccugucccuccugggcugcuggauugucucguuuuccugccaaauaaacaggaucagcgcuuuacagaucuaaaaaaaaaaaaaaaaaaaaaaaaaaaaaaaaaaaaaaaaaaaaaaaaaaaaaaaaaaaaaaaaugcaucccccccccccccccccccccccccccccccaaaggcucuuuucagagccaccagaauu

SEQ ID NO: 13013 - RNA, 1973 nt, Artificial Sequence
  mRNA product Design e-2 comprising derived and/or modified sequence from HRSV(Memphis-37)__AIY60640.1__F-del_DSCav1 (opt3)
gggagacccgugacccggaaguuguacggcuacgcgacuuucccucccacaaacccucgcgcccuuccuuuccuacuugggcccggcagaaagcuuaccauggagcugcccauccucaagaccaacgccauuacaacuauacuugcugcagugacgcugugcuucgccagcucccagaauaucaccgaagaguuuuaccaaucuacauguucagcggucaguaaaggcuauuugagcgcuuuaagaacugggugguacaccuccguuauuacaaucgaacugucuaacauuaaggagaauaaaugcaacggaaccgacgccaaggugaaacuaaucaagcaggaacucgauaaguauaaaaaugcaguaacugagcugcagcuucugaugcagucgaccccugccgcuaacaauagggcacggcgcgaguugccacgauucaugaacuacacacucaauaacacgaagaauaacaaugugacucugagcaaaaagcguaaaagaagguuucuggguuuccucuuaggcgucgggucagccauagcuaguggaaucgccguguguaagguucugcaccuugaaggcgaggugaacaagauuaaaaaugcguugcuguccaccaacaaggcagucgugucucuaagcaacgguguauccguucucacauuuaaagugcuggaccuuaagaauuauaucgauaaacaacuguugccgauucucaacaagcagucaugcaguaucagcaauauagaaacugucauugaguuccagcagaaaaacaaucggcuguuagagaucacccgcgaauuuucugugaacgccggggugacaacccccgucuccacguacaugcugacuaauucagagcuccuuagccugauuaacgacaugccuaucacaaaugaucaaaagaaguugaugaguaacaauguucagaucgugagacagcagucuuauuccauuauguguauaaucaaagaagagguacuagcuuacgugguccaacugccacucuacggagugauugacacccccugcuggaagcugcauacuagcccucuuuguacaaccaacacgaaagaaggcucgaauaucugccugaccaggacagaucggggcugguauugugacaacgccgggucuguuuccuucuuuccacaggcagagacuugcaaggugcagucaaaucgcgucuucugugauaccaugaacaguuugacacuccccagcgaggugaaccugugcaauauagacauuuuuaacccuaaauacgauugcaagaucaugacuuccaagaccgacguaucuagcucaguuaucacaaguuuaggagcuauuguguccuguuaugguaaaaccaagugcacugccagcaauaaaaaccgaggcaucauuaagacguucucuaaugggugugauuacgucucaaacaaaggaguggacacagucagugugggcaauacccuguauuacguuaacaagcaagaagguaagagccuauaugugaaaggggagccaauaaucaauuuuuacgacccgcucguauuccccuccgaugaguucgacgcgucuauuucgcaggucaacgaaaagaucaaucagagccuggccuuuaucagaaaauccgaugaacuuuugcacaacgugaauguuggaaagucaacuaccaacauuaugauaacaaccaucauuaucgugauuaucgucauacugcuccugcuuaucgcagugggccuguucuuguacugcaaagcuaggugaggacuaguguccaccugucccuccugggcugcuggauugucucguuuuccugccaaauaaacaggaucagcgcuuuacagaucuaaaaaaaaaaaaaaaaaaaaaaaaaaaaaaaaaaaaaaaaaaaaaaaaaaaaaaaaaaaaaaaaugcaucccccccccccccccccccccccccccccccaaaggcucuuuucagagccaccagaauu

SEQ ID NO: 13014 - RNA, 1973 nt, Artificial Sequence
  mRNA product Design e-2 comprising derived and/or modified sequence from HRSV(Memphis-37)__AIY60640.1__F-del_DSCav1 (opt4)
gggagacccgugacccggaaguuguacggcuacgcgacuuucccucccacaaacccucgcgcccuuccuuuccuacuugggcccggcagaaagcuuaccauggagcugcccauccugaagaccaacgccaucaccaccauccuggccgccgugacccugugcuucgccagcagccagaacaucaccgaggaguucuaccagagcaccugcagcgccgugagcaagggcuaccugagcgcccugagaaccggcugguacaccagcgugaucaccaucgagcugagcaacaucaaggagaacaagugcaacggcaccgacgccaaggugaagcugaucaagcaggagcuggacaaguacaagaacgccgugaccgagcugcagcugcugaugcagagcacccccgccgccaacaacagagccagaagagagcugcccagauucaugaacuacacccugaacaacaccaagaacaacaacgugacccugagcaagaagagaaagagaagauuccugggcuuccugcugggcgugggcagcgccaucgccagcggcaucgccgugugcaaggugcugcaccuggagggcgaggugaacaagaucaagaacgcccugcugagcaccaacaaggccguggugagccugagcaacggcgugagcgugcugaccuucaaggugcuggaccugaagaacuacaucgacaagcagcugcugcccauccugaacaagcagagcugcagcaucagcaacaucgagaccgugaucgaguuccagcagaagaacaacagacugcuggagaucaccagagaguucagcgugaacgccggcgugaccacccccgugagcaccuacaugcugaccaacagcgagcugcugagccugaucaacgacaugcccaucaccaacgaccagaagaagcugaugagcaacaacgugcagaucgugagacagcagagcuacagcaucaugugcaucaucaaggaggaggugcuggccuacguggugcagcugccccuguacggcgugaucgacacccccugcuggaagcugcacaccagcccccugugcaccaccaacaccaaggagggcagcaacaucugccugaccagaaccgacagaggcugguacugcgacaacgccggcagcgugagcuucuucccccaggccgagaccugcaaggugcagagcaacagaguguucugcgacaccaugaacagccugacccugcccagcgaggugaaccugugcaacaucgacaucuucaaccccaaguacgacugcaagaucaugaccagcaagaccgacgugagcagcagcgugaucaccagccugggcgccaucgugagcugcuacggcaagaccaagugcaccgccagcaacaagaacagaggcaucaucaagaccuucagcaacggcugcgacuacgugagcaacaagggcguggacaccgugagcgugggcaacacccuguacuacgugaacaagcaggagggcaagagccuguacgugaagggcgagcccaucaucaacuucuacgacccccugguguuccccagcgacgaguucgacgccagcaucagccaggugaacgagaagaucaaccagagccuggccuucaucagaaagagcgacgagcugcugcacaacgugaacgugggcaagagcaccaccaacaucaugaucaccaccaucaucaucgugaucaucgugauccugcugcugcugaucgccgugggccuguuccuguacugcaaggccagaugaggacuaguguccaccugucccuccugggcugcuggauugucucguuuuccugccaaauaaacaggaucagcgcuuuacagaucuaaaaaaaaaaaaaaaaaaaaaaaaaaaaaaaaaaaaaaaaaaaaaaaaaaaaaaaaaaaaaaaaugcaucccccccccccccccccccccccccccccccaaaggcucuuuucagagccaccagaauu

SEQ ID NO: 13015 - RNA, 1973 nt, Artificial Sequence
  mRNA product Design e-2 comprising derived and/or modified sequence from HRSV(Memphis-37)__AIY60640.1__F-del_DSCav1 (opt5)
gggagacccgugacccggaaguuguacggcuacgcgacuuucccucccacaaacccucgcgcccuuccuuuccuacuugggcccggcagaaagcuuaccauggagcugcccauccucaagaccaacgccauuacaacgauccuggcugccgugacccuuugcuucgcgagcucccagaauauuacagaagaguuuuaccaaucuaccuguagcgcugucuccaaaggcuaucugucugcccucagaacagggugguacaccagcguuaucacaauugaacuguccaacaucaaggagaauaaaugcaacggaaccgacgccaaggugaaacuuaucaagcaggaacuggauaaguauaaaaaugcugugacggagcuccagcugcugaugcagucuaccccugccgcuaacaaucgggcccgcagagagcucccgcgguucaugaacuacacacugaauaacaccaagaauaacaaugucacacuuagcaaaaagcgcaaaagacgguuucugggcuuccuccugggggugggauccgcgauugccagcggcaucgcuguuuguaaggugcuucaccuggaaggggaggucaacaagauuaaaaaugcccuccugucuaccaacaaggcugugguuucccugagcaacggagugucuguccucacguuuaaagugcuggaccuuaagaauuauaucgauaaacaacugcuccccauucugaacaagcaguccugcagcaucucuaauauugaaacagugaucgaguuccagcagaaaaacaaucgccuucuggagaucaccagagaauuuuccgucaacgccggcguuacaaccccugugagcaccuacaugcucacaaauuccgagcugcugucucucauuaacgacaugcccaucacgaaugaucaaaagaagcugaugagcaacaaugugcagauuguccggcagcaguccuauagcaucauguguauuaucaaagaagaggugcuugcguacguugugcaacugccucucuacggcgucaucgacacccccugcuggaagcugcauacaucuccucuuuguaccacaaacaccaaagaaggguccaauauuugccugacgcgcacagauagaggaugguauugugacaacgccggcagcgugucuuucuuuccgcaggcugagaccugcaagguucagagcaaucggguguucugugauaccaugaacucccucacacugcccucugaggucaaccugugcaauaucgacauuuuuaacccuaaauacgauugcaagaucaugaccagcaagacagacguguccagcucugucauuacgucccucggggccaucgugagcuguuauggaaaaaccaagugcacagcuucuaauaaaaaccgcggcaucauuaagaccuucuccaaugggugugauuacguuagcaacaaaggaguggacacagucuccgugggcaauacccuguauuacguuaacaagcaagaaggcaagucucuuuaugugaaaggggagcccaucauuaauuuuuacgacccucuggucuuccccagcgaugaguucgacgccuccaucucucaggugaacgaaaagauuaaucagagccucgccuuuaucagaaaauccgaugaacugcugcacaacgugaauguuggaaagagcacgaccaacauuaugaucacaaccaucauuaucgucauuaucgugauucuucuccugcugaucgcugugggccucuuccuguacugcaaagcgcggugaggacuaguguccaccugucccuccugggcugcuggauugucucguuuuccugccaaauaaacaggaucagcgcuuuacagaucuaaaaaaaaaaaaaaaaaaaaaaaaaaaaaaaaaaaaaaaaaaaaaaaaaaaaaaaaaaaaaaaaugcaucccccccccccccccccccccccccccccccaaaggcucuuuucagagccaccagaauu

SEQ ID NO: 13016 - RNA, 1973 nt, Artificial Sequence
  mRNA product Design e-2 comprising derived and/or modified sequence from HRSV(Memphis-37)__AIY60640.1__F-del_DSCav1 (opt6)
gggagacccgugacccggaaguuguacggcuacgcgacuuucccucccacaaacccucgcgcccuuccuuuccuacuugggcccggcagaaagcuuaccauggaauuaccaauccuuaaaacaaacgcaauaacaaccauccucgcagcaguaacucucugcuucgcuucaucucaaaacaucacagaagaauuuuaccaaagcacaugcucagcuguauccaaagguuaucuaucagccuugagaaccggaugguacacaucaguaauaacaauugaacuaucaaacauuaaagaaaacaaaugcaacggcaccgacgcaaaaguaaaacuaaucaaacaagaacuagacaaauauaaaaaugcaguaacagaauuacaauuauuaaugcaauccacaccagcugcaaacaaccgagcccgaagagaacuaccaagauucaugaacuacacacuaaacaacaccaaaaauaacaacgucacccuaucuaaaaaacguaaaagaagauucuuaggauuccucuuaggagucggauccgcaauagcaagcggcauagccguauguaaaguccuacacuuagaaggugaagugaauaaaauaaaaaacgcccuauuaagcacuaacaaagcaguagucucccuaucaaacggaguuucaguacucacauucaaaguacucgaccucaaaaacuacaucgacaaacaacuuuuaccaauucuaaacaaacaaucaugcuccauaucuaauaucgaaaccgucaucgaauuucaacaaaaaaacaauagacuacuagaaauaacuagagaauuuucaguaaacgccggcguuacgacaccagucucuacauacauguuaaccaauucagaacucuuaucauuaaucaacgacaugccaauaacaaacgaccaaaaaaaacuaauguccaauaacguacaaauagucagacaacaaucauacucaauuaugugcauaauaaaagaagaaguacuagcuuacguaguacaacucccccuauacggcguaauagacacuccauguuggaaauuacacacaucaccauuauguaccaccaauacaaaagaaggcucaaacauaugccuaacaagaacagauagaggaugguauugcgacaacgcaggcucaguuuccuuuuucccccaagcagaaaccugcaaaguacaaucaaaucguguuuuuugcgacaccaugaacucacucacauuaccaucagaaguaaaccuaugcaacauagacauauucaacccaaaauacgacugcaaaaucaugacaucaaaaacagacguauccucuucaguaauuacuagcuuaggagcaauagucucuuguuauggaaaaacaaaaugcacagccaguaacaaaaaccgcggaauaauaaaaaccuucucaaacgguugcgauuacgucucuaacaaaggagucgacacaguaucaguaggcaauacauuauacuacguuaacaaacaagaaggaaaaucuuuauacgucaaaggagaacccauuauaaacuuuuacgacccauuagucuucccuuccgacgaauuugacgccagcauuucacaaguaaacgaaaaaauaaaccaaucacucgcauuuauaagaaaaucugacgaauuacuccacaacguaaacguaggaaaauccacaacaaacauaaugauaacaaccauaaucaucgucauaauagucauacuucuccuauuaauugcaguaggcuuauuccuauacuguaaagcacgauaaggacuaguguccaccugucccuccugggcugcuggauugucucguuuuccugccaaauaaacaggaucagcgcuuuacagaucuaaaaaaaaaaaaaaaaaaaaaaaaaaaaaaaaaaaaaaaaaaaaaaaaaaaaaaaaaaaaaaaaugcaucccccccccccccccccccccccccccccccaaaggcucuuuucagagccaccagaauu

SEQ ID NO: 13017 - RNA, 1973 nt, Artificial Sequence
  mRNA product Design e-2 comprising derived and/or modified sequence from HRSV(Memphis-37)__AIY60640.1__F-del_DSCav1 (opt11)
gggagacccgugacccggaaguuguacggcuacgcgacuuucccucccacaaacccucgcgcccuuccuuuccuacuugggcccggcagaaagcuuaccauggaacuaccaauccuaaaaacuaacgcaaucaccacaauccucgccgccgucacccuuugcuuugcguccucccaaaacauuacugaagaguucuaccaauccacgugcuccgccgucuccaaagguuaccuauccgcccuuaggaccggcugguacaccagcgucaucaccaucgaacuuuccaacaucaaagaaaacaaauguaacggcaccgacgcaaaagucaaacuuauuaaacaggaacucgacaaauauaagaaugccgucaccgaauuacaacuccucaugcaauccacccccgccgccaacaaccgagcaaggcgcgaacucccucgauucaugaauuacacccucaacaauaccaaaaacaacaacgucacccuauccaagaaacgcaaaagacgcuucuugggcuuccuccucggcgugggcuccgcaauagccuccgguauugccgugugcaaagucuuacaccucgaaggcgaggucaacaaaaucaaaaacgcccuccucuccaccaacaaagccgucgucagccuauccaacggcguuuccguccucaccuucaaaguacucgaccucaaaaacuacaucgacaaacaacuccuacccauacuaaacaaacaauccugcuccauuuccaacaucgaaaccguaaucgaguuccaacagaaaaacaaucgccuccuagaaaucacacgugaauuuucaguuaacgccggaguaacaacuccuguaucuaccuacaugcucaccaauuccgaacuccucagccucauaaacgacaugccaauaacaaacgaccaaaagaaacucaugucuaacaacguacaaaucgucagacaacaaaguuacucaaucauguguaucaucaaagaggaaguccuagcauacgugguccaacucccccucuacggaguaaucgacaccccaugcuggaaacuacacaccagcccccucuguaccacaaacacgaaagaagguuccaacaucugccugacccgaaccgaccgcggcugguacugcgauaacgcuggcuccgucucauucuucccccaagcagaaaccugcaaaguacaauccaaccgaguauucugcgacaccaugaacucacucacccuccccagcgaaguaaaccucugcaacaucgacauauucaacccaaaauacgacugcaaaauuaugaccucuaaaacagacguauccuccucuguaaucacaucccucggggccaucgucuccugcuacggcaaaaccaaaugcaccgccuccaacaaaaaccgcggaaucauaaaaaccuucuccaacggaugcgacuacgucucaaauaaaggcgucgacaccgucuccgucggcaacacgcuauacuacgucaacaaacaagaaggcaaaucacucuacgucaaaggugagcccaucaucaauuucuacgauccccucgucuucccaagcgacgaguucgacgccagcauaucccaaguaaacgagaaaaucaaccaaagccuggccuucauccgcaaauccgacgaacuacuacacaacguaaacguaggcaaguccacuaccaacauaaugaucaccacaaucaucauagucauaaucguuauacuacuccugcucaucgccguaggccucuuccucuauugcaaagcccgauagggacuaguguccaccugucccuccugggcugcuggauugucucguuuuccugccaaauaaacaggaucagcgcuuuacagaucuaaaaaaaaaaaaaaaaaaaaaaaaaaaaaaaaaaaaaaaaaaaaaaaaaaaaaaaaaaaaaaaaugcaucccccccccccccccccccccccccccccccaaaggcucuuuucagagccaccagaauu

SEQ ID NO: 13018 - RNA, 1943 nt, Artificial Sequence
  mRNA product Design e-3 comprising derived and/or modified sequence from HRSV(Memphis-37)__AIY60640.1__F-del_DSCav1 (opt1)
gggagacuuucccauucuguagcagaauuugguguugccuguggucuuggucccgcggagaagcuuaccauggagcugcccauccucaagaccaacgccaucaccacgauccuggccgcggugacccugugcuucgccagcucccagaacaucaccgaggaguucuaccagagcacgugcuccgccgucagcaagggcuaccucuccgcccugcgcaccgggugguacaccagcgugaucaccaucgagcuguccaacaucaaggagaacaagugcaacggcaccgacgccaaggugaagcucaucaagcaggagcuggacaaguacaagaacgcggucacggagcugcagcuccugaugcagagcaccccggccgccaacaaccgggcccgccgggagcugccccgcuucaugaacuacacccucaacaacaccaagaacaacaacgugacgcuguccaagaagcggaagcgccgguuccugggguuccuccugggcguggggagcgcgaucgccuccggcaucgccgucugcaaggugcugcaccucgagggcgaggugaacaagaucaagaacgcccugcuguccaccaacaaggccgucgugagccucuccaacggggugagcguccugaccuucaaggugcuggaccucaagaacuacaucgacaagcagcugcugcccauccugaacaagcagagcugcuccaucagcaacaucgagaccgucaucgaguuccagcagaagaacaaccgccuccuggagaucacgcgggaguucagcgugaacgcgggcgugaccacccccgucuccaccuacaugcugacgaacagcgagcuccugucccugaucaacgacaugccgaucaccaacgaccagaagaagcucaugagcaacaacgugcagaucgugcgccagcaguccuacagcaucaugugcaucaucaaggaggagguccuggccuacguggugcagcugccccucuacggggucaucgacacccccugcuggaagcugcacaccagcccccugugcacgaccaacaccaaggagggcuccaacaucugccucacccggacggaccgcgggugguacugcgacaacgccggcagcguguccuucuucccgcaggccgagaccugcaagguccagagcaaccggguguucugcgacaccaugaacucccugacccugcccagcgaggugaaccucugcaacaucgacaucuucaaccccaaguacgacugcaagaucaugacguccaagaccgacgucagcuccagcgugaucaccucccugggcgccaucgugagcugcuacgggaagaccaagugcacggcgagcaacaagaaccgcggcaucaucaagaccuucuccaacgggugcgacuacgucagcaacaagggcguggacaccguguccgucggcaacacccuguacuacgugaacaagcaggagggcaagagccucuacgugaagggggagcccaucaucaacuucuacgacccgcuggucuuccccuccgacgaguucgacgccagcaucucccaggugaacgagaagaucaaccagagccuggccuucauccggaaguccgacgagcuccugcacaacgugaacgucggcaagagcaccacgaacaucaugaucaccaccaucaucaucgugaucaucgugauccugcugcuccugaucgccgucgggcuguuccucuacugcaaggcccgcugaggacuaguguccaccugucccuccugggcugcuggauugucucguuuuccugccaaauaaacaggaucagcgcuuuacagaucuaaaaaaaaaaaaaaaaaaaaaaaaaaaaaaaaaaaaaaaaaaaaaaaaaaaaaaaaaaaaaaaaugcaucccccccccccccccccccccccccccccccaaaggcucuuuucagagccaccagaauu

SEQ ID NO: 13019 - RNA, 1943 nt, Artificial Sequence
  mRNA product Design e-3 comprising derived and/or modified sequence from HRSV(Memphis-37)__AIY60640.1__F-del_DSCav1 (opt1)
gggagacuuucccauucuguagcagaauuugguguugccuguggucuuggucccgcggagaagcuuaccauggagcugcccauccucaagaccaacgccaucaccacgauccuggccgcggugacccugugcuucgccagcucccagaacaucaccgaggaguucuaccagagcacgugcuccgccgucagcaagggcuaccucuccgcccugcgcaccgggugguacaccagcgugaucaccaucgagcuguccaacaucaaggagaacaagugcaacggcaccgacgccaaggugaagcucaucaagcaggagcuggacaaguacaagaacgcggucacggagcugcagcuccugaugcagagcaccccggccgccaacaaccgggcccgccgggagcugccccgcuucaugaacuacacccucaacaacaccaagaacaacaacgugacgcuguccaagaagcggaagcgccgguuccugggguuccuccugggcguggggagcgcgaucgccuccggcaucgccgucugcaaggugcugcaccucgagggcgaggugaacaagaucaagaacgcccugcugagcaccaacaaggccgucgugucccucagcaacgggguguccguccugaccuucaaggugcuggaccucaagaacuacaucgacaagcagcugcugcccauccucaacaagcagagcugcuccaucagcaacaucgagaccgugaucgaguuccagcagaagaacaaccgccugcuggagaucacgcgggaguucuccgucaacgcgggcgugaccacccccgugagcaccuacaugcucacgaacagcgagcugcugucccucaucaacgacaugccgaucaccaacgaccagaagaagcugaugagcaacaacguccagaucgugcgccagcaguccuacagcaucaugugcaucaucaaggaggaggugcuggccuacgucgugcagcucccccuguacggggugaucgacacccccugcuggaagcugcacaccagcccccucugcacgaccaacaccaaggagggcagcaacaucugccugacccggacggaccgcgggugguacugcgacaacgccggcuccgucagcuucuucccgcaggccgagaccugcaaggugcaguccaaccgggucuucugcgacaccaugaacagccugacccuccccuccgaggugaaccugugcaacaucgacaucuucaaccccaaguacgacugcaagaucaugacgagcaagaccgacguguccagcuccgucaucaccagccugggcgccaucguguccugcuacgggaagaccaagugcacggcgagcaacaagaaccgcggcaucaucaagaccuucuccaacgggugcgacuacgugagcaacaagggcgucgacaccgugagcgugggcaacacccucuacuacgucaacaagcaggaggggaagucccuguacgugaagggcgagcccaucaucaacuucuacgacccgcugguguuccccagcgacgaguucgacgccuccaucagccaggucaacgagaagaucaaccagucccucgccuucauccggaaguccgacgagcugcugcacaacgugaacguggggaaguccaccacgaacaucaugaucaccaccaucaucaucgucaucaucgugauccugcuccugcugaucgccgugggccucuuccuguacugcaaggcccgcugaggacuaguguccaccugucccuccugggcugcuggauugucucguuuuccugccaaauaaacaggaucagcgcuuuacagaucuaaaaaaaaaaaaaaaaaaaaaaaaaaaaaaaaaaaaaaaaaaaaaaaaaaaaaaaaaaaaaaaaugcaucccccccccccccccccccccccccccccccaaaggcucuuuucagagccaccagaauu

SEQ ID NO: 13020 - RNA, 1943 nt, Artificial Sequence
  mRNA product Design e-3 comprising derived and/or modified sequence from HRSV(Memphis-37)__AIY60640.1__F-del_DSCav1 (opt2)
gggagacuuucccauucuguagcagaauuugguguugccuguggucuuggucccgcggagaagcuuaccauggagcuccccauccucaagaccaacgccaucaccaccauccucgccgccgucacccucugcuucgccuccucccagaacaucaccgaggaguucuaccaguccaccugcuccgccgucuccaagggcuaccucuccgcccuccgcaccggcugguacaccuccgucaucaccaucgagcucuccaacaucaaggagaacaagugcaacggcaccgacgccaaggucaagcucaucaagcaggagcucgacaaguacaagaacgccgucaccgagcuccagcuccucaugcaguccacccccgccgccaacaaccgcgcccgccgcgagcucccccgcuucaugaacuacacccucaacaacaccaagaacaacaacgucacccucuccaagaagcgcaagcgccgcuuccucggcuuccuccucggcgucggcuccgccaucgccuccggcaucgccgucugcaagguccuccaccucgagggcgaggucaacaagaucaagaacgcccuccucuccaccaacaaggccgucgucucccucuccaacggcgucuccguccucaccuucaagguccucgaccucaagaacuacaucgacaagcagcuccuccccauccucaacaagcaguccugcuccaucuccaacaucgagaccgucaucgaguuccagcagaagaacaaccgccuccucgagaucacccgcgaguucuccgucaacgccggcgucaccacccccgucuccaccuacaugcucaccaacuccgagcuccucucccucaucaacgacaugcccaucaccaacgaccagaagaagcucauguccaacaacguccagaucguccgccagcaguccuacuccaucaugugcaucaucaaggaggagguccucgccuacgucguccagcucccccucuacggcgucaucgacacccccugcuggaagcuccacaccuccccccucugcaccaccaacaccaaggagggcuccaacaucugccucacccgcaccgaccgcggcugguacugcgacaacgccggcuccgucuccuucuucccccaggccgagaccugcaagguccaguccaaccgcgucuucugcgacaccaugaacucccucacccuccccuccgaggucaaccucugcaacaucgacaucuucaaccccaaguacgacugcaagaucaugaccuccaagaccgacgucuccuccuccgucaucaccucccucggcgccaucgucuccugcuacggcaagaccaagugcaccgccuccaacaagaaccgcggcaucaucaagaccuucuccaacggcugcgacuacgucuccaacaagggcgucgacaccgucuccgucggcaacacccucuacuacgucaacaagcaggagggcaagucccucuacgucaagggcgagcccaucaucaacuucuacgacccccucgucuuccccuccgacgaguucgacgccuccaucucccaggucaacgagaagaucaaccagucccucgccuucauccgcaaguccgacgagcuccuccacaacgucaacgucggcaaguccaccaccaacaucaugaucaccaccaucaucaucgucaucaucgucauccuccuccuccucaucgccgucggccucuuccucuacugcaaggcccgcugaggacuaguguccaccugucccuccugggcugcuggauugucucguuuuccugccaaauaaacaggaucagcgcuuuacagaucuaaaaaaaaaaaaaaaaaaaaaaaaaaaaaaaaaaaaaaaaaaaaaaaaaaaaaaaaaaaaaaaaugcaucccccccccccccccccccccccccccccccaaaggcucuuuucagagccaccagaauu

SEQ ID NO: 13021 - RNA, 1943 nt, Artificial Sequence
  mRNA product Design e-3 comprising derived and/or modified sequence from HRSV(Memphis-37)__AIY60640.1__F-del_DSCav1 (opt3)
gggagacuuucccauucuguagcagaauuugguguugccuguggucuuggucccgcggagaagcuuaccauggagcugcccauccucaagaccaacgccauuacaacuauacuugcugcagugacgcugugcuucgccagcucccagaauaucaccgaagaguuuuaccaaucuacauguucagcggucaguaaaggcuauuugagcgcuuuaagaacugggugguacaccuccguuauuacaaucgaacugucuaacauuaaggagaauaaaugcaacggaaccgacgccaaggugaaacuaaucaagcaggaacucgauaaguauaaaaaugcaguaacugagcugcagcuucugaugcagucgaccccugccgcuaacaauagggcacggcgcgaguugccacgauucaugaacuacacacucaauaacacgaagaauaacaaugugacucugagcaaaaagcguaaaagaagguuucuggguuuccucuuaggcgucgggucagccauagcuaguggaaucgccguguguaagguucugcaccuugaaggcgaggugaacaagauuaaaaaugcguugcuguccaccaacaaggcagucgugucucuaagcaacgguguauccguucucacauuuaaagugcuggaccuuaagaauuauaucgauaaacaacuguugccgauucucaacaagcagucaugcaguaucagcaauauagaaacugucauugaguuccagcagaaaaacaaucggcuguuagagaucacccgcgaauuuucugugaacgccggggugacaacccccgucuccacguacaugcugacuaauucagagcuccuuagccugauuaacgacaugccuaucacaaaugaucaaaagaaguugaugaguaacaauguucagaucgugagacagcagucuuauuccauuauguguauaaucaaagaagagguacuagcuuacgugguccaacugccacucuacggagugauugacacccccugcuggaagcugcauacuagcccucuuuguacaaccaacacgaaagaaggcucgaauaucugccugaccaggacagaucggggcugguauugugacaacgccgggucuguuuccuucuuuccacaggcagagacuugcaaggugcagucaaaucgcgucuucugugauaccaugaacaguuugacacuccccagcgaggugaaccugugcaauauagacauuuuuaacccuaaauacgauugcaagaucaugacuuccaagaccgacguaucuagcucaguuaucacaaguuuaggagcuauuguguccuguuaugguaaaaccaagugcacugccagcaauaaaaaccgaggcaucauuaagacguucucuaaugggugugauuacgucucaaacaaaggaguggacacagucagugugggcaauacccuguauuacguuaacaagcaagaagguaagagccuauaugugaaaggggagccaauaaucaauuuuuacgacccgcucguauuccccuccgaugaguucgacgcgucuauuucgcaggucaacgaaaagaucaaucagagccuggccuuuaucagaaaauccgaugaacuuuugcacaacgugaauguuggaaagucaacuaccaacauuaugauaacaaccaucauuaucgugauuaucgucauacugcuccugcuuaucgcagugggccuguucuuguacugcaaagcuaggugaggacuaguguccaccugucccuccugggcugcuggauugucucguuuuccugccaaauaaacaggaucagcgcuuuacagaucuaaaaaaaaaaaaaaaaaaaaaaaaaaaaaaaaaaaaaaaaaaaaaaaaaaaaaaaaaaaaaaaaugcaucccccccccccccccccccccccccccccccaaaggcucuuuucagagccaccagaauu

SEQ ID NO: 13022 - RNA, 1943 nt, Artificial Sequence
  mRNA product Design e-3 comprising derived and/or modified sequence from HRSV(Memphis-37)__AIY60640.1__F-del_DSCav1 (opt4)
gggagacuuucccauucuguagcagaauuugguguugccuguggucuuggucccgcggagaagcuuaccauggagcugcccauccugaagaccaacgccaucaccaccauccuggccgccgugacccugugcuucgccagcagccagaacaucaccgaggaguucuaccagagcaccugcagcgccgugagcaagggcuaccugagcgcccugagaaccggcugguacaccagcgugaucaccaucgagcugagcaacaucaaggagaacaagugcaacggcaccgacgccaaggugaagcugaucaagcaggagcuggacaaguacaagaacgccgugaccgagcugcagcugcugaugcagagcacccccgccgccaacaacagagccagaagagagcugcccagauucaugaacuacacccugaacaacaccaagaacaacaacgugacccugagcaagaagagaaagagaagauuccugggcuuccugcugggcgugggcagcgccaucgccagcggcaucgccgugugcaaggugcugcaccuggagggcgaggugaacaagaucaagaacgcccugcugagcaccaacaaggccguggugagccugagcaacggcgugagcgugcugaccuucaaggugcuggaccugaagaacuacaucgacaagcagcugcugcccauccugaacaagcagagcugcagcaucagcaacaucgagaccgugaucgaguuccagcagaagaacaacagacugcuggagaucaccagagaguucagcgugaacgccggcgugaccacccccgugagcaccuacaugcugaccaacagcgagcugcugagccugaucaacgacaugcccaucaccaacgaccagaagaagcugaugagcaacaacgugcagaucgugagacagcagagcuacagcaucaugugcaucaucaaggaggaggugcuggccuacguggugcagcugccccuguacggcgugaucgacacccccugcuggaagcugcacaccagcccccugugcaccaccaacaccaaggagggcagcaacaucugccugaccagaaccgacagaggcugguacugcgacaacgccggcagcgugagcuucuucccccaggccgagaccugcaaggugcagagcaacagaguguucugcgacaccaugaacagccugacccugcccagcgaggugaaccugugcaacaucgacaucuucaaccccaaguacgacugcaagaucaugaccagcaagaccgacgugagcagcagcgugaucaccagccugggcgccaucgugagcugcuacggcaagaccaagugcaccgccagcaacaagaacagaggcaucaucaagaccuucagcaacggcugcgacuacgugagcaacaagggcguggacaccgugagcgugggcaacacccuguacuacgugaacaagcaggagggcaagagccuguacgugaagggcgagcccaucaucaacuucuacgacccccugguguuccccagcgacgaguucgacgccagcaucagccaggugaacgagaagaucaaccagagccuggccuucaucagaaagagcgacgagcugcugcacaacgugaacgugggcaagagcaccaccaacaucaugaucaccaccaucaucaucgugaucaucgugauccugcugcugcugaucgccgugggccuguuccuguacugcaaggccagaugaggacuaguguccaccugucccuccugggcugcuggauugucucguuuuccugccaaauaaacaggaucagcgcuuuacagaucuaaaaaaaaaaaaaaaaaaaaaaaaaaaaaaaaaaaaaaaaaaaaaaaaaaaaaaaaaaaaaaaaugcaucccccccccccccccccccccccccccccccaaaggcucuuuucagagccaccagaauu

SEQ ID NO: 13023 - RNA, 1943 nt, Artificial Sequence
  mRNA product Design e-3 comprising derived and/or modified sequence from HRSV(Memphis-37)__AIY60640.1__F-del_DSCav1 (opt5)
gggagacuuucccauucuguagcagaauuugguguugccuguggucuuggucccgcggagaagcuuaccauggagcugcccauccucaagaccaacgccauuacaacgauccuggcugccgugacccuuugcuucgcgagcucccagaauauuacagaagaguuuuaccaaucuaccuguagcgcugucuccaaaggcuaucugucugcccucagaacagggugguacaccagcguuaucacaauugaacuguccaacaucaaggagaauaaaugcaacggaaccgacgccaaggugaaacuuaucaagcaggaacuggauaaguauaaaaaugcugugacggagcuccagcugcugaugcagucuaccccugccgcuaacaaucgggcccgcagagagcucccgcgguucaugaacuacacacugaauaacaccaagaauaacaaugucacacuuagcaaaaagcgcaaaagacgguuucugggcuuccuccugggggugggauccgcgauugccagcggcaucgcuguuuguaaggugcuucaccuggaaggggaggucaacaagauuaaaaaugcccuccugucuaccaacaaggcugugguuucccugagcaacggagugucuguccucacguuuaaagugcuggaccuuaagaauuauaucgauaaacaacugcuccccauucugaacaagcaguccugcagcaucucuaauauugaaacagugaucgaguuccagcagaaaaacaaucgccuucuggagaucaccagagaauuuuccgucaacgccggcguuacaaccccugugagcaccuacaugcucacaaauuccgagcugcugucucucauuaacgacaugcccaucacgaaugaucaaaagaagcugaugagcaacaaugugcagauuguccggcagcaguccuauagcaucauguguauuaucaaagaagaggugcuugcguacguugugcaacugccucucuacggcgucaucgacacccccugcuggaagcugcauacaucuccucuuuguaccacaaacaccaaagaaggguccaauauuugccugacgcgcacagauagaggaugguauugugacaacgccggcagcgugucuuucuuuccgcaggcugagaccugcaagguucagagcaaucggguguucugugauaccaugaacucccucacacugcccucugaggucaaccugugcaauaucgacauuuuuaacccuaaauacgauugcaagaucaugaccagcaagacagacguguccagcucugucauuacgucccucggggccaucgugagcuguuauggaaaaaccaagugcacagcuucuaauaaaaaccgcggcaucauuaagaccuucuccaaugggugugauuacguuagcaacaaaggaguggacacagucuccgugggcaauacccuguauuacguuaacaagcaagaaggcaagucucuuuaugugaaaggggagcccaucauuaauuuuuacgacccucuggucuuccccagcgaugaguucgacgccuccaucucucaggugaacgaaaagauuaaucagagccucgccuuuaucagaaaauccgaugaacugcugcacaacgugaauguuggaaagagcacgaccaacauuaugaucacaaccaucauuaucgucauuaucgugauucuucuccugcugaucgcugugggccucuuccuguacugcaaagcgcggugaggacuaguguccaccugucccuccugggcugcuggauugucucguuuuccugccaaauaaacaggaucagcgcuuuacagaucuaaaaaaaaaaaaaaaaaaaaaaaaaaaaaaaaaaaaaaaaaaaaaaaaaaaaaaaaaaaaaaaaugcaucccccccccccccccccccccccccccccccaaaggcucuuuucagagccaccagaauu

SEQ ID NO: 13024 - RNA, 1943 nt, Artificial Sequence
  mRNA product Design e-3 comprising derived and/or modified sequence from HRSV(Memphis-37)__AIY60640.1__F-del_DSCav1 (opt6)
gggagacuuucccauucuguagcagaauuugguguugccuguggucuuggucccgcggagaagcuuaccauggaauuaccaauccuuaaaacaaacgcaauaacaaccauccucgcagcaguaacucucugcuucgcuucaucucaaaacaucacagaagaauuuuaccaaagcacaugcucagcuguauccaaagguuaucuaucagccuugagaaccggaugguacacaucaguaauaacaauugaacuaucaaacauuaaagaaaacaaaugcaacggcaccgacgcaaaaguaaaacuaaucaaacaagaacuagacaaauauaaaaaugcaguaacagaauuacaauuauuaaugcaauccacaccagcugcaaacaaccgagcccgaagagaacuaccaagauucaugaacuacacacuaaacaacaccaaaaauaacaacgucacccuaucuaaaaaacguaaaagaagauucuuaggauuccucuuaggagucggauccgcaauagcaagcggcauagccguauguaaaguccuacacuuagaaggugaagugaauaaaauaaaaaacgcccuauuaagcacuaacaaagcaguagucucccuaucaaacggaguuucaguacucacauucaaaguacucgaccucaaaaacuacaucgacaaacaacuuuuaccaauucuaaacaaacaaucaugcuccauaucuaauaucgaaaccgucaucgaauuucaacaaaaaaacaauagacuacuagaaauaacuagagaauuuucaguaaacgccggcguuacgacaccagucucuacauacauguuaaccaauucagaacucuuaucauuaaucaacgacaugccaauaacaaacgaccaaaaaaaacuaauguccaauaacguacaaauagucagacaacaaucauacucaauuaugugcauaauaaaagaagaaguacuagcuuacguaguacaacucccccuauacggcguaauagacacuccauguuggaaauuacacacaucaccauuauguaccaccaauacaaaagaaggcucaaacauaugccuaacaagaacagauagaggaugguauugcgacaacgcaggcucaguuuccuuuuucccccaagcagaaaccugcaaaguacaaucaaaucguguuuuuugcgacaccaugaacucacucacauuaccaucagaaguaaaccuaugcaacauagacauauucaacccaaaauacgacugcaaaaucaugacaucaaaaacagacguauccucuucaguaauuacuagcuuaggagcaauagucucuuguuauggaaaaacaaaaugcacagccaguaacaaaaaccgcggaauaauaaaaaccuucucaaacgguugcgauuacgucucuaacaaaggagucgacacaguaucaguaggcaauacauuauacuacguuaacaaacaagaaggaaaaucuuuauacgucaaaggagaacccauuauaaacuuuuacgacccauuagucuucccuuccgacgaauuugacgccagcauuucacaaguaaacgaaaaaauaaaccaaucacucgcauuuauaagaaaaucugacgaauuacuccacaacguaaacguaggaaaauccacaacaaacauaaugauaacaaccauaaucaucgucauaauagucauacuucuccuauuaauugcaguaggcuuauuccuauacuguaaagcacgauaaggacuaguguccaccugucccuccugggcugcuggauugucucguuuuccugccaaauaaacaggaucagcgcuuuacagaucuaaaaaaaaaaaaaaaaaaaaaaaaaaaaaaaaaaaaaaaaaaaaaaaaaaaaaaaaaaaaaaaaugcaucccccccccccccccccccccccccccccccaaaggcucuuuucagagccaccagaauu

SEQ ID NO: 13025 - RNA, 1943 nt, Artificial Sequence
  mRNA product Design e-3 comprising derived and/or modified sequence from HRSV(Memphis-37)__AIY60640.1__F-del_DSCav1 (opt11)
gggagacuuucccauucuguagcagaauuugguguugccuguggucuuggucccgcggagaagcuuaccauggaacuaccaauccuaaaaacuaacgcaaucaccacaauccucgccgccgucacccuuugcuuugcguccucccaaaacauuacugaagaguucuaccaauccacgugcuccgccgucuccaaagguuaccuauccgcccuuaggaccggcugguacaccagcgucaucaccaucgaacuuuccaacaucaaagaaaacaaauguaacggcaccgacgcaaaagucaaacuuauuaaacaggaacucgacaaauauaagaaugccgucaccgaauuacaacuccucaugcaauccacccccgccgccaacaaccgagcaaggcgcgaacucccucgauucaugaauuacacccucaacaauaccaaaaacaacaacgucacccuauccaagaaacgcaaaagacgcuucuugggcuuccuccucggcgugggcuccgcaauagccuccgguauugccgugugcaaagucuuacaccucgaaggcgaggucaacaaaaucaaaaacgcccuccucuccaccaacaaagccgucgucagccuauccaacggcguuuccguccucaccuucaaaguacucgaccucaaaaacuacaucgacaaacaacuccuacccauacuaaacaaacaauccugcuccauuuccaacaucgaaaccguaaucgaguuccaacagaaaaacaaucgccuccuagaaaucacacgugaauuuucaguuaacgccggaguaacaacuccuguaucuaccuacaugcucaccaauuccgaacuccucagccucauaaacgacaugccaauaacaaacgaccaaaagaaacucaugucuaacaacguacaaaucgucagacaacaaaguuacucaaucauguguaucaucaaagaggaaguccuagcauacgugguccaacucccccucuacggaguaaucgacaccccaugcuggaaacuacacaccagcccccucuguaccacaaacacgaaagaagguuccaacaucugccugacccgaaccgaccgcggcugguacugcgauaacgcuggcuccgucucauucuucccccaagcagaaaccugcaaaguacaauccaaccgaguauucugcgacaccaugaacucacucacccuccccagcgaaguaaaccucugcaacaucgacauauucaacccaaaauacgacugcaaaauuaugaccucuaaaacagacguauccuccucuguaaucacaucccucggggccaucgucuccugcuacggcaaaaccaaaugcaccgccuccaacaaaaaccgcggaaucauaaaaaccuucuccaacggaugcgacuacgucucaaauaaaggcgucgacaccgucuccgucggcaacacgcuauacuacgucaacaaacaagaaggcaaaucacucuacgucaaaggugagcccaucaucaauuucuacgauccccucgucuucccaagcgacgaguucgacgccagcauaucccaaguaaacgagaaaaucaaccaaagccuggccuucauccgcaaauccgacgaacuacuacacaacguaaacguaggcaaguccacuaccaacauaaugaucaccacaaucaucauagucauaaucguuauacuacuccugcucaucgccguaggccucuuccucuauugcaaagcccgauagggacuaguguccaccugucccuccugggcugcuggauugucucguuuuccugccaaauaaacaggaucagcgcuuuacagaucuaaaaaaaaaaaaaaaaaaaaaaaaaaaaaaaaaaaaaaaaaaaaaaaaaaaaaaaaaaaaaaaaugcaucccccccccccccccccccccccccccccccaaaggcucuuuucagagccaccagaauu

SEQ ID NO: 13026 - RNA, 1997 nt, Artificial Sequence
  mRNA product Design e-4 comprising derived and/or modified sequence from HRSV(Memphis-37)__AIY60640.1__F-del_DSCav1 (opt1)
gggagacuccugucgggcggaaguaggaggaguagaguuuaaaaacaguacucuuuuuccgguucgggacguaguugaagcaacgacaagccggauaaccgcucuugagacaggaagcuuaccauggagcugcccauccucaagaccaacgccaucaccacgauccuggccgcggugacccugugcuucgccagcucccagaacaucaccgaggaguucuaccagagcacgugcuccgccgucagcaagggcuaccucuccgcccugcgcaccgggugguacaccagcgugaucaccaucgagcuguccaacaucaaggagaacaagugcaacggcaccgacgccaaggugaagcucaucaagcaggagcuggacaaguacaagaacgcggucacggagcugcagcuccugaugcagagcaccccggccgccaacaaccgggcccgccgggagcugccccgcuucaugaacuacacccucaacaacaccaagaacaacaacgugacgcuguccaagaagcggaagcgccgguuccugggguuccuccugggcguggggagcgcgaucgccuccggcaucgccgucugcaaggugcugcaccucgagggcgaggugaacaagaucaagaacgcccugcuguccaccaacaaggccgucgugagccucuccaacggggugagcguccugaccuucaaggugcuggaccucaagaacuacaucgacaagcagcugcugcccauccugaacaagcagagcugcuccaucagcaacaucgagaccgucaucgaguuccagcagaagaacaaccgccuccuggagaucacgcgggaguucagcgugaacgcgggcgugaccacccccgucuccaccuacaugcugacgaacagcgagcuccugucccugaucaacgacaugccgaucaccaacgaccagaagaagcucaugagcaacaacgugcagaucgugcgccagcaguccuacagcaucaugugcaucaucaaggaggagguccuggccuacguggugcagcugccccucuacggggucaucgacacccccugcuggaagcugcacaccagcccccugugcacgaccaacaccaaggagggcuccaacaucugccucacccggacggaccgcgggugguacugcgacaacgccggcagcguguccuucuucccgcaggccgagaccugcaagguccagagcaaccggguguucugcgacaccaugaacucccugacccugcccagcgaggugaaccucugcaacaucgacaucuucaaccccaaguacgacugcaagaucaugacguccaagaccgacgucagcuccagcgugaucaccucccugggcgccaucgugagcugcuacgggaagaccaagugcacggcgagcaacaagaaccgcggcaucaucaagaccuucuccaacgggugcgacuacgucagcaacaagggcguggacaccguguccgucggcaacacccuguacuacgugaacaagcaggagggcaagagccucuacgugaagggggagcccaucaucaacuucuacgacccgcuggucuuccccuccgacgaguucgacgccagcaucucccaggugaacgagaagaucaaccagagccuggccuucauccggaaguccgacgagcuccugcacaacgugaacgucggcaagagcaccacgaacaucaugaucaccaccaucaucaucgugaucaucgugauccugcugcuccugaucgccgucgggcuguuccucuacugcaaggcccgcugaggacuaguguccaccugucccuccugggcugcuggauugucucguuuuccugccaaauaaacaggaucagcgcuuuacagaucuaaaaaaaaaaaaaaaaaaaaaaaaaaaaaaaaaaaaaaaaaaaaaaaaaaaaaaaaaaaaaaaaugcaucccccccccccccccccccccccccccccccaaaggcucuuuucagagccaccagaauu

SEQ ID NO: 13027 - RNA, 1997 nt, Artificial Sequence
  mRNA product Design e-4 comprising derived and/or modified sequence from HRSV(Memphis-37)__AIY60640.1__F-del_DSCav1 (opt1)
gggagacuccugucgggcggaaguaggaggaguagaguuuaaaaacaguacucuuuuuccgguucgggacguaguugaagcaacgacaagccggauaaccgcucuugagacaggaagcuuaccauggagcugcccauccucaagaccaacgccaucaccacgauccuggccgcggugacccugugcuucgccagcucccagaacaucaccgaggaguucuaccagagcacgugcuccgccgucagcaagggcuaccucuccgcccugcgcaccgggugguacaccagcgugaucaccaucgagcuguccaacaucaaggagaacaagugcaacggcaccgacgccaaggugaagcucaucaagcaggagcuggacaaguacaagaacgcggucacggagcugcagcuccugaugcagagcaccccggccgccaacaaccgggcccgccgggagcugccccgcuucaugaacuacacccucaacaacaccaagaacaacaacgugacgcuguccaagaagcggaagcgccgguuccugggguuccuccugggcguggggagcgcgaucgccuccggcaucgccgucugcaaggugcugcaccucgagggcgaggugaacaagaucaagaacgcccugcugagcaccaacaaggccgucgugucccucagcaacgggguguccguccugaccuucaaggugcuggaccucaagaacuacaucgacaagcagcugcugcccauccucaacaagcagagcugcuccaucagcaacaucgagaccgugaucgaguuccagcagaagaacaaccgccugcuggagaucacgcgggaguucuccgucaacgcgggcgugaccacccccgugagcaccuacaugcucacgaacagcgagcugcugucccucaucaacgacaugccgaucaccaacgaccagaagaagcugaugagcaacaacguccagaucgugcgccagcaguccuacagcaucaugugcaucaucaaggaggaggugcuggccuacgucgugcagcucccccuguacggggugaucgacacccccugcuggaagcugcacaccagcccccucugcacgaccaacaccaaggagggcagcaacaucugccugacccggacggaccgcgggugguacugcgacaacgccggcuccgucagcuucuucccgcaggccgagaccugcaaggugcaguccaaccgggucuucugcgacaccaugaacagccugacccuccccuccgaggugaaccugugcaacaucgacaucuucaaccccaaguacgacugcaagaucaugacgagcaagaccgacguguccagcuccgucaucaccagccugggcgccaucguguccugcuacgggaagaccaagugcacggcgagcaacaagaaccgcggcaucaucaagaccuucuccaacgggugcgacuacgugagcaacaagggcgucgacaccgugagcgugggcaacacccucuacuacgucaacaagcaggaggggaagucccuguacgugaagggcgagcccaucaucaacuucuacgacccgcugguguuccccagcgacgaguucgacgccuccaucagccaggucaacgagaagaucaaccagucccucgccuucauccggaaguccgacgagcugcugcacaacgugaacguggggaaguccaccacgaacaucaugaucaccaccaucaucaucgucaucaucgugauccugcuccugcugaucgccgugggccucuuccuguacugcaaggcccgcugaggacuaguguccaccugucccuccugggcugcuggauugucucguuuuccugccaaauaaacaggaucagcgcuuuacagaucuaaaaaaaaaaaaaaaaaaaaaaaaaaaaaaaaaaaaaaaaaaaaaaaaaaaaaaaaaaaaaaaaugcaucccccccccccccccccccccccccccccccaaaggcucuuuucagagccaccagaauu

SEQ ID NO: 13028 - RNA, 1997 nt, Artificial Sequence
  mRNA product Design e-4 comprising derived and/or modified sequence from HRSV(Memphis-37)__AIY60640.1__F-del_DSCav1 (opt2)
gggagacuccugucgggcggaaguaggaggaguagaguuuaaaaacaguacucuuuuuccgguucgggacguaguugaagcaacgacaagccggauaaccgcucuugagacaggaagcuuaccauggagcuccccauccucaagaccaacgccaucaccaccauccucgccgccgucacccucugcuucgccuccucccagaacaucaccgaggaguucuaccaguccaccugcuccgccgucuccaagggcuaccucuccgcccuccgcaccggcugguacaccuccgucaucaccaucgagcucuccaacaucaaggagaacaagugcaacggcaccgacgccaaggucaagcucaucaagcaggagcucgacaaguacaagaacgccgucaccgagcuccagcuccucaugcaguccacccccgccgccaacaaccgcgcccgccgcgagcucccccgcuucaugaacuacacccucaacaacaccaagaacaacaacgucacccucuccaagaagcgcaagcgccgcuuccucggcuuccuccucggcgucggcuccgccaucgccuccggcaucgccgucugcaagguccuccaccucgagggcgaggucaacaagaucaagaacgcccuccucuccaccaacaaggccgucgucucccucuccaacggcgucuccguccucaccuucaagguccucgaccucaagaacuacaucgacaagcagcuccuccccauccucaacaagcaguccugcuccaucuccaacaucgagaccgucaucgaguuccagcagaagaacaaccgccuccucgagaucacccgcgaguucuccgucaacgccggcgucaccacccccgucuccaccuacaugcucaccaacuccgagcuccucucccucaucaacgacaugcccaucaccaacgaccagaagaagcucauguccaacaacguccagaucguccgccagcaguccuacuccaucaugugcaucaucaaggaggagguccucgccuacgucguccagcucccccucuacggcgucaucgacacccccugcuggaagcuccacaccuccccccucugcaccaccaacaccaaggagggcuccaacaucugccucacccgcaccgaccgcggcugguacugcgacaacgccggcuccgucuccuucuucccccaggccgagaccugcaagguccaguccaaccgcgucuucugcgacaccaugaacucccucacccuccccuccgaggucaaccucugcaacaucgacaucuucaaccccaaguacgacugcaagaucaugaccuccaagaccgacgucuccuccuccgucaucaccucccucggcgccaucgucuccugcuacggcaagaccaagugcaccgccuccaacaagaaccgcggcaucaucaagaccuucuccaacggcugcgacuacgucuccaacaagggcgucgacaccgucuccgucggcaacacccucuacuacgucaacaagcaggagggcaagucccucuacgucaagggcgagcccaucaucaacuucuacgacccccucgucuuccccuccgacgaguucgacgccuccaucucccaggucaacgagaagaucaaccagucccucgccuucauccgcaaguccgacgagcuccuccacaacgucaacgucggcaaguccaccaccaacaucaugaucaccaccaucaucaucgucaucaucgucauccuccuccuccucaucgccgucggccucuuccucuacugcaaggcccgcugaggacuaguguccaccugucccuccugggcugcuggauugucucguuuuccugccaaauaaacaggaucagcgcuuuacagaucuaaaaaaaaaaaaaaaaaaaaaaaaaaaaaaaaaaaaaaaaaaaaaaaaaaaaaaaaaaaaaaaaugcaucccccccccccccccccccccccccccccccaaaggcucuuuucagagccaccagaauu

SEQ ID NO: 13029 - RNA, 1997 nt, Artificial Sequence
  mRNA product Design e-4 comprising derived and/or modified sequence from HRSV(Memphis-37)__AIY60640.1__F-del_DSCav1 (opt3)
gggagacuccugucgggcggaaguaggaggaguagaguuuaaaaacaguacucuuuuuccgguucgggacguaguugaagcaacgacaagccggauaaccgcucuugagacaggaagcuuaccauggagcugcccauccucaagaccaacgccauuacaacuauacuugcugcagugacgcugugcuucgccagcucccagaauaucaccgaagaguuuuaccaaucuacauguucagcggucaguaaaggcuauuugagcgcuuuaagaacugggugguacaccuccguuauuacaaucgaacugucuaacauuaaggagaauaaaugcaacggaaccgacgccaaggugaaacuaaucaagcaggaacucgauaaguauaaaaaugcaguaacugagcugcagcuucugaugcagucgaccccugccgcuaacaauagggcacggcgcgaguugccacgauucaugaacuacacacucaauaacacgaagaauaacaaugugacucugagcaaaaagcguaaaagaagguuucuggguuuccucuuaggcgucgggucagccauagcuaguggaaucgccguguguaagguucugcaccuugaaggcgaggugaacaagauuaaaaaugcguugcuguccaccaacaaggcagucgugucucuaagcaacgguguauccguucucacauuuaaagugcuggaccuuaagaauuauaucgauaaacaacuguugccgauucucaacaagcagucaugcaguaucagcaauauagaaacugucauugaguuccagcagaaaaacaaucggcuguuagagaucacccgcgaauuuucugugaacgccggggugacaacccccgucuccacguacaugcugacuaauucagagcuccuuagccugauuaacgacaugccuaucacaaaugaucaaaagaaguugaugaguaacaauguucagaucgugagacagcagucuuauuccauuauguguauaaucaaagaagagguacuagcuuacgugguccaacugccacucuacggagugauugacacccccugcuggaagcugcauacuagcccucuuuguacaaccaacacgaaagaaggcucgaauaucugccugaccaggacagaucggggcugguauugugacaacgccgggucuguuuccuucuuuccacaggcagagacuugcaaggugcagucaaaucgcgucuucugugauaccaugaacaguuugacacuccccagcgaggugaaccugugcaauauagacauuuuuaacccuaaauacgauugcaagaucaugacuuccaagaccgacguaucuagcucaguuaucacaaguuuaggagcuauuguguccuguuaugguaaaaccaagugcacugccagcaauaaaaaccgaggcaucauuaagacguucucuaaugggugugauuacgucucaaacaaaggaguggacacagucagugugggcaauacccuguauuacguuaacaagcaagaagguaagagccuauaugugaaaggggagccaauaaucaauuuuuacgacccgcucguauuccccuccgaugaguucgacgcgucuauuucgcaggucaacgaaaagaucaaucagagccuggccuuuaucagaaaauccgaugaacuuuugcacaacgugaauguuggaaagucaacuaccaacauuaugauaacaaccaucauuaucgugauuaucgucauacugcuccugcuuaucgcagugggccuguucuuguacugcaaagcuaggugaggacuaguguccaccugucccuccugggcugcuggauugucucguuuuccugccaaauaaacaggaucagcgcuuuacagaucuaaaaaaaaaaaaaaaaaaaaaaaaaaaaaaaaaaaaaaaaaaaaaaaaaaaaaaaaaaaaaaaaugcaucccccccccccccccccccccccccccccccaaaggcucuuuucagagccaccagaauu

SEQ ID NO: 13030 - RNA, 1997 nt, Artificial Sequence
  mRNA product Design e-4 comprising derived and/or modified sequence from HRSV(Memphis-37)__AIY60640.1__F-del_DSCav1 (opt4)
gggagacuccugucgggcggaaguaggaggaguagaguuuaaaaacaguacucuuuuuccgguucgggacguaguugaagcaacgacaagccggauaaccgcucuugagacaggaagcuuaccauggagcugcccauccugaagaccaacgccaucaccaccauccuggccgccgugacccugugcuucgccagcagccagaacaucaccgaggaguucuaccagagcaccugcagcgccgugagcaagggcuaccugagcgcccugagaaccggcugguacaccagcgugaucaccaucgagcugagcaacaucaaggagaacaagugcaacggcaccgacgccaaggugaagcugaucaagcaggagcuggacaaguacaagaacgccgugaccgagcugcagcugcugaugcagagcacccccgccgccaacaacagagccagaagagagcugcccagauucaugaacuacacccugaacaacaccaagaacaacaacgugacccugagcaagaagagaaagagaagauuccugggcuuccugcugggcgugggcagcgccaucgccagcggcaucgccgugugcaaggugcugcaccuggagggcgaggugaacaagaucaagaacgcccugcugagcaccaacaaggccguggugagccugagcaacggcgugagcgugcugaccuucaaggugcuggaccugaagaacuacaucgacaagcagcugcugcccauccugaacaagcagagcugcagcaucagcaacaucgagaccgugaucgaguuccagcagaagaacaacagacugcuggagaucaccagagaguucagcgugaacgccggcgugaccacccccgugagcaccuacaugcugaccaacagcgagcugcugagccugaucaacgacaugcccaucaccaacgaccagaagaagcugaugagcaacaacgugcagaucgugagacagcagagcuacagcaucaugugcaucaucaaggaggaggugcuggccuacguggugcagcugccccuguacggcgugaucgacacccccugcuggaagcugcacaccagcccccugugcaccaccaacaccaaggagggcagcaacaucugccugaccagaaccgacagaggcugguacugcgacaacgccggcagcgugagcuucuucccccaggccgagaccugcaaggugcagagcaacagaguguucugcgacaccaugaacagccugacccugcccagcgaggugaaccugugcaacaucgacaucuucaaccccaaguacgacugcaagaucaugaccagcaagaccgacgugagcagcagcgugaucaccagccugggcgccaucgugagcugcuacggcaagaccaagugcaccgccagcaacaagaacagaggcaucaucaagaccuucagcaacggcugcgacuacgugagcaacaagggcguggacaccgugagcgugggcaacacccuguacuacgugaacaagcaggagggcaagagccuguacgugaagggcgagcccaucaucaacuucuacgacccccugguguuccccagcgacgaguucgacgccagcaucagccaggugaacgagaagaucaaccagagccuggccuucaucagaaagagcgacgagcugcugcacaacgugaacgugggcaagagcaccaccaacaucaugaucaccaccaucaucaucgugaucaucgugauccugcugcugcugaucgccgugggccuguuccuguacugcaaggccagaugaggacuaguguccaccugucccuccugggcugcuggauugucucguuuuccugccaaauaaacaggaucagcgcuuuacagaucuaaaaaaaaaaaaaaaaaaaaaaaaaaaaaaaaaaaaaaaaaaaaaaaaaaaaaaaaaaaaaaaaugcaucccccccccccccccccccccccccccccccaaaggcucuuuucagagccaccagaauu

SEQ ID NO: 13031 - RNA, 1997 nt, Artificial Sequence
  mRNA product Design e-4 comprising derived and/or modified sequence from HRSV(Memphis-37)__AIY60640.1__F-del_DSCav1 (opt5)
gggagacuccugucgggcggaaguaggaggaguagaguuuaaaaacaguacucuuuuuccgguucgggacguaguugaagcaacgacaagccggauaaccgcucuugagacaggaagcuuaccauggagcugcccauccucaagaccaacgccauuacaacgauccuggcugccgugacccuuugcuucgcgagcucccagaauauuacagaagaguuuuaccaaucuaccuguagcgcugucuccaaaggcuaucugucugcccucagaacagggugguacaccagcguuaucacaauugaacuguccaacaucaaggagaauaaaugcaacggaaccgacgccaaggugaaacuuaucaagcaggaacuggauaaguauaaaaaugcugugacggagcuccagcugcugaugcagucuaccccugccgcuaacaaucgggcccgcagagagcucccgcgguucaugaacuacacacugaauaacaccaagaauaacaaugucacacuuagcaaaaagcgcaaaagacgguuucugggcuuccuccugggggugggauccgcgauugccagcggcaucgcuguuuguaaggugcuucaccuggaaggggaggucaacaagauuaaaaaugcccuccugucuaccaacaaggcugugguuucccugagcaacggagugucuguccucacguuuaaagugcuggaccuuaagaauuauaucgauaaacaacugcuccccauucugaacaagcaguccugcagcaucucuaauauugaaacagugaucgaguuccagcagaaaaacaaucgccuucuggagaucaccagagaauuuuccgucaacgccggcguuacaaccccugugagcaccuacaugcucacaaauuccgagcugcugucucucauuaacgacaugcccaucacgaaugaucaaaagaagcugaugagcaacaaugugcagauuguccggcagcaguccuauagcaucauguguauuaucaaagaagaggugcuugcguacguugugcaacugccucucuacggcgucaucgacacccccugcuggaagcugcauacaucuccucuuuguaccacaaacaccaaagaaggguccaauauuugccugacgcgcacagauagaggaugguauugugacaacgccggcagcgugucuuucuuuccgcaggcugagaccugcaagguucagagcaaucggguguucugugauaccaugaacucccucacacugcccucugaggucaaccugugcaauaucgacauuuuuaacccuaaauacgauugcaagaucaugaccagcaagacagacguguccagcucugucauuacgucccucggggccaucgugagcuguuauggaaaaaccaagugcacagcuucuaauaaaaaccgcggcaucauuaagaccuucuccaaugggugugauuacguuagcaacaaaggaguggacacagucuccgugggcaauacccuguauuacguuaacaagcaagaaggcaagucucuuuaugugaaaggggagcccaucauuaauuuuuacgacccucuggucuuccccagcgaugaguucgacgccuccaucucucaggugaacgaaaagauuaaucagagccucgccuuuaucagaaaauccgaugaacugcugcacaacgugaauguuggaaagagcacgaccaacauuaugaucacaaccaucauuaucgucauuaucgugauucuucuccugcugaucgcugugggccucuuccuguacugcaaagcgcggugaggacuaguguccaccugucccuccugggcugcuggauugucucguuuuccugccaaauaaacaggaucagcgcuuuacagaucuaaaaaaaaaaaaaaaaaaaaaaaaaaaaaaaaaaaaaaaaaaaaaaaaaaaaaaaaaaaaaaaaugcaucccccccccccccccccccccccccccccccaaaggcucuuuucagagccaccagaauu

SEQ ID NO: 13032 - RNA, 1997 nt, Artificial Sequence
  mRNA product Design e-4 comprising derived and/or modified sequence from HRSV(Memphis-37)__AIY60640.1__F-del_DSCav1 (opt6)
gggagacuccugucgggcggaaguaggaggaguagaguuuaaaaacaguacucuuuuuccgguucgggacguaguugaagcaacgacaagccggauaaccgcucuugagacaggaagcuuaccauggaauuaccaauccuuaaaacaaacgcaauaacaaccauccucgcagcaguaacucucugcuucgcuucaucucaaaacaucacagaagaauuuuaccaaagcacaugcucagcuguauccaaagguuaucuaucagccuugagaaccggaugguacacaucaguaauaacaauugaacuaucaaacauuaaagaaaacaaaugcaacggcaccgacgcaaaaguaaaacuaaucaaacaagaacuagacaaauauaaaaaugcaguaacagaauuacaauuauuaaugcaauccacaccagcugcaaacaaccgagcccgaagagaacuaccaagauucaugaacuacacacuaaacaacaccaaaaauaacaacgucacccuaucuaaaaaacguaaaagaagauucuuaggauuccucuuaggagucggauccgcaauagcaagcggcauagccguauguaaaguccuacacuuagaaggugaagugaauaaaauaaaaaacgcccuauuaagcacuaacaaagcaguagucucccuaucaaacggaguuucaguacucacauucaaaguacucgaccucaaaaacuacaucgacaaacaacuuuuaccaauucuaaacaaacaaucaugcuccauaucuaauaucgaaaccgucaucgaauuucaacaaaaaaacaauagacuacuagaaauaacuagagaauuuucaguaaacgccggcguuacgacaccagucucuacauacauguuaaccaauucagaacucuuaucauuaaucaacgacaugccaauaacaaacgaccaaaaaaaacuaauguccaauaacguacaaauagucagacaacaaucauacucaauuaugugcauaauaaaagaagaaguacuagcuuacguaguacaacucccccuauacggcguaauagacacuccauguuggaaauuacacacaucaccauuauguaccaccaauacaaaagaaggcucaaacauaugccuaacaagaacagauagaggaugguauugcgacaacgcaggcucaguuuccuuuuucccccaagcagaaaccugcaaaguacaaucaaaucguguuuuuugcgacaccaugaacucacucacauuaccaucagaaguaaaccuaugcaacauagacauauucaacccaaaauacgacugcaaaaucaugacaucaaaaacagacguauccucuucaguaauuacuagcuuaggagcaauagucucuuguuauggaaaaacaaaaugcacagccaguaacaaaaaccgcggaauaauaaaaaccuucucaaacgguugcgauuacgucucuaacaaaggagucgacacaguaucaguaggcaauacauuauacuacguuaacaaacaagaaggaaaaucuuuauacgucaaaggagaacccauuauaaacuuuuacgacccauuagucuucccuuccgacgaauuugacgccagcauuucacaaguaaacgaaaaaauaaaccaaucacucgcauuuauaagaaaaucugacgaauuacuccacaacguaaacguaggaaaauccacaacaaacauaaugauaacaaccauaaucaucgucauaauagucauacuucuccuauuaauugcaguaggcuuauuccuauacuguaaagcacgauaaggacuaguguccaccugucccuccugggcugcuggauugucucguuuuccugccaaauaaacaggaucagcgcuuuacagaucuaaaaaaaaaaaaaaaaaaaaaaaaaaaaaaaaaaaaaaaaaaaaaaaaaaaaaaaaaaaaaaaaugcaucccccccccccccccccccccccccccccccaaaggcucuuuucagagccaccagaauu

SEQ ID NO: 13033 - RNA, 1997 nt, Artificial Sequence
  mRNA product Design e-4 comprising derived and/or modified sequence from HRSV(Memphis-37)__AIY60640.1__F-del_DSCav1 (opt11)
gggagacuccugucgggcggaaguaggaggaguagaguuuaaaaacaguacucuuuuuccgguucgggacguaguugaagcaacgacaagccggauaaccgcucuugagacaggaagcuuaccauggaacuaccaauccuaaaaacuaacgcaaucaccacaauccucgccgccgucacccuuugcuuugcguccucccaaaacauuacugaagaguucuaccaauccacgugcuccgccgucuccaaagguuaccuauccgcccuuaggaccggcugguacaccagcgucaucaccaucgaacuuuccaacaucaaagaaaacaaauguaacggcaccgacgcaaaagucaaacuuauuaaacaggaacucgacaaauauaagaaugccgucaccgaauuacaacuccucaugcaauccacccccgccgccaacaaccgagcaaggcgcgaacucccucgauucaugaauuacacccucaacaauaccaaaaacaacaacgucacccuauccaagaaacgcaaaagacgcuucuugggcuuccuccucggcgugggcuccgcaauagccuccgguauugccgugugcaaagucuuacaccucgaaggcgaggucaacaaaaucaaaaacgcccuccucuccaccaacaaagccgucgucagccuauccaacggcguuuccguccucaccuucaaaguacucgaccucaaaaacuacaucgacaaacaacuccuacccauacuaaacaaacaauccugcuccauuuccaacaucgaaaccguaaucgaguuccaacagaaaaacaaucgccuccuagaaaucacacgugaauuuucaguuaacgccggaguaacaacuccuguaucuaccuacaugcucaccaauuccgaacuccucagccucauaaacgacaugccaauaacaaacgaccaaaagaaacucaugucuaacaacguacaaaucgucagacaacaaaguuacucaaucauguguaucaucaaagaggaaguccuagcauacgugguccaacucccccucuacggaguaaucgacaccccaugcuggaaacuacacaccagcccccucuguaccacaaacacgaaagaagguuccaacaucugccugacccgaaccgaccgcggcugguacugcgauaacgcuggcuccgucucauucuucccccaagcagaaaccugcaaaguacaauccaaccgaguauucugcgacaccaugaacucacucacccuccccagcgaaguaaaccucugcaacaucgacauauucaacccaaaauacgacugcaaaauuaugaccucuaaaacagacguauccuccucuguaaucacaucccucggggccaucgucuccugcuacggcaaaaccaaaugcaccgccuccaacaaaaaccgcggaaucauaaaaaccuucuccaacggaugcgacuacgucucaaauaaaggcgucgacaccgucuccgucggcaacacgcuauacuacgucaacaaacaagaaggcaaaucacucuacgucaaaggugagcccaucaucaauuucuacgauccccucgucuucccaagcgacgaguucgacgccagcauaucccaaguaaacgagaaaaucaaccaaagccuggccuucauccgcaaauccgacgaacuacuacacaacguaaacguaggcaaguccacuaccaacauaaugaucaccacaaucaucauagucauaaucguuauacuacuccugcucaucgccguaggccucuuccucuauugcaaagcccgauagggacuaguguccaccugucccuccugggcugcuggauugucucguuuuccugccaaauaaacaggaucagcgcuuuacagaucuaaaaaaaaaaaaaaaaaaaaaaaaaaaaaaaaaaaaaaaaaaaaaaaaaaaaaaaaaaaaaaaaugcaucccccccccccccccccccccccccccccccaaaggcucuuuucagagccaccagaauu

SEQ ID NO: 13034 - RNA, 1964 nt, Artificial Sequence
  mRNA product Design e-5 comprising derived and/or modified sequence from HRSV(Memphis-37)__AIY60640.1__F-del_DSCav1 (opt1)
gggagagcggcucggccauuuugucccagucaguccggaggcugcggcugcagaaguaccgccugcggaguaacugcaaagaagcuuaccauggagcugcccauccucaagaccaacgccaucaccacgauccuggccgcggugacccugugcuucgccagcucccagaacaucaccgaggaguucuaccagagcacgugcuccgccgucagcaagggcuaccucuccgcccugcgcaccgggugguacaccagcgugaucaccaucgagcuguccaacaucaaggagaacaagugcaacggcaccgacgccaaggugaagcucaucaagcaggagcuggacaaguacaagaacgcggucacggagcugcagcuccugaugcagagcaccccggccgccaacaaccgggcccgccgggagcugccccgcuucaugaacuacacccucaacaacaccaagaacaacaacgugacgcuguccaagaagcggaagcgccgguuccugggguuccuccugggcguggggagcgcgaucgccuccggcaucgccgucugcaaggugcugcaccucgagggcgaggugaacaagaucaagaacgcccugcuguccaccaacaaggccgucgugagccucuccaacggggugagcguccugaccuucaaggugcuggaccucaagaacuacaucgacaagcagcugcugcccauccugaacaagcagagcugcuccaucagcaacaucgagaccgucaucgaguuccagcagaagaacaaccgccuccuggagaucacgcgggaguucagcgugaacgcgggcgugaccacccccgucuccaccuacaugcugacgaacagcgagcuccugucccugaucaacgacaugccgaucaccaacgaccagaagaagcucaugagcaacaacgugcagaucgugcgccagcaguccuacagcaucaugugcaucaucaaggaggagguccuggccuacguggugcagcugccccucuacggggucaucgacacccccugcuggaagcugcacaccagcccccugugcacgaccaacaccaaggagggcuccaacaucugccucacccggacggaccgcgggugguacugcgacaacgccggcagcguguccuucuucccgcaggccgagaccugcaagguccagagcaaccggguguucugcgacaccaugaacucccugacccugcccagcgaggugaaccucugcaacaucgacaucuucaaccccaaguacgacugcaagaucaugacguccaagaccgacgucagcuccagcgugaucaccucccugggcgccaucgugagcugcuacgggaagaccaagugcacggcgagcaacaagaaccgcggcaucaucaagaccuucuccaacgggugcgacuacgucagcaacaagggcguggacaccguguccgucggcaacacccuguacuacgugaacaagcaggagggcaagagccucuacgugaagggggagcccaucaucaacuucuacgacccgcuggucuuccccuccgacgaguucgacgccagcaucucccaggugaacgagaagaucaaccagagccuggccuucauccggaaguccgacgagcuccugcacaacgugaacgucggcaagagcaccacgaacaucaugaucaccaccaucaucaucgugaucaucgugauccugcugcuccugaucgccgucgggcuguuccucuacugcaaggcccgcugaggacuaguguccaccugucccuccugggcugcuggauugucucguuuuccugccaaauaaacaggaucagcgcuuuacagaucuaaaaaaaaaaaaaaaaaaaaaaaaaaaaaaaaaaaaaaaaaaaaaaaaaaaaaaaaaaaaaaaaugcaucccccccccccccccccccccccccccccccaaaggcucuuuucagagccaccagaauu

SEQ ID NO: 13035 - RNA, 1964 nt, Artificial Sequence
  mRNA product Design e-5 comprising derived and/or modified sequence from HRSV(Memphis-37)__AIY60640.1__F-del_DSCav1 (opt1)
gggagagcggcucggccauuuugucccagucaguccggaggcugcggcugcagaaguaccgccugcggaguaacugcaaagaagcuuaccauggagcugcccauccucaagaccaacgccaucaccacgauccuggccgcggugacccugugcuucgccagcucccagaacaucaccgaggaguucuaccagagcacgugcuccgccgucagcaagggcuaccucuccgcccugcgcaccgggugguacaccagcgugaucaccaucgagcuguccaacaucaaggagaacaagugcaacggcaccgacgccaaggugaagcucaucaagcaggagcuggacaaguacaagaacgcggucacggagcugcagcuccugaugcagagcaccccggccgccaacaaccgggcccgccgggagcugccccgcuucaugaacuacacccucaacaacaccaagaacaacaacgugacgcuguccaagaagcggaagcgccgguuccugggguuccuccugggcguggggagcgcgaucgccuccggcaucgccgucugcaaggugcugcaccucgagggcgaggugaacaagaucaagaacgcccugcugagcaccaacaaggccgucgugucccucagcaacgggguguccguccugaccuucaaggugcuggaccucaagaacuacaucgacaagcagcugcugcccauccucaacaagcagagcugcuccaucagcaacaucgagaccgugaucgaguuccagcagaagaacaaccgccugcuggagaucacgcgggaguucuccgucaacgcgggcgugaccacccccgugagcaccuacaugcucacgaacagcgagcugcugucccucaucaacgacaugccgaucaccaacgaccagaagaagcugaugagcaacaacguccagaucgugcgccagcaguccuacagcaucaugugcaucaucaaggaggaggugcuggccuacgucgugcagcucccccuguacggggugaucgacacccccugcuggaagcugcacaccagcccccucugcacgaccaacaccaaggagggcagcaacaucugccugacccggacggaccgcgggugguacugcgacaacgccggcuccgucagcuucuucccgcaggccgagaccugcaaggugcaguccaaccgggucuucugcgacaccaugaacagccugacccuccccuccgaggugaaccugugcaacaucgacaucuucaaccccaaguacgacugcaagaucaugacgagcaagaccgacguguccagcuccgucaucaccagccugggcgccaucguguccugcuacgggaagaccaagugcacggcgagcaacaagaaccgcggcaucaucaagaccuucuccaacgggugcgacuacgugagcaacaagggcgucgacaccgugagcgugggcaacacccucuacuacgucaacaagcaggaggggaagucccuguacgugaagggcgagcccaucaucaacuucuacgacccgcugguguuccccagcgacgaguucgacgccuccaucagccaggucaacgagaagaucaaccagucccucgccuucauccggaaguccgacgagcugcugcacaacgugaacguggggaaguccaccacgaacaucaugaucaccaccaucaucaucgucaucaucgugauccugcuccugcugaucgccgugggccucuuccuguacugcaaggcccgcugaggacuaguguccaccugucccuccugggcugcuggauugucucguuuuccugccaaauaaacaggaucagcgcuuuacagaucuaaaaaaaaaaaaaaaaaaaaaaaaaaaaaaaaaaaaaaaaaaaaaaaaaaaaaaaaaaaaaaaaugcaucccccccccccccccccccccccccccccccaaaggcucuuuucagagccaccagaauu

SEQ ID NO: 13036 - RNA, 1964 nt, Artificial Sequence
  mRNA product Design e-5 comprising derived and/or modified sequence from HRSV(Memphis-37)__AIY60640.1__F-del_DSCav1 (opt2)
gggagagcggcucggccauuuugucccagucaguccggaggcugcggcugcagaaguaccgccugcggaguaacugcaaagaagcuuaccauggagcuccccauccucaagaccaacgccaucaccaccauccucgccgccgucacccucugcuucgccuccucccagaacaucaccgaggaguucuaccaguccaccugcuccgccgucuccaagggcuaccucuccgcccuccgcaccggcugguacaccuccgucaucaccaucgagcucuccaacaucaaggagaacaagugcaacggcaccgacgccaaggucaagcucaucaagcaggagcucgacaaguacaagaacgccgucaccgagcuccagcuccucaugcaguccacccccgccgccaacaaccgcgcccgccgcgagcucccccgcuucaugaacuacacccucaacaacaccaagaacaacaacgucacccucuccaagaagcgcaagcgccgcuuccucggcuuccuccucggcgucggcuccgccaucgccuccggcaucgccgucugcaagguccuccaccucgagggcgaggucaacaagaucaagaacgcccuccucuccaccaacaaggccgucgucucccucuccaacggcgucuccguccucaccuucaagguccucgaccucaagaacuacaucgacaagcagcuccuccccauccucaacaagcaguccugcuccaucuccaacaucgagaccgucaucgaguuccagcagaagaacaaccgccuccucgagaucacccgcgaguucuccgucaacgccggcgucaccacccccgucuccaccuacaugcucaccaacuccgagcuccucucccucaucaacgacaugcccaucaccaacgaccagaagaagcucauguccaacaacguccagaucguccgccagcaguccuacuccaucaugugcaucaucaaggaggagguccucgccuacgucguccagcucccccucuacggcgucaucgacacccccugcuggaagcuccacaccuccccccucugcaccaccaacaccaaggagggcuccaacaucugccucacccgcaccgaccgcggcugguacugcgacaacgccggcuccgucuccuucuucccccaggccgagaccugcaagguccaguccaaccgcgucuucugcgacaccaugaacucccucacccuccccuccgaggucaaccucugcaacaucgacaucuucaaccccaaguacgacugcaagaucaugaccuccaagaccgacgucuccuccuccgucaucaccucccucggcgccaucgucuccugcuacggcaagaccaagugcaccgccuccaacaagaaccgcggcaucaucaagaccuucuccaacggcugcgacuacgucuccaacaagggcgucgacaccgucuccgucggcaacacccucuacuacgucaacaagcaggagggcaagucccucuacgucaagggcgagcccaucaucaacuucuacgacccccucgucuuccccuccgacgaguucgacgccuccaucucccaggucaacgagaagaucaaccagucccucgccuucauccgcaaguccgacgagcuccuccacaacgucaacgucggcaaguccaccaccaacaucaugaucaccaccaucaucaucgucaucaucgucauccuccuccuccucaucgccgucggccucuuccucuacugcaaggcccgcugaggacuaguguccaccugucccuccugggcugcuggauugucucguuuuccugccaaauaaacaggaucagcgcuuuacagaucuaaaaaaaaaaaaaaaaaaaaaaaaaaaaaaaaaaaaaaaaaaaaaaaaaaaaaaaaaaaaaaaaugcaucccccccccccccccccccccccccccccccaaaggcucuuuucagagccaccagaauu

SEQ ID NO: 13037 - RNA, 1964 nt, Artificial Sequence
  mRNA product Design e-5 comprising derived and/or modified sequence from HRSV(Memphis-37)__AIY60640.1__F-del_DSCav1 (opt3)
gggagagcggcucggccauuuugucccagucaguccggaggcugcggcugcagaaguaccgccugcggaguaacugcaaagaagcuuaccauggagcugcccauccucaagaccaacgccauuacaacuauacuugcugcagugacgcugugcuucgccagcucccagaauaucaccgaagaguuuuaccaaucuacauguucagcggucaguaaaggcuauuugagcgcuuuaagaacugggugguacaccuccguuauuacaaucgaacugucuaacauuaaggagaauaaaugcaacggaaccgacgccaaggugaaacuaaucaagcaggaacucgauaaguauaaaaaugcaguaacugagcugcagcuucugaugcagucgaccccugccgcuaacaauagggcacggcgcgaguugccacgauucaugaacuacacacucaauaacacgaagaauaacaaugugacucugagcaaaaagcguaaaagaagguuucuggguuuccucuuaggcgucgggucagccauagcuaguggaaucgccguguguaagguucugcaccuugaaggcgaggugaacaagauuaaaaaugcguugcuguccaccaacaaggcagucgugucucuaagcaacgguguauccguucucacauuuaaagugcuggaccuuaagaauuauaucgauaaacaacuguugccgauucucaacaagcagucaugcaguaucagcaauauagaaacugucauugaguuccagcagaaaaacaaucggcuguuagagaucacccgcgaauuuucugugaacgccggggugacaacccccgucuccacguacaugcugacuaauucagagcuccuuagccugauuaacgacaugccuaucacaaaugaucaaaagaaguugaugaguaacaauguucagaucgugagacagcagucuuauuccauuauguguauaaucaaagaagagguacuagcuuacgugguccaacugccacucuacggagugauugacacccccugcuggaagcugcauacuagcccucuuuguacaaccaacacgaaagaaggcucgaauaucugccugaccaggacagaucggggcugguauugugacaacgccgggucuguuuccuucuuuccacaggcagagacuugcaaggugcagucaaaucgcgucuucugugauaccaugaacaguuugacacuccccagcgaggugaaccugugcaauauagacauuuuuaacccuaaauacgauugcaagaucaugacuuccaagaccgacguaucuagcucaguuaucacaaguuuaggagcuauuguguccuguuaugguaaaaccaagugcacugccagcaauaaaaaccgaggcaucauuaagacguucucuaaugggugugauuacgucucaaacaaaggaguggacacagucagugugggcaauacccuguauuacguuaacaagcaagaagguaagagccuauaugugaaaggggagccaauaaucaauuuuuacgacccgcucguauuccccuccgaugaguucgacgcgucuauuucgcaggucaacgaaaagaucaaucagagccuggccuuuaucagaaaauccgaugaacuuuugcacaacgugaauguuggaaagucaacuaccaacauuaugauaacaaccaucauuaucgugauuaucgucauacugcuccugcuuaucgcagugggccuguucuuguacugcaaagcuaggugaggacuaguguccaccugucccuccugggcugcuggauugucucguuuuccugccaaauaaacaggaucagcgcuuuacagaucuaaaaaaaaaaaaaaaaaaaaaaaaaaaaaaaaaaaaaaaaaaaaaaaaaaaaaaaaaaaaaaaaugcaucccccccccccccccccccccccccccccccaaaggcucuuuucagagccaccagaauu

SEQ ID NO: 13038 - RNA, 1964 nt, Artificial Sequence
  mRNA product Design e-5 comprising derived and/or modified sequence from HRSV(Memphis-37)__AIY60640.1__F-del_DSCav1 (opt4)
gggagagcggcucggccauuuugucccagucaguccggaggcugcggcugcagaaguaccgccugcggaguaacugcaaagaagcuuaccauggagcugcccauccugaagaccaacgccaucaccaccauccuggccgccgugacccugugcuucgccagcagccagaacaucaccgaggaguucuaccagagcaccugcagcgccgugagcaagggcuaccugagcgcccugagaaccggcugguacaccagcgugaucaccaucgagcugagcaacaucaaggagaacaagugcaacggcaccgacgccaaggugaagcugaucaagcaggagcuggacaaguacaagaacgccgugaccgagcugcagcugcugaugcagagcacccccgccgccaacaacagagccagaagagagcugcccagauucaugaacuacacccugaacaacaccaagaacaacaacgugacccugagcaagaagagaaagagaagauuccugggcuuccugcugggcgugggcagcgccaucgccagcggcaucgccgugugcaaggugcugcaccuggagggcgaggugaacaagaucaagaacgcccugcugagcaccaacaaggccguggugagccugagcaacggcgugagcgugcugaccuucaaggugcuggaccugaagaacuacaucgacaagcagcugcugcccauccugaacaagcagagcugcagcaucagcaacaucgagaccgugaucgaguuccagcagaagaacaacagacugcuggagaucaccagagaguucagcgugaacgccggcgugaccacccccgugagcaccuacaugcugaccaacagcgagcugcugagccugaucaacgacaugcccaucaccaacgaccagaagaagcugaugagcaacaacgugcagaucgugagacagcagagcuacagcaucaugugcaucaucaaggaggaggugcuggccuacguggugcagcugccccuguacggcgugaucgacacccccugcuggaagcugcacaccagcccccugugcaccaccaacaccaaggagggcagcaacaucugccugaccagaaccgacagaggcugguacugcgacaacgccggcagcgugagcuucuucccccaggccgagaccugcaaggugcagagcaacagaguguucugcgacaccaugaacagccugacccugcccagcgaggugaaccugugcaacaucgacaucuucaaccccaaguacgacugcaagaucaugaccagcaagaccgacgugagcagcagcgugaucaccagccugggcgccaucgugagcugcuacggcaagaccaagugcaccgccagcaacaagaacagaggcaucaucaagaccuucagcaacggcugcgacuacgugagcaacaagggcguggacaccgugagcgugggcaacacccuguacuacgugaacaagcaggagggcaagagccuguacgugaagggcgagcccaucaucaacuucuacgacccccugguguuccccagcgacgaguucgacgccagcaucagccaggugaacgagaagaucaaccagagccuggccuucaucagaaagagcgacgagcugcugcacaacgugaacgugggcaagagcaccaccaacaucaugaucaccaccaucaucaucgugaucaucgugauccugcugcugcugaucgccgugggccuguuccuguacugcaaggccagaugaggacuaguguccaccugucccuccugggcugcuggauugucucguuuuccugccaaauaaacaggaucagcgcuuuacagaucuaaaaaaaaaaaaaaaaaaaaaaaaaaaaaaaaaaaaaaaaaaaaaaaaaaaaaaaaaaaaaaaaugcaucccccccccccccccccccccccccccccccaaaggcucuuuucagagccaccagaauu

SEQ ID NO: 13039 - RNA, 1964 nt, Artificial Sequence
  mRNA product Design e-5 comprising derived and/or modified sequence from HRSV(Memphis-37)__AIY60640.1__F-del_DSCav1 (opt5)
gggagagcggcucggccauuuugucccagucaguccggaggcugcggcugcagaaguaccgccugcggaguaacugcaaagaagcuuaccauggagcugcccauccucaagaccaacgccauuacaacgauccuggcugccgugacccuuugcuucgcgagcucccagaauauuacagaagaguuuuaccaaucuaccuguagcgcugucuccaaaggcuaucugucugcccucagaacagggugguacaccagcguuaucacaauugaacuguccaacaucaaggagaauaaaugcaacggaaccgacgccaaggugaaacuuaucaagcaggaacuggauaaguauaaaaaugcugugacggagcuccagcugcugaugcagucuaccccugccgcuaacaaucgggcccgcagagagcucccgcgguucaugaacuacacacugaauaacaccaagaauaacaaugucacacuuagcaaaaagcgcaaaagacgguuucugggcuuccuccugggggugggauccgcgauugccagcggcaucgcuguuuguaaggugcuucaccuggaaggggaggucaacaagauuaaaaaugcccuccugucuaccaacaaggcugugguuucccugagcaacggagugucuguccucacguuuaaagugcuggaccuuaagaauuauaucgauaaacaacugcuccccauucugaacaagcaguccugcagcaucucuaauauugaaacagugaucgaguuccagcagaaaaacaaucgccuucuggagaucaccagagaauuuuccgucaacgccggcguuacaaccccugugagcaccuacaugcucacaaauuccgagcugcugucucucauuaacgacaugcccaucacgaaugaucaaaagaagcugaugagcaacaaugugcagauuguccggcagcaguccuauagcaucauguguauuaucaaagaagaggugcuugcguacguugugcaacugccucucuacggcgucaucgacacccccugcuggaagcugcauacaucuccucuuuguaccacaaacaccaaagaaggguccaauauuugccugacgcgcacagauagaggaugguauugugacaacgccggcagcgugucuuucuuuccgcaggcugagaccugcaagguucagagcaaucggguguucugugauaccaugaacucccucacacugcccucugaggucaaccugugcaauaucgacauuuuuaacccuaaauacgauugcaagaucaugaccagcaagacagacguguccagcucugucauuacgucccucggggccaucgugagcuguuauggaaaaaccaagugcacagcuucuaauaaaaaccgcggcaucauuaagaccuucuccaaugggugugauuacguuagcaacaaaggaguggacacagucuccgugggcaauacccuguauuacguuaacaagcaagaaggcaagucucuuuaugugaaaggggagcccaucauuaauuuuuacgacccucuggucuuccccagcgaugaguucgacgccuccaucucucaggugaacgaaaagauuaaucagagccucgccuuuaucagaaaauccgaugaacugcugcacaacgugaauguuggaaagagcacgaccaacauuaugaucacaaccaucauuaucgucauuaucgugauucuucuccugcugaucgcugugggccucuuccuguacugcaaagcgcggugaggacuaguguccaccugucccuccugggcugcuggauugucucguuuuccugccaaauaaacaggaucagcgcuuuacagaucuaaaaaaaaaaaaaaaaaaaaaaaaaaaaaaaaaaaaaaaaaaaaaaaaaaaaaaaaaaaaaaaaugcaucccccccccccccccccccccccccccccccaaaggcucuuuucagagccaccagaauu

SEQ ID NO: 13040 - RNA, 1964 nt, Artificial Sequence
  mRNA product Design e-5 comprising derived and/or modified sequence from HRSV(Memphis-37)__AIY60640.1__F-del_DSCav1 (opt6)
gggagagcggcucggccauuuugucccagucaguccggaggcugcggcugcagaaguaccgccugcggaguaacugcaaagaagcuuaccauggaauuaccaauccuuaaaacaaacgcaauaacaaccauccucgcagcaguaacucucugcuucgcuucaucucaaaacaucacagaagaauuuuaccaaagcacaugcucagcuguauccaaagguuaucuaucagccuugagaaccggaugguacacaucaguaauaacaauugaacuaucaaacauuaaagaaaacaaaugcaacggcaccgacgcaaaaguaaaacuaaucaaacaagaacuagacaaauauaaaaaugcaguaacagaauuacaauuauuaaugcaauccacaccagcugcaaacaaccgagcccgaagagaacuaccaagauucaugaacuacacacuaaacaacaccaaaaauaacaacgucacccuaucuaaaaaacguaaaagaagauucuuaggauuccucuuaggagucggauccgcaauagcaagcggcauagccguauguaaaguccuacacuuagaaggugaagugaauaaaauaaaaaacgcccuauuaagcacuaacaaagcaguagucucccuaucaaacggaguuucaguacucacauucaaaguacucgaccucaaaaacuacaucgacaaacaacuuuuaccaauucuaaacaaacaaucaugcuccauaucuaauaucgaaaccgucaucgaauuucaacaaaaaaacaauagacuacuagaaauaacuagagaauuuucaguaaacgccggcguuacgacaccagucucuacauacauguuaaccaauucagaacucuuaucauuaaucaacgacaugccaauaacaaacgaccaaaaaaaacuaauguccaauaacguacaaauagucagacaacaaucauacucaauuaugugcauaauaaaagaagaaguacuagcuuacguaguacaacucccccuauacggcguaauagacacuccauguuggaaauuacacacaucaccauuauguaccaccaauacaaaagaaggcucaaacauaugccuaacaagaacagauagaggaugguauugcgacaacgcaggcucaguuuccuuuuucccccaagcagaaaccugcaaaguacaaucaaaucguguuuuuugcgacaccaugaacucacucacauuaccaucagaaguaaaccuaugcaacauagacauauucaacccaaaauacgacugcaaaaucaugacaucaaaaacagacguauccucuucaguaauuacuagcuuaggagcaauagucucuuguuauggaaaaacaaaaugcacagccaguaacaaaaaccgcggaauaauaaaaaccuucucaaacgguugcgauuacgucucuaacaaaggagucgacacaguaucaguaggcaauacauuauacuacguuaacaaacaagaaggaaaaucuuuauacgucaaaggagaacccauuauaaacuuuuacgacccauuagucuucccuuccgacgaauuugacgccagcauuucacaaguaaacgaaaaaauaaaccaaucacucgcauuuauaagaaaaucugacgaauuacuccacaacguaaacguaggaaaauccacaacaaacauaaugauaacaaccauaaucaucgucauaauagucauacuucuccuauuaauugcaguaggcuuauuccuauacuguaaagcacgauaaggacuaguguccaccugucccuccugggcugcuggauugucucguuuuccugccaaauaaacaggaucagcgcuuuacagaucuaaaaaaaaaaaaaaaaaaaaaaaaaaaaaaaaaaaaaaaaaaaaaaaaaaaaaaaaaaaaaaaaugcaucccccccccccccccccccccccccccccccaaaggcucuuuucagagccaccagaauu

SEQ ID NO: 13041 - RNA, 1964 nt, Artificial Sequence
  mRNA product Design e-5 comprising derived and/or modified sequence from HRSV(Memphis-37)__AIY60640.1__F-del_DSCav1 (opt11)
gggagagcggcucggccauuuugucccagucaguccggaggcugcggcugcagaaguaccgccugcggaguaacugcaaagaagcuuaccauggaacuaccaauccuaaaaacuaacgcaaucaccacaauccucgccgccgucacccuuugcuuugcguccucccaaaacauuacugaagaguucuaccaauccacgugcuccgccgucuccaaagguuaccuauccgcccuuaggaccggcugguacaccagcgucaucaccaucgaacuuuccaacaucaaagaaaacaaauguaacggcaccgacgcaaaagucaaacuuauuaaacaggaacucgacaaauauaagaaugccgucaccgaauuacaacuccucaugcaauccacccccgccgccaacaaccgagcaaggcgcgaacucccucgauucaugaauuacacccucaacaauaccaaaaacaacaacgucacccuauccaagaaacgcaaaagacgcuucuugggcuuccuccucggcgugggcuccgcaauagccuccgguauugccgugugcaaagucuuacaccucgaaggcgaggucaacaaaaucaaaaacgcccuccucuccaccaacaaagccgucgucagccuauccaacggcguuuccguccucaccuucaaaguacucgaccucaaaaacuacaucgacaaacaacuccuacccauacuaaacaaacaauccugcuccauuuccaacaucgaaaccguaaucgaguuccaacagaaaaacaaucgccuccuagaaaucacacgugaauuuucaguuaacgccggaguaacaacuccuguaucuaccuacaugcucaccaauuccgaacuccucagccucauaaacgacaugccaauaacaaacgaccaaaagaaacucaugucuaacaacguacaaaucgucagacaacaaaguuacucaaucauguguaucaucaaagaggaaguccuagcauacgugguccaacucccccucuacggaguaaucgacaccccaugcuggaaacuacacaccagcccccucuguaccacaaacacgaaagaagguuccaacaucugccugacccgaaccgaccgcggcugguacugcgauaacgcuggcuccgucucauucuucccccaagcagaaaccugcaaaguacaauccaaccgaguauucugcgacaccaugaacucacucacccuccccagcgaaguaaaccucugcaacaucgacauauucaacccaaaauacgacugcaaaauuaugaccucuaaaacagacguauccuccucuguaaucacaucccucggggccaucgucuccugcuacggcaaaaccaaaugcaccgccuccaacaaaaaccgcggaaucauaaaaaccuucuccaacggaugcgacuacgucucaaauaaaggcgucgacaccgucuccgucggcaacacgcuauacuacgucaacaaacaagaaggcaaaucacucuacgucaaaggugagcccaucaucaauuucuacgauccccucgucuucccaagcgacgaguucgacgccagcauaucccaaguaaacgagaaaaucaaccaaagccuggccuucauccgcaaauccgacgaacuacuacacaacguaaacguaggcaaguccacuaccaacauaaugaucaccacaaucaucauagucauaaucguuauacuacuccugcucaucgccguaggccucuuccucuauugcaaagcccgauagggacuaguguccaccugucccuccugggcugcuggauugucucguuuuccugccaaauaaacaggaucagcgcuuuacagaucuaaaaaaaaaaaaaaaaaaaaaaaaaaaaaaaaaaaaaaaaaaaaaaaaaaaaaaaaaaaaaaaaugcaucccccccccccccccccccccccccccccccaaaggcucuuuucagagccaccagaauu

SEQ ID NO: 13042 - RNA, 2031 nt, Artificial Sequence
  mRNA product Design e-6 comprising derived and/or modified sequence from HRSV(Memphis-37)__AIY60640.1__F-del_DSCav1 (opt1)
gggagagcggcucggccauuuugucccagucaguccggaggcugcggcugcagaaguaccgccugcggaguaacugcaaagaagcuuaccauggagcugcccauccucaagaccaacgccaucaccacgauccuggccgcggugacccugugcuucgccagcucccagaacaucaccgaggaguucuaccagagcacgugcuccgccgucagcaagggcuaccucuccgcccugcgcaccgggugguacaccagcgugaucaccaucgagcuguccaacaucaaggagaacaagugcaacggcaccgacgccaaggugaagcucaucaagcaggagcuggacaaguacaagaacgcggucacggagcugcagcuccugaugcagagcaccccggccgccaacaaccgggcccgccgggagcugccccgcuucaugaacuacacccucaacaacaccaagaacaacaacgugacgcuguccaagaagcggaagcgccgguuccugggguuccuccugggcguggggagcgcgaucgccuccggcaucgccgucugcaaggugcugcaccucgagggcgaggugaacaagaucaagaacgcccugcuguccaccaacaaggccgucgugagccucuccaacggggugagcguccugaccuucaaggugcuggaccucaagaacuacaucgacaagcagcugcugcccauccugaacaagcagagcugcuccaucagcaacaucgagaccgucaucgaguuccagcagaagaacaaccgccuccuggagaucacgcgggaguucagcgugaacgcgggcgugaccacccccgucuccaccuacaugcugacgaacagcgagcuccugucccugaucaacgacaugccgaucaccaacgaccagaagaagcucaugagcaacaacgugcagaucgugcgccagcaguccuacagcaucaugugcaucaucaaggaggagguccuggccuacguggugcagcugccccucuacggggucaucgacacccccugcuggaagcugcacaccagcccccugugcacgaccaacaccaaggagggcuccaacaucugccucacccggacggaccgcgggugguacugcgacaacgccggcagcguguccuucuucccgcaggccgagaccugcaagguccagagcaaccggguguucugcgacaccaugaacucccugacccugcccagcgaggugaaccucugcaacaucgacaucuucaaccccaaguacgacugcaagaucaugacguccaagaccgacgucagcuccagcgugaucaccucccugggcgccaucgugagcugcuacgggaagaccaagugcacggcgagcaacaagaaccgcggcaucaucaagaccuucuccaacgggugcgacuacgucagcaacaagggcguggacaccguguccgucggcaacacccuguacuacgugaacaagcaggagggcaagagccucuacgugaagggggagcccaucaucaacuucuacgacccgcuggucuuccccuccgacgaguucgacgccagcaucucccaggugaacgagaagaucaaccagagccuggccuucauccggaaguccgacgagcuccugcacaacgugaacgucggcaagagcaccacgaacaucaugaucaccaccaucaucaucgugaucaucgugauccugcugcuccugaucgccgucgggcuguuccucuacugcaaggcccgcugaggacuaguacuggcugcaucucccuuuccucuguccuccauccuucucccaggauggugaagggggaccugguacccagugauccccaccccaggauccuaaaucaugacuuaccugcuaauaaaaacucauuggaaaagugagaagaucuaaaaaaaaaaaaaaaaaaaaaaaaaaaaaaaaaaaaaaaaaaaaaaaaaaaaaaaaaaaaaaaaugcaucccccccccccccccccccccccccccccccaaaggcucuuuucagagccaccagaauu

SEQ ID NO: 13043 - RNA, 2031 nt, Artificial Sequence
  mRNA product Design e-6 comprising derived and/or modified sequence from HRSV(Memphis-37)__AIY60640.1__F-del_DSCav1 (opt1)
gggagagcggcucggccauuuugucccagucaguccggaggcugcggcugcagaaguaccgccugcggaguaacugcaaagaagcuuaccauggagcugcccauccucaagaccaacgccaucaccacgauccuggccgcggugacccugugcuucgccagcucccagaacaucaccgaggaguucuaccagagcacgugcuccgccgucagcaagggcuaccucuccgcccugcgcaccgggugguacaccagcgugaucaccaucgagcuguccaacaucaaggagaacaagugcaacggcaccgacgccaaggugaagcucaucaagcaggagcuggacaaguacaagaacgcggucacggagcugcagcuccugaugcagagcaccccggccgccaacaaccgggcccgccgggagcugccccgcuucaugaacuacacccucaacaacaccaagaacaacaacgugacgcuguccaagaagcggaagcgccgguuccugggguuccuccugggcguggggagcgcgaucgccuccggcaucgccgucugcaaggugcugcaccucgagggcgaggugaacaagaucaagaacgcccugcugagcaccaacaaggccgucgugucccucagcaacgggguguccguccugaccuucaaggugcuggaccucaagaacuacaucgacaagcagcugcugcccauccucaacaagcagagcugcuccaucagcaacaucgagaccgugaucgaguuccagcagaagaacaaccgccugcuggagaucacgcgggaguucuccgucaacgcgggcgugaccacccccgugagcaccuacaugcucacgaacagcgagcugcugucccucaucaacgacaugccgaucaccaacgaccagaagaagcugaugagcaacaacguccagaucgugcgccagcaguccuacagcaucaugugcaucaucaaggaggaggugcuggccuacgucgugcagcucccccuguacggggugaucgacacccccugcuggaagcugcacaccagcccccucugcacgaccaacaccaaggagggcagcaacaucugccugacccggacggaccgcgggugguacugcgacaacgccggcuccgucagcuucuucccgcaggccgagaccugcaaggugcaguccaaccgggucuucugcgacaccaugaacagccugacccuccccuccgaggugaaccugugcaacaucgacaucuucaaccccaaguacgacugcaagaucaugacgagcaagaccgacguguccagcuccgucaucaccagccugggcgccaucguguccugcuacgggaagaccaagugcacggcgagcaacaagaaccgcggcaucaucaagaccuucuccaacgggugcgacuacgugagcaacaagggcgucgacaccgugagcgugggcaacacccucuacuacgucaacaagcaggaggggaagucccuguacgugaagggcgagcccaucaucaacuucuacgacccgcugguguuccccagcgacgaguucgacgccuccaucagccaggucaacgagaagaucaaccagucccucgccuucauccggaaguccgacgagcugcugcacaacgugaacguggggaaguccaccacgaacaucaugaucaccaccaucaucaucgucaucaucgugauccugcuccugcugaucgccgugggccucuuccuguacugcaaggcccgcugaggacuaguacuggcugcaucucccuuuccucuguccuccauccuucucccaggauggugaagggggaccugguacccagugauccccaccccaggauccuaaaucaugacuuaccugcuaauaaaaacucauuggaaaagugagaagaucuaaaaaaaaaaaaaaaaaaaaaaaaaaaaaaaaaaaaaaaaaaaaaaaaaaaaaaaaaaaaaaaaugcaucccccccccccccccccccccccccccccccaaaggcucuuuucagagccaccagaauu

SEQ ID NO: 13044 - RNA, 2031 nt, Artificial Sequence
  mRNA product Design e-6 comprising derived and/or modified sequence from HRSV(Memphis-37)__AIY60640.1__F-del_DSCav1 (opt2)
gggagagcggcucggccauuuugucccagucaguccggaggcugcggcugcagaaguaccgccugcggaguaacugcaaagaagcuuaccauggagcuccccauccucaagaccaacgccaucaccaccauccucgccgccgucacccucugcuucgccuccucccagaacaucaccgaggaguucuaccaguccaccugcuccgccgucuccaagggcuaccucuccgcccuccgcaccggcugguacaccuccgucaucaccaucgagcucuccaacaucaaggagaacaagugcaacggcaccgacgccaaggucaagcucaucaagcaggagcucgacaaguacaagaacgccgucaccgagcuccagcuccucaugcaguccacccccgccgccaacaaccgcgcccgccgcgagcucccccgcuucaugaacuacacccucaacaacaccaagaacaacaacgucacccucuccaagaagcgcaagcgccgcuuccucggcuuccuccucggcgucggcuccgccaucgccuccggcaucgccgucugcaagguccuccaccucgagggcgaggucaacaagaucaagaacgcccuccucuccaccaacaaggccgucgucucccucuccaacggcgucuccguccucaccuucaagguccucgaccucaagaacuacaucgacaagcagcuccuccccauccucaacaagcaguccugcuccaucuccaacaucgagaccgucaucgaguuccagcagaagaacaaccgccuccucgagaucacccgcgaguucuccgucaacgccggcgucaccacccccgucuccaccuacaugcucaccaacuccgagcuccucucccucaucaacgacaugcccaucaccaacgaccagaagaagcucauguccaacaacguccagaucguccgccagcaguccuacuccaucaugugcaucaucaaggaggagguccucgccuacgucguccagcucccccucuacggcgucaucgacacccccugcuggaagcuccacaccuccccccucugcaccaccaacaccaaggagggcuccaacaucugccucacccgcaccgaccgcggcugguacugcgacaacgccggcuccgucuccuucuucccccaggccgagaccugcaagguccaguccaaccgcgucuucugcgacaccaugaacucccucacccuccccuccgaggucaaccucugcaacaucgacaucuucaaccccaaguacgacugcaagaucaugaccuccaagaccgacgucuccuccuccgucaucaccucccucggcgccaucgucuccugcuacggcaagaccaagugcaccgccuccaacaagaaccgcggcaucaucaagaccuucuccaacggcugcgacuacgucuccaacaagggcgucgacaccgucuccgucggcaacacccucuacuacgucaacaagcaggagggcaagucccucuacgucaagggcgagcccaucaucaacuucuacgacccccucgucuuccccuccgacgaguucgacgccuccaucucccaggucaacgagaagaucaaccagucccucgccuucauccgcaaguccgacgagcuccuccacaacgucaacgucggcaaguccaccaccaacaucaugaucaccaccaucaucaucgucaucaucgucauccuccuccuccucaucgccgucggccucuuccucuacugcaaggcccgcugaggacuaguacuggcugcaucucccuuuccucuguccuccauccuucucccaggauggugaagggggaccugguacccagugauccccaccccaggauccuaaaucaugacuuaccugcuaauaaaaacucauuggaaaagugagaagaucuaaaaaaaaaaaaaaaaaaaaaaaaaaaaaaaaaaaaaaaaaaaaaaaaaaaaaaaaaaaaaaaaugcaucccccccccccccccccccccccccccccccaaaggcucuuuucagagccaccagaauu

SEQ ID NO: 13045 - RNA, 2031 nt, Artificial Sequence
  mRNA product Design e-6 comprising derived and/or modified sequence from HRSV(Memphis-37)__AIY60640.1__F-del_DSCav1 (opt3)
gggagagcggcucggccauuuugucccagucaguccggaggcugcggcugcagaaguaccgccugcggaguaacugcaaagaagcuuaccauggagcugcccauccucaagaccaacgccauuacaacuauacuugcugcagugacgcugugcuucgccagcucccagaauaucaccgaagaguuuuaccaaucuacauguucagcggucaguaaaggcuauuugagcgcuuuaagaacugggugguacaccuccguuauuacaaucgaacugucuaacauuaaggagaauaaaugcaacggaaccgacgccaaggugaaacuaaucaagcaggaacucgauaaguauaaaaaugcaguaacugagcugcagcuucugaugcagucgaccccugccgcuaacaauagggcacggcgcgaguugccacgauucaugaacuacacacucaauaacacgaagaauaacaaugugacucugagcaaaaagcguaaaagaagguuucuggguuuccucuuaggcgucgggucagccauagcuaguggaaucgccguguguaagguucugcaccuugaaggcgaggugaacaagauuaaaaaugcguugcuguccaccaacaaggcagucgugucucuaagcaacgguguauccguucucacauuuaaagugcuggaccuuaagaauuauaucgauaaacaacuguugccgauucucaacaagcagucaugcaguaucagcaauauagaaacugucauugaguuccagcagaaaaacaaucggcuguuagagaucacccgcgaauuuucugugaacgccggggugacaacccccgucuccacguacaugcugacuaauucagagcuccuuagccugauuaacgacaugccuaucacaaaugaucaaaagaaguugaugaguaacaauguucagaucgugagacagcagucuuauuccauuauguguauaaucaaagaagagguacuagcuuacgugguccaacugccacucuacggagugauugacacccccugcuggaagcugcauacuagcccucuuuguacaaccaacacgaaagaaggcucgaauaucugccugaccaggacagaucggggcugguauugugacaacgccgggucuguuuccuucuuuccacaggcagagacuugcaaggugcagucaaaucgcgucuucugugauaccaugaacaguuugacacuccccagcgaggugaaccugugcaauauagacauuuuuaacccuaaauacgauugcaagaucaugacuuccaagaccgacguaucuagcucaguuaucacaaguuuaggagcuauuguguccuguuaugguaaaaccaagugcacugccagcaauaaaaaccgaggcaucauuaagacguucucuaaugggugugauuacgucucaaacaaaggaguggacacagucagugugggcaauacccuguauuacguuaacaagcaagaagguaagagccuauaugugaaaggggagccaauaaucaauuuuuacgacccgcucguauuccccuccgaugaguucgacgcgucuauuucgcaggucaacgaaaagaucaaucagagccuggccuuuaucagaaaauccgaugaacuuuugcacaacgugaauguuggaaagucaacuaccaacauuaugauaacaaccaucauuaucgugauuaucgucauacugcuccugcuuaucgcagugggccuguucuuguacugcaaagcuaggugaggacuaguacuggcugcaucucccuuuccucuguccuccauccuucucccaggauggugaagggggaccugguacccagugauccccaccccaggauccuaaaucaugacuuaccugcuaauaaaaacucauuggaaaagugagaagaucuaaaaaaaaaaaaaaaaaaaaaaaaaaaaaaaaaaaaaaaaaaaaaaaaaaaaaaaaaaaaaaaaugcaucccccccccccccccccccccccccccccccaaaggcucuuuucagagccaccagaauu

SEQ ID NO: 13046 - RNA, 2031 nt, Artificial Sequence
  mRNA product Design e-6 comprising derived and/or modified sequence from HRSV(Memphis-37)__AIY60640.1__F-del_DSCav1 (opt4)
gggagagcggcucggccauuuugucccagucaguccggaggcugcggcugcagaaguaccgccugcggaguaacugcaaagaagcuuaccauggagcugcccauccugaagaccaacgccaucaccaccauccuggccgccgugacccugugcuucgccagcagccagaacaucaccgaggaguucuaccagagcaccugcagcgccgugagcaagggcuaccugagcgcccugagaaccggcugguacaccagcgugaucaccaucgagcugagcaacaucaaggagaacaagugcaacggcaccgacgccaaggugaagcugaucaagcaggagcuggacaaguacaagaacgccgugaccgagcugcagcugcugaugcagagcacccccgccgccaacaacagagccagaagagagcugcccagauucaugaacuacacccugaacaacaccaagaacaacaacgugacccugagcaagaagagaaagagaagauuccugggcuuccugcugggcgugggcagcgccaucgccagcggcaucgccgugugcaaggugcugcaccuggagggcgaggugaacaagaucaagaacgcccugcugagcaccaacaaggccguggugagccugagcaacggcgugagcgugcugaccuucaaggugcuggaccugaagaacuacaucgacaagcagcugcugcccauccugaacaagcagagcugcagcaucagcaacaucgagaccgugaucgaguuccagcagaagaacaacagacugcuggagaucaccagagaguucagcgugaacgccggcgugaccacccccgugagcaccuacaugcugaccaacagcgagcugcugagccugaucaacgacaugcccaucaccaacgaccagaagaagcugaugagcaacaacgugcagaucgugagacagcagagcuacagcaucaugugcaucaucaaggaggaggugcuggccuacguggugcagcugccccuguacggcgugaucgacacccccugcuggaagcugcacaccagcccccugugcaccaccaacaccaaggagggcagcaacaucugccugaccagaaccgacagaggcugguacugcgacaacgccggcagcgugagcuucuucccccaggccgagaccugcaaggugcagagcaacagaguguucugcgacaccaugaacagccugacccugcccagcgaggugaaccugugcaacaucgacaucuucaaccccaaguacgacugcaagaucaugaccagcaagaccgacgugagcagcagcgugaucaccagccugggcgccaucgugagcugcuacggcaagaccaagugcaccgccagcaacaagaacagaggcaucaucaagaccuucagcaacggcugcgacuacgugagcaacaagggcguggacaccgugagcgugggcaacacccuguacuacgugaacaagcaggagggcaagagccuguacgugaagggcgagcccaucaucaacuucuacgacccccugguguuccccagcgacgaguucgacgccagcaucagccaggugaacgagaagaucaaccagagccuggccuucaucagaaagagcgacgagcugcugcacaacgugaacgugggcaagagcaccaccaacaucaugaucaccaccaucaucaucgugaucaucgugauccugcugcugcugaucgccgugggccuguuccuguacugcaaggccagaugaggacuaguacuggcugcaucucccuuuccucuguccuccauccuucucccaggauggugaagggggaccugguacccagugauccccaccccaggauccuaaaucaugacuuaccugcuaauaaaaacucauuggaaaagugagaagaucuaaaaaaaaaaaaaaaaaaaaaaaaaaaaaaaaaaaaaaaaaaaaaaaaaaaaaaaaaaaaaaaaugcaucccccccccccccccccccccccccccccccaaaggcucuuuucagagccaccagaauu

SEQ ID NO: 13047 - RNA, 2031 nt, Artificial Sequence
  mRNA product Design e-6 comprising derived and/or modified sequence from HRSV(Memphis-37)__AIY60640.1__F-del_DSCav1 (opt5)
gggagagcggcucggccauuuugucccagucaguccggaggcugcggcugcagaaguaccgccugcggaguaacugcaaagaagcuuaccauggagcugcccauccucaagaccaacgccauuacaacgauccuggcugccgugacccuuugcuucgcgagcucccagaauauuacagaagaguuuuaccaaucuaccuguagcgcugucuccaaaggcuaucugucugcccucagaacagggugguacaccagcguuaucacaauugaacuguccaacaucaaggagaauaaaugcaacggaaccgacgccaaggugaaacuuaucaagcaggaacuggauaaguauaaaaaugcugugacggagcuccagcugcugaugcagucuaccccugccgcuaacaaucgggcccgcagagagcucccgcgguucaugaacuacacacugaauaacaccaagaauaacaaugucacacuuagcaaaaagcgcaaaagacgguuucugggcuuccuccugggggugggauccgcgauugccagcggcaucgcuguuuguaaggugcuucaccuggaaggggaggucaacaagauuaaaaaugcccuccugucuaccaacaaggcugugguuucccugagcaacggagugucuguccucacguuuaaagugcuggaccuuaagaauuauaucgauaaacaacugcuccccauucugaacaagcaguccugcagcaucucuaauauugaaacagugaucgaguuccagcagaaaaacaaucgccuucuggagaucaccagagaauuuuccgucaacgccggcguuacaaccccugugagcaccuacaugcucacaaauuccgagcugcugucucucauuaacgacaugcccaucacgaaugaucaaaagaagcugaugagcaacaaugugcagauuguccggcagcaguccuauagcaucauguguauuaucaaagaagaggugcuugcguacguugugcaacugccucucuacggcgucaucgacacccccugcuggaagcugcauacaucuccucuuuguaccacaaacaccaaagaaggguccaauauuugccugacgcgcacagauagaggaugguauugugacaacgccggcagcgugucuuucuuuccgcaggcugagaccugcaagguucagagcaaucggguguucugugauaccaugaacucccucacacugcccucugaggucaaccugugcaauaucgacauuuuuaacccuaaauacgauugcaagaucaugaccagcaagacagacguguccagcucugucauuacgucccucggggccaucgugagcuguuauggaaaaaccaagugcacagcuucuaauaaaaaccgcggcaucauuaagaccuucuccaaugggugugauuacguuagcaacaaaggaguggacacagucuccgugggcaauacccuguauuacguuaacaagcaagaaggcaagucucuuuaugugaaaggggagcccaucauuaauuuuuacgacccucuggucuuccccagcgaugaguucgacgccuccaucucucaggugaacgaaaagauuaaucagagccucgccuuuaucagaaaauccgaugaacugcugcacaacgugaauguuggaaagagcacgaccaacauuaugaucacaaccaucauuaucgucauuaucgugauucuucuccugcugaucgcugugggccucuuccuguacugcaaagcgcggugaggacuaguacuggcugcaucucccuuuccucuguccuccauccuucucccaggauggugaagggggaccugguacccagugauccccaccccaggauccuaaaucaugacuuaccugcuaauaaaaacucauuggaaaagugagaagaucuaaaaaaaaaaaaaaaaaaaaaaaaaaaaaaaaaaaaaaaaaaaaaaaaaaaaaaaaaaaaaaaaugcaucccccccccccccccccccccccccccccccaaaggcucuuuucagagccaccagaauu

SEQ ID NO: 13048 - RNA, 2031 nt, Artificial Sequence
  mRNA product Design e-6 comprising derived and/or modified sequence from HRSV(Memphis-37)__AIY60640.1__F-del_DSCav1 (opt6)
gggagagcggcucggccauuuugucccagucaguccggaggcugcggcugcagaaguaccgccugcggaguaacugcaaagaagcuuaccauggaauuaccaauccuuaaaacaaacgcaauaacaaccauccucgcagcaguaacucucugcuucgcuucaucucaaaacaucacagaagaauuuuaccaaagcacaugcucagcuguauccaaagguuaucuaucagccuugagaaccggaugguacacaucaguaauaacaauugaacuaucaaacauuaaagaaaacaaaugcaacggcaccgacgcaaaaguaaaacuaaucaaacaagaacuagacaaauauaaaaaugcaguaacagaauuacaauuauuaaugcaauccacaccagcugcaaacaaccgagcccgaagagaacuaccaagauucaugaacuacacacuaaacaacaccaaaaauaacaacgucacccuaucuaaaaaacguaaaagaagauucuuaggauuccucuuaggagucggauccgcaauagcaagcggcauagccguauguaaaguccuacacuuagaaggugaagugaauaaaauaaaaaacgcccuauuaagcacuaacaaagcaguagucucccuaucaaacggaguuucaguacucacauucaaaguacucgaccucaaaaacuacaucgacaaacaacuuuuaccaauucuaaacaaacaaucaugcuccauaucuaauaucgaaaccgucaucgaauuucaacaaaaaaacaauagacuacuagaaauaacuagagaauuuucaguaaacgccggcguuacgacaccagucucuacauacauguuaaccaauucagaacucuuaucauuaaucaacgacaugccaauaacaaacgaccaaaaaaaacuaauguccaauaacguacaaauagucagacaacaaucauacucaauuaugugcauaauaaaagaagaaguacuagcuuacguaguacaacucccccuauacggcguaauagacacuccauguuggaaauuacacacaucaccauuauguaccaccaauacaaaagaaggcucaaacauaugccuaacaagaacagauagaggaugguauugcgacaacgcaggcucaguuuccuuuuucccccaagcagaaaccugcaaaguacaaucaaaucguguuuuuugcgacaccaugaacucacucacauuaccaucagaaguaaaccuaugcaacauagacauauucaacccaaaauacgacugcaaaaucaugacaucaaaaacagacguauccucuucaguaauuacuagcuuaggagcaauagucucuuguuauggaaaaacaaaaugcacagccaguaacaaaaaccgcggaauaauaaaaaccuucucaaacgguugcgauuacgucucuaacaaaggagucgacacaguaucaguaggcaauacauuauacuacguuaacaaacaagaaggaaaaucuuuauacgucaaaggagaacccauuauaaacuuuuacgacccauuagucuucccuuccgacgaauuugacgccagcauuucacaaguaaacgaaaaaauaaaccaaucacucgcauuuauaagaaaaucugacgaauuacuccacaacguaaacguaggaaaauccacaacaaacauaaugauaacaaccauaaucaucgucauaauagucauacuucuccuauuaauugcaguaggcuuauuccuauacuguaaagcacgauaaggacuaguacuggcugcaucucccuuuccucuguccuccauccuucucccaggauggugaagggggaccugguacccagugauccccaccccaggauccuaaaucaugacuuaccugcuaauaaaaacucauuggaaaagugagaagaucuaaaaaaaaaaaaaaaaaaaaaaaaaaaaaaaaaaaaaaaaaaaaaaaaaaaaaaaaaaaaaaaaugcaucccccccccccccccccccccccccccccccaaaggcucuuuucagagccaccagaauu

SEQ ID NO: 13049 - RNA, 2031 nt, Artificial Sequence
  mRNA product Design e-6 comprising derived and/or modified sequence from HRSV(Memphis-37)__AIY60640.1__F-del_DSCav1 (opt11)
gggagagcggcucggccauuuugucccagucaguccggaggcugcggcugcagaaguaccgccugcggaguaacugcaaagaagcuuaccauggaacuaccaauccuaaaaacuaacgcaaucaccacaauccucgccgccgucacccuuugcuuugcguccucccaaaacauuacugaagaguucuaccaauccacgugcuccgccgucuccaaagguuaccuauccgcccuuaggaccggcugguacaccagcgucaucaccaucgaacuuuccaacaucaaagaaaacaaauguaacggcaccgacgcaaaagucaaacuuauuaaacaggaacucgacaaauauaagaaugccgucaccgaauuacaacuccucaugcaauccacccccgccgccaacaaccgagcaaggcgcgaacucccucgauucaugaauuacacccucaacaauaccaaaaacaacaacgucacccuauccaagaaacgcaaaagacgcuucuugggcuuccuccucggcgugggcuccgcaauagccuccgguauugccgugugcaaagucuuacaccucgaaggcgaggucaacaaaaucaaaaacgcccuccucuccaccaacaaagccgucgucagccuauccaacggcguuuccguccucaccuucaaaguacucgaccucaaaaacuacaucgacaaacaacuccuacccauacuaaacaaacaauccugcuccauuuccaacaucgaaaccguaaucgaguuccaacagaaaaacaaucgccuccuagaaaucacacgugaauuuucaguuaacgccggaguaacaacuccuguaucuaccuacaugcucaccaauuccgaacuccucagccucauaaacgacaugccaauaacaaacgaccaaaagaaacucaugucuaacaacguacaaaucgucagacaacaaaguuacucaaucauguguaucaucaaagaggaaguccuagcauacgugguccaacucccccucuacggaguaaucgacaccccaugcuggaaacuacacaccagcccccucuguaccacaaacacgaaagaagguuccaacaucugccugacccgaaccgaccgcggcugguacugcgauaacgcuggcuccgucucauucuucccccaagcagaaaccugcaaaguacaauccaaccgaguauucugcgacaccaugaacucacucacccuccccagcgaaguaaaccucugcaacaucgacauauucaacccaaaauacgacugcaaaauuaugaccucuaaaacagacguauccuccucuguaaucacaucccucggggccaucgucuccugcuacggcaaaaccaaaugcaccgccuccaacaaaaaccgcggaaucauaaaaaccuucuccaacggaugcgacuacgucucaaauaaaggcgucgacaccgucuccgucggcaacacgcuauacuacgucaacaaacaagaaggcaaaucacucuacgucaaaggugagcccaucaucaauuucuacgauccccucgucuucccaagcgacgaguucgacgccagcauaucccaaguaaacgagaaaaucaaccaaagccuggccuucauccgcaaauccgacgaacuacuacacaacguaaacguaggcaaguccacuaccaacauaaugaucaccacaaucaucauagucauaaucguuauacuacuccugcucaucgccguaggccucuuccucuauugcaaagcccgauagggacuaguacuggcugcaucucccuuuccucuguccuccauccuucucccaggauggugaagggggaccugguacccagugauccccaccccaggauccuaaaucaugacuuaccugcuaauaaaaacucauuggaaaagugagaagaucuaaaaaaaaaaaaaaaaaaaaaaaaaaaaaaaaaaaaaaaaaaaaaaaaaaaaaaaaaaaaaaaaugcaucccccccccccccccccccccccccccccccaaaggcucuuuucagagccaccagaauu

SEQ ID NO: 13050 - RNA, 2247 nt, Artificial Sequence
  mRNA product Design f-1 comprising derived and/or modified sequence from HRSV(Memphis-37)__AIY60640.1__F-del_DSCav1 (opt1)
gggagagcggcucggccauuuugucccagucaguccggaggcugcggcugcagaaguaccgccugcggaguaacugcaaagaagcuuaccauggagcugcccauccucaagaccaacgccaucaccacgauccuggccgcggugacccugugcuucgccagcucccagaacaucaccgaggaguucuaccagagcacgugcuccgccgucagcaagggcuaccucuccgcccugcgcaccgggugguacaccagcgugaucaccaucgagcuguccaacaucaaggagaacaagugcaacggcaccgacgccaaggugaagcucaucaagcaggagcuggacaaguacaagaacgcggucacggagcugcagcuccugaugcagagcaccccggccgccaacaaccgggcccgccgggagcugccccgcuucaugaacuacacccucaacaacaccaagaacaacaacgugacgcuguccaagaagcggaagcgccgguuccugggguuccuccugggcguggggagcgcgaucgccuccggcaucgccgucugcaaggugcugcaccucgagggcgaggugaacaagaucaagaacgcccugcuguccaccaacaaggccgucgugagccucuccaacggggugagcguccugaccuucaaggugcuggaccucaagaacuacaucgacaagcagcugcugcccauccugaacaagcagagcugcuccaucagcaacaucgagaccgucaucgaguuccagcagaagaacaaccgccuccuggagaucacgcgggaguucagcgugaacgcgggcgugaccacccccgucuccaccuacaugcugacgaacagcgagcuccugucccugaucaacgacaugccgaucaccaacgaccagaagaagcucaugagcaacaacgugcagaucgugcgccagcaguccuacagcaucaugugcaucaucaaggaggagguccuggccuacguggugcagcugccccucuacggggucaucgacacccccugcuggaagcugcacaccagcccccugugcacgaccaacaccaaggagggcuccaacaucugccucacccggacggaccgcgggugguacugcgacaacgccggcagcguguccuucuucccgcaggccgagaccugcaagguccagagcaaccggguguucugcgacaccaugaacucccugacccugcccagcgaggugaaccucugcaacaucgacaucuucaaccccaaguacgacugcaagaucaugacguccaagaccgacgucagcuccagcgugaucaccucccugggcgccaucgugagcugcuacgggaagaccaagugcacggcgagcaacaagaaccgcggcaucaucaagaccuucuccaacgggugcgacuacgucagcaacaagggcguggacaccguguccgucggcaacacccuguacuacgugaacaagcaggagggcaagagccucuacgugaagggggagcccaucaucaacuucuacgacccgcuggucuuccccuccgacgaguucgacgccagcaucucccaggugaacgagaagaucaaccagagccuggccuucauccggaaguccgacgagcuccugcacaacgugaacgucggcaagagcaccacgaacaucaugaucaccaccaucaucaucgugaucaucgugauccugcugcuccugaucgccgucgggcuguuccucuacugcaaggcccgcugaggacuagugaagggaacacccaaauuuaauucagccuuaagcacaauuaauuaagagugaaacguaauuguacaagcaguuggucacccaccauagggcaugaucaacaccgcaaccuuuccuuuuucccccagugauucugaaaaaccccucuucccuucagcuugcuuagauguuccaaauuuaguaagcuuaaggcggccuacagaagaaaaagaaaaaaaaggccacaaaaguucccucucacuuucaguaaauaaaauaaaagcagcaacagaaauaaagaaauaaaugaaauucaaaaugaaauaaauauuguguugugcagcauuaaaaaaucaauaaaaauuaaaaaugagcaagaucuaaaaaaaaaaaaaaaaaaaaaaaaaaaaaaaaaaaaaaaaaaaaaaaaaaaaaaaaaaaaaaaaugcaucccccccccccccccccccccccccccccccaaaggcucuuuucagagccaccagaauu

SEQ ID NO: 13051 - RNA, 2247 nt, Artificial Sequence
  mRNA product Design f-1 comprising derived and/or modified sequence from HRSV(Memphis-37)__AIY60640.1__F-del_DSCav1 (opt1)
gggagagcggcucggccauuuugucccagucaguccggaggcugcggcugcagaaguaccgccugcggaguaacugcaaagaagcuuaccauggagcugcccauccucaagaccaacgccaucaccacgauccuggccgcggugacccugugcuucgccagcucccagaacaucaccgaggaguucuaccagagcacgugcuccgccgucagcaagggcuaccucuccgcccugcgcaccgggugguacaccagcgugaucaccaucgagcuguccaacaucaaggagaacaagugcaacggcaccgacgccaaggugaagcucaucaagcaggagcuggacaaguacaagaacgcggucacggagcugcagcuccugaugcagagcaccccggccgccaacaaccgggcccgccgggagcugccccgcuucaugaacuacacccucaacaacaccaagaacaacaacgugacgcuguccaagaagcggaagcgccgguuccugggguuccuccugggcguggggagcgcgaucgccuccggcaucgccgucugcaaggugcugcaccucgagggcgaggugaacaagaucaagaacgcccugcugagcaccaacaaggccgucgugucccucagcaacgggguguccguccugaccuucaaggugcuggaccucaagaacuacaucgacaagcagcugcugcccauccucaacaagcagagcugcuccaucagcaacaucgagaccgugaucgaguuccagcagaagaacaaccgccugcuggagaucacgcgggaguucuccgucaacgcgggcgugaccacccccgugagcaccuacaugcucacgaacagcgagcugcugucccucaucaacgacaugccgaucaccaacgaccagaagaagcugaugagcaacaacguccagaucgugcgccagcaguccuacagcaucaugugcaucaucaaggaggaggugcuggccuacgucgugcagcucccccuguacggggugaucgacacccccugcuggaagcugcacaccagcccccucugcacgaccaacaccaaggagggcagcaacaucugccugacccggacggaccgcgggugguacugcgacaacgccggcuccgucagcuucuucccgcaggccgagaccugcaaggugcaguccaaccgggucuucugcgacaccaugaacagccugacccuccccuccgaggugaaccugugcaacaucgacaucuucaaccccaaguacgacugcaagaucaugacgagcaagaccgacguguccagcuccgucaucaccagccugggcgccaucguguccugcuacgggaagaccaagugcacggcgagcaacaagaaccgcggcaucaucaagaccuucuccaacgggugcgacuacgugagcaacaagggcgucgacaccgugagcgugggcaacacccucuacuacgucaacaagcaggaggggaagucccuguacgugaagggcgagcccaucaucaacuucuacgacccgcugguguuccccagcgacgaguucgacgccuccaucagccaggucaacgagaagaucaaccagucccucgccuucauccggaaguccgacgagcugcugcacaacgugaacguggggaaguccaccacgaacaucaugaucaccaccaucaucaucgucaucaucgugauccugcuccugcugaucgccgugggccucuuccuguacugcaaggcccgcugaggacuagugaagggaacacccaaauuuaauucagccuuaagcacaauuaauuaagagugaaacguaauuguacaagcaguuggucacccaccauagggcaugaucaacaccgcaaccuuuccuuuuucccccagugauucugaaaaaccccucuucccuucagcuugcuuagauguuccaaauuuaguaagcuuaaggcggccuacagaagaaaaagaaaaaaaaggccacaaaaguucccucucacuuucaguaaauaaaauaaaagcagcaacagaaauaaagaaauaaaugaaauucaaaaugaaauaaauauuguguugugcagcauuaaaaaaucaauaaaaauuaaaaaugagcaagaucuaaaaaaaaaaaaaaaaaaaaaaaaaaaaaaaaaaaaaaaaaaaaaaaaaaaaaaaaaaaaaaaaugcaucccccccccccccccccccccccccccccccaaaggcucuuuucagagccaccagaauu

SEQ ID NO: 13052 - RNA, 2247 nt, Artificial Sequence
  mRNA product Design f-1 comprising derived and/or modified sequence from HRSV(Memphis-37)__AIY60640.1__F-del_DSCav1 (opt2)
gggagagcggcucggccauuuugucccagucaguccggaggcugcggcugcagaaguaccgccugcggaguaacugcaaagaagcuuaccauggagcuccccauccucaagaccaacgccaucaccaccauccucgccgccgucacccucugcuucgccuccucccagaacaucaccgaggaguucuaccaguccaccugcuccgccgucuccaagggcuaccucuccgcccuccgcaccggcugguacaccuccgucaucaccaucgagcucuccaacaucaaggagaacaagugcaacggcaccgacgccaaggucaagcucaucaagcaggagcucgacaaguacaagaacgccgucaccgagcuccagcuccucaugcaguccacccccgccgccaacaaccgcgcccgccgcgagcucccccgcuucaugaacuacacccucaacaacaccaagaacaacaacgucacccucuccaagaagcgcaagcgccgcuuccucggcuuccuccucggcgucggcuccgccaucgccuccggcaucgccgucugcaagguccuccaccucgagggcgaggucaacaagaucaagaacgcccuccucuccaccaacaaggccgucgucucccucuccaacggcgucuccguccucaccuucaagguccucgaccucaagaacuacaucgacaagcagcuccuccccauccucaacaagcaguccugcuccaucuccaacaucgagaccgucaucgaguuccagcagaagaacaaccgccuccucgagaucacccgcgaguucuccgucaacgccggcgucaccacccccgucuccaccuacaugcucaccaacuccgagcuccucucccucaucaacgacaugcccaucaccaacgaccagaagaagcucauguccaacaacguccagaucguccgccagcaguccuacuccaucaugugcaucaucaaggaggagguccucgccuacgucguccagcucccccucuacggcgucaucgacacccccugcuggaagcuccacaccuccccccucugcaccaccaacaccaaggagggcuccaacaucugccucacccgcaccgaccgcggcugguacugcgacaacgccggcuccgucuccuucuucccccaggccgagaccugcaagguccaguccaaccgcgucuucugcgacaccaugaacucccucacccuccccuccgaggucaaccucugcaacaucgacaucuucaaccccaaguacgacugcaagaucaugaccuccaagaccgacgucuccuccuccgucaucaccucccucggcgccaucgucuccugcuacggcaagaccaagugcaccgccuccaacaagaaccgcggcaucaucaagaccuucuccaacggcugcgacuacgucuccaacaagggcgucgacaccgucuccgucggcaacacccucuacuacgucaacaagcaggagggcaagucccucuacgucaagggcgagcccaucaucaacuucuacgacccccucgucuuccccuccgacgaguucgacgccuccaucucccaggucaacgagaagaucaaccagucccucgccuucauccgcaaguccgacgagcuccuccacaacgucaacgucggcaaguccaccaccaacaucaugaucaccaccaucaucaucgucaucaucgucauccuccuccuccucaucgccgucggccucuuccucuacugcaaggcccgcugaggacuagugaagggaacacccaaauuuaauucagccuuaagcacaauuaauuaagagugaaacguaauuguacaagcaguuggucacccaccauagggcaugaucaacaccgcaaccuuuccuuuuucccccagugauucugaaaaaccccucuucccuucagcuugcuuagauguuccaaauuuaguaagcuuaaggcggccuacagaagaaaaagaaaaaaaaggccacaaaaguucccucucacuuucaguaaauaaaauaaaagcagcaacagaaauaaagaaauaaaugaaauucaaaaugaaauaaauauuguguugugcagcauuaaaaaaucaauaaaaauuaaaaaugagcaagaucuaaaaaaaaaaaaaaaaaaaaaaaaaaaaaaaaaaaaaaaaaaaaaaaaaaaaaaaaaaaaaaaaugcaucccccccccccccccccccccccccccccccaaaggcucuuuucagagccaccagaauu

SEQ ID NO: 13053 - RNA, 2247 nt, Artificial Sequence
  mRNA product Design f-1 comprising derived and/or modified sequence from HRSV(Memphis-37)__AIY60640.1__F-del_DSCav1 (opt3)
gggagagcggcucggccauuuugucccagucaguccggaggcugcggcugcagaaguaccgccugcggaguaacugcaaagaagcuuaccauggagcugcccauccucaagaccaacgccauuacaacuauacuugcugcagugacgcugugcuucgccagcucccagaauaucaccgaagaguuuuaccaaucuacauguucagcggucaguaaaggcuauuugagcgcuuuaagaacugggugguacaccuccguuauuacaaucgaacugucuaacauuaaggagaauaaaugcaacggaaccgacgccaaggugaaacuaaucaagcaggaacucgauaaguauaaaaaugcaguaacugagcugcagcuucugaugcagucgaccccugccgcuaacaauagggcacggcgcgaguugccacgauucaugaacuacacacucaauaacacgaagaauaacaaugugacucugagcaaaaagcguaaaagaagguuucuggguuuccucuuaggcgucgggucagccauagcuaguggaaucgccguguguaagguucugcaccuugaaggcgaggugaacaagauuaaaaaugcguugcuguccaccaacaaggcagucgugucucuaagcaacgguguauccguucucacauuuaaagugcuggaccuuaagaauuauaucgauaaacaacuguugccgauucucaacaagcagucaugcaguaucagcaauauagaaacugucauugaguuccagcagaaaaacaaucggcuguuagagaucacccgcgaauuuucugugaacgccggggugacaacccccgucuccacguacaugcugacuaauucagagcuccuuagccugauuaacgacaugccuaucacaaaugaucaaaagaaguugaugaguaacaauguucagaucgugagacagcagucuuauuccauuauguguauaaucaaagaagagguacuagcuuacgugguccaacugccacucuacggagugauugacacccccugcuggaagcugcauacuagcccucuuuguacaaccaacacgaaagaaggcucgaauaucugccugaccaggacagaucggggcugguauugugacaacgccgggucuguuuccuucuuuccacaggcagagacuugcaaggugcagucaaaucgcgucuucugugauaccaugaacaguuugacacuccccagcgaggugaaccugugcaauauagacauuuuuaacccuaaauacgauugcaagaucaugacuuccaagaccgacguaucuagcucaguuaucacaaguuuaggagcuauuguguccuguuaugguaaaaccaagugcacugccagcaauaaaaaccgaggcaucauuaagacguucucuaaugggugugauuacgucucaaacaaaggaguggacacagucagugugggcaauacccuguauuacguuaacaagcaagaagguaagagccuauaugugaaaggggagccaauaaucaauuuuuacgacccgcucguauuccccuccgaugaguucgacgcgucuauuucgcaggucaacgaaaagaucaaucagagccuggccuuuaucagaaaauccgaugaacuuuugcacaacgugaauguuggaaagucaacuaccaacauuaugauaacaaccaucauuaucgugauuaucgucauacugcuccugcuuaucgcagugggccuguucuuguacugcaaagcuaggugaggacuagugaagggaacacccaaauuuaauucagccuuaagcacaauuaauuaagagugaaacguaauuguacaagcaguuggucacccaccauagggcaugaucaacaccgcaaccuuuccuuuuucccccagugauucugaaaaaccccucuucccuucagcuugcuuagauguuccaaauuuaguaagcuuaaggcggccuacagaagaaaaagaaaaaaaaggccacaaaaguucccucucacuuucaguaaauaaaauaaaagcagcaacagaaauaaagaaauaaaugaaauucaaaaugaaauaaauauuguguugugcagcauuaaaaaaucaauaaaaauuaaaaaugagcaagaucuaaaaaaaaaaaaaaaaaaaaaaaaaaaaaaaaaaaaaaaaaaaaaaaaaaaaaaaaaaaaaaaaugcaucccccccccccccccccccccccccccccccaaaggcucuuuucagagccaccagaauu

SEQ ID NO: 13054 - RNA, 2247 nt, Artificial Sequence
  mRNA product Design f-1 comprising derived and/or modified sequence from HRSV(Memphis-37)__AIY60640.1__F-del_DSCav1 (opt4)
gggagagcggcucggccauuuugucccagucaguccggaggcugcggcugcagaaguaccgccugcggaguaacugcaaagaagcuuaccauggagcugcccauccugaagaccaacgccaucaccaccauccuggccgccgugacccugugcuucgccagcagccagaacaucaccgaggaguucuaccagagcaccugcagcgccgugagcaagggcuaccugagcgcccugagaaccggcugguacaccagcgugaucaccaucgagcugagcaacaucaaggagaacaagugcaacggcaccgacgccaaggugaagcugaucaagcaggagcuggacaaguacaagaacgccgugaccgagcugcagcugcugaugcagagcacccccgccgccaacaacagagccagaagagagcugcccagauucaugaacuacacccugaacaacaccaagaacaacaacgugacccugagcaagaagagaaagagaagauuccugggcuuccugcugggcgugggcagcgccaucgccagcggcaucgccgugugcaaggugcugcaccuggagggcgaggugaacaagaucaagaacgcccugcugagcaccaacaaggccguggugagccugagcaacggcgugagcgugcugaccuucaaggugcuggaccugaagaacuacaucgacaagcagcugcugcccauccugaacaagcagagcugcagcaucagcaacaucgagaccgugaucgaguuccagcagaagaacaacagacugcuggagaucaccagagaguucagcgugaacgccggcgugaccacccccgugagcaccuacaugcugaccaacagcgagcugcugagccugaucaacgacaugcccaucaccaacgaccagaagaagcugaugagcaacaacgugcagaucgugagacagcagagcuacagcaucaugugcaucaucaaggaggaggugcuggccuacguggugcagcugccccuguacggcgugaucgacacccccugcuggaagcugcacaccagcccccugugcaccaccaacaccaaggagggcagcaacaucugccugaccagaaccgacagaggcugguacugcgacaacgccggcagcgugagcuucuucccccaggccgagaccugcaaggugcagagcaacagaguguucugcgacaccaugaacagccugacccugcccagcgaggugaaccugugcaacaucgacaucuucaaccccaaguacgacugcaagaucaugaccagcaagaccgacgugagcagcagcgugaucaccagccugggcgccaucgugagcugcuacggcaagaccaagugcaccgccagcaacaagaacagaggcaucaucaagaccuucagcaacggcugcgacuacgugagcaacaagggcguggacaccgugagcgugggcaacacccuguacuacgugaacaagcaggagggcaagagccuguacgugaagggcgagcccaucaucaacuucuacgacccccugguguuccccagcgacgaguucgacgccagcaucagccaggugaacgagaagaucaaccagagccuggccuucaucagaaagagcgacgagcugcugcacaacgugaacgugggcaagagcaccaccaacaucaugaucaccaccaucaucaucgugaucaucgugauccugcugcugcugaucgccgugggccuguuccuguacugcaaggccagaugaggacuagugaagggaacacccaaauuuaauucagccuuaagcacaauuaauuaagagugaaacguaauuguacaagcaguuggucacccaccauagggcaugaucaacaccgcaaccuuuccuuuuucccccagugauucugaaaaaccccucuucccuucagcuugcuuagauguuccaaauuuaguaagcuuaaggcggccuacagaagaaaaagaaaaaaaaggccacaaaaguucccucucacuuucaguaaauaaaauaaaagcagcaacagaaauaaagaaauaaaugaaauucaaaaugaaauaaauauuguguugugcagcauuaaaaaaucaauaaaaauuaaaaaugagcaagaucuaaaaaaaaaaaaaaaaaaaaaaaaaaaaaaaaaaaaaaaaaaaaaaaaaaaaaaaaaaaaaaaaugcaucccccccccccccccccccccccccccccccaaaggcucuuuucagagccaccagaauu

SEQ ID NO: 13055 - RNA, 2247 nt, Artificial Sequence
  mRNA product Design f-1 comprising derived and/or modified sequence from HRSV(Memphis-37)__AIY60640.1__F-del_DSCav1 (opt5)
gggagagcggcucggccauuuugucccagucaguccggaggcugcggcugcagaaguaccgccugcggaguaacugcaaagaagcuuaccauggagcugcccauccucaagaccaacgccauuacaacgauccuggcugccgugacccuuugcuucgcgagcucccagaauauuacagaagaguuuuaccaaucuaccuguagcgcugucuccaaaggcuaucugucugcccucagaacagggugguacaccagcguuaucacaauugaacuguccaacaucaaggagaauaaaugcaacggaaccgacgccaaggugaaacuuaucaagcaggaacuggauaaguauaaaaaugcugugacggagcuccagcugcugaugcagucuaccccugccgcuaacaaucgggcccgcagagagcucccgcgguucaugaacuacacacugaauaacaccaagaauaacaaugucacacuuagcaaaaagcgcaaaagacgguuucugggcuuccuccugggggugggauccgcgauugccagcggcaucgcuguuuguaaggugcuucaccuggaaggggaggucaacaagauuaaaaaugcccuccugucuaccaacaaggcugugguuucccugagcaacggagugucuguccucacguuuaaagugcuggaccuuaagaauuauaucgauaaacaacugcuccccauucugaacaagcaguccugcagcaucucuaauauugaaacagugaucgaguuccagcagaaaaacaaucgccuucuggagaucaccagagaauuuuccgucaacgccggcguuacaaccccugugagcaccuacaugcucacaaauuccgagcugcugucucucauuaacgacaugcccaucacgaaugaucaaaagaagcugaugagcaacaaugugcagauuguccggcagcaguccuauagcaucauguguauuaucaaagaagaggugcuugcguacguugugcaacugccucucuacggcgucaucgacacccccugcuggaagcugcauacaucuccucuuuguaccacaaacaccaaagaaggguccaauauuugccugacgcgcacagauagaggaugguauugugacaacgccggcagcgugucuuucuuuccgcaggcugagaccugcaagguucagagcaaucggguguucugugauaccaugaacucccucacacugcccucugaggucaaccugugcaauaucgacauuuuuaacccuaaauacgauugcaagaucaugaccagcaagacagacguguccagcucugucauuacgucccucggggccaucgugagcuguuauggaaaaaccaagugcacagcuucuaauaaaaaccgcggcaucauuaagaccuucuccaaugggugugauuacguuagcaacaaaggaguggacacagucuccgugggcaauacccuguauuacguuaacaagcaagaaggcaagucucuuuaugugaaaggggagcccaucauuaauuuuuacgacccucuggucuuccccagcgaugaguucgacgccuccaucucucaggugaacgaaaagauuaaucagagccucgccuuuaucagaaaauccgaugaacugcugcacaacgugaauguuggaaagagcacgaccaacauuaugaucacaaccaucauuaucgucauuaucgugauucuucuccugcugaucgcugugggccucuuccuguacugcaaagcgcggugaggacuagugaagggaacacccaaauuuaauucagccuuaagcacaauuaauuaagagugaaacguaauuguacaagcaguuggucacccaccauagggcaugaucaacaccgcaaccuuuccuuuuucccccagugauucugaaaaaccccucuucccuucagcuugcuuagauguuccaaauuuaguaagcuuaaggcggccuacagaagaaaaagaaaaaaaaggccacaaaaguucccucucacuuucaguaaauaaaauaaaagcagcaacagaaauaaagaaauaaaugaaauucaaaaugaaauaaauauuguguugugcagcauuaaaaaaucaauaaaaauuaaaaaugagcaagaucuaaaaaaaaaaaaaaaaaaaaaaaaaaaaaaaaaaaaaaaaaaaaaaaaaaaaaaaaaaaaaaaaugcaucccccccccccccccccccccccccccccccaaaggcucuuuucagagccaccagaauu

SEQ ID NO: 13056 - RNA, 2247 nt, Artificial Sequence
  mRNA product Design f-1 comprising derived and/or modified sequence from HRSV(Memphis-37)__AIY60640.1__F-del_DSCav1 (opt6)
gggagagcggcucggccauuuugucccagucaguccggaggcugcggcugcagaaguaccgccugcggaguaacugcaaagaagcuuaccauggaauuaccaauccuuaaaacaaacgcaauaacaaccauccucgcagcaguaacucucugcuucgcuucaucucaaaacaucacagaagaauuuuaccaaagcacaugcucagcuguauccaaagguuaucuaucagccuugagaaccggaugguacacaucaguaauaacaauugaacuaucaaacauuaaagaaaacaaaugcaacggcaccgacgcaaaaguaaaacuaaucaaacaagaacuagacaaauauaaaaaugcaguaacagaauuacaauuauuaaugcaauccacaccagcugcaaacaaccgagcccgaagagaacuaccaagauucaugaacuacacacuaaacaacaccaaaaauaacaacgucacccuaucuaaaaaacguaaaagaagauucuuaggauuccucuuaggagucggauccgcaauagcaagcggcauagccguauguaaaguccuacacuuagaaggugaagugaauaaaauaaaaaacgcccuauuaagcacuaacaaagcaguagucucccuaucaaacggaguuucaguacucacauucaaaguacucgaccucaaaaacuacaucgacaaacaacuuuuaccaauucuaaacaaacaaucaugcuccauaucuaauaucgaaaccgucaucgaauuucaacaaaaaaacaauagacuacuagaaauaacuagagaauuuucaguaaacgccggcguuacgacaccagucucuacauacauguuaaccaauucagaacucuuaucauuaaucaacgacaugccaauaacaaacgaccaaaaaaaacuaauguccaauaacguacaaauagucagacaacaaucauacucaauuaugugcauaauaaaagaagaaguacuagcuuacguaguacaacucccccuauacggcguaauagacacuccauguuggaaauuacacacaucaccauuauguaccaccaauacaaaagaaggcucaaacauaugccuaacaagaacagauagaggaugguauugcgacaacgcaggcucaguuuccuuuuucccccaagcagaaaccugcaaaguacaaucaaaucguguuuuuugcgacaccaugaacucacucacauuaccaucagaaguaaaccuaugcaacauagacauauucaacccaaaauacgacugcaaaaucaugacaucaaaaacagacguauccucuucaguaauuacuagcuuaggagcaauagucucuuguuauggaaaaacaaaaugcacagccaguaacaaaaaccgcggaauaauaaaaaccuucucaaacgguugcgauuacgucucuaacaaaggagucgacacaguaucaguaggcaauacauuauacuacguuaacaaacaagaaggaaaaucuuuauacgucaaaggagaacccauuauaaacuuuuacgacccauuagucuucccuuccgacgaauuugacgccagcauuucacaaguaaacgaaaaaauaaaccaaucacucgcauuuauaagaaaaucugacgaauuacuccacaacguaaacguaggaaaauccacaacaaacauaaugauaacaaccauaaucaucgucauaauagucauacuucuccuauuaauugcaguaggcuuauuccuauacuguaaagcacgauaaggacuagugaagggaacacccaaauuuaauucagccuuaagcacaauuaauuaagagugaaacguaauuguacaagcaguuggucacccaccauagggcaugaucaacaccgcaaccuuuccuuuuucccccagugauucugaaaaaccccucuucccuucagcuugcuuagauguuccaaauuuaguaagcuuaaggcggccuacagaagaaaaagaaaaaaaaggccacaaaaguucccucucacuuucaguaaauaaaauaaaagcagcaacagaaauaaagaaauaaaugaaauucaaaaugaaauaaauauuguguugugcagcauuaaaaaaucaauaaaaauuaaaaaugagcaagaucuaaaaaaaaaaaaaaaaaaaaaaaaaaaaaaaaaaaaaaaaaaaaaaaaaaaaaaaaaaaaaaaaugcaucccccccccccccccccccccccccccccccaaaggcucuuuucagagccaccagaauu

SEQ ID NO: 13057 - RNA, 2247 nt, Artificial Sequence
  mRNA product Design f-1 comprising derived and/or modified sequence from HRSV(Memphis-37)__AIY60640.1__F-del_DSCav1 (opt11)
gggagagcggcucggccauuuugucccagucaguccggaggcugcggcugcagaaguaccgccugcggaguaacugcaaagaagcuuaccauggaacuaccaauccuaaaaacuaacgcaaucaccacaauccucgccgccgucacccuuugcuuugcguccucccaaaacauuacugaagaguucuaccaauccacgugcuccgccgucuccaaagguuaccuauccgcccuuaggaccggcugguacaccagcgucaucaccaucgaacuuuccaacaucaaagaaaacaaauguaacggcaccgacgcaaaagucaaacuuauuaaacaggaacucgacaaauauaagaaugccgucaccgaauuacaacuccucaugcaauccacccccgccgccaacaaccgagcaaggcgcgaacucccucgauucaugaauuacacccucaacaauaccaaaaacaacaacgucacccuauccaagaaacgcaaaagacgcuucuugggcuuccuccucggcgugggcuccgcaauagccuccgguauugccgugugcaaagucuuacaccucgaaggcgaggucaacaaaaucaaaaacgcccuccucuccaccaacaaagccgucgucagccuauccaacggcguuuccguccucaccuucaaaguacucgaccucaaaaacuacaucgacaaacaacuccuacccauacuaaacaaacaauccugcuccauuuccaacaucgaaaccguaaucgaguuccaacagaaaaacaaucgccuccuagaaaucacacgugaauuuucaguuaacgccggaguaacaacuccuguaucuaccuacaugcucaccaauuccgaacuccucagccucauaaacgacaugccaauaacaaacgaccaaaagaaacucaugucuaacaacguacaaaucgucagacaacaaaguuacucaaucauguguaucaucaaagaggaaguccuagcauacgugguccaacucccccucuacggaguaaucgacaccccaugcuggaaacuacacaccagcccccucuguaccacaaacacgaaagaagguuccaacaucugccugacccgaaccgaccgcggcugguacugcgauaacgcuggcuccgucucauucuucccccaagcagaaaccugcaaaguacaauccaaccgaguauucugcgacaccaugaacucacucacccuccccagcgaaguaaaccucugcaacaucgacauauucaacccaaaauacgacugcaaaauuaugaccucuaaaacagacguauccuccucuguaaucacaucccucggggccaucgucuccugcuacggcaaaaccaaaugcaccgccuccaacaaaaaccgcggaaucauaaaaaccuucuccaacggaugcgacuacgucucaaauaaaggcgucgacaccgucuccgucggcaacacgcuauacuacgucaacaaacaagaaggcaaaucacucuacgucaaaggugagcccaucaucaauuucuacgauccccucgucuucccaagcgacgaguucgacgccagcauaucccaaguaaacgagaaaaucaaccaaagccuggccuucauccgcaaauccgacgaacuacuacacaacguaaacguaggcaaguccacuaccaacauaaugaucaccacaaucaucauagucauaaucguuauacuacuccugcucaucgccguaggccucuuccucuauugcaaagcccgauagggacuagugaagggaacacccaaauuuaauucagccuuaagcacaauuaauuaagagugaaacguaauuguacaagcaguuggucacccaccauagggcaugaucaacaccgcaaccuuuccuuuuucccccagugauucugaaaaaccccucuucccuucagcuugcuuagauguuccaaauuuaguaagcuuaaggcggccuacagaagaaaaagaaaaaaaaggccacaaaaguucccucucacuuucaguaaauaaaauaaaagcagcaacagaaauaaagaaauaaaugaaauucaaaaugaaauaaauauuguguugugcagcauuaaaaaaucaauaaaaauuaaaaaugagcaagaucuaaaaaaaaaaaaaaaaaaaaaaaaaaaaaaaaaaaaaaaaaaaaaaaaaaaaaaaaaaaaaaaaugcaucccccccccccccccccccccccccccccccaaaggcucuuuucagagccaccagaauu

SEQ ID NO: 13058 - RNA, 2027 nt, Artificial Sequence
  mRNA product Design f-2 comprising derived and/or modified sequence from HRSV(Memphis-37)__AIY60640.1__F-del_DSCav1 (opt1)
gggagagcggcucggccauuuugucccagucaguccggaggcugcggcugcagaaguaccgccugcggaguaacugcaaagaagcuuaccauggagcugcccauccucaagaccaacgccaucaccacgauccuggccgcggugacccugugcuucgccagcucccagaacaucaccgaggaguucuaccagagcacgugcuccgccgucagcaagggcuaccucuccgcccugcgcaccgggugguacaccagcgugaucaccaucgagcuguccaacaucaaggagaacaagugcaacggcaccgacgccaaggugaagcucaucaagcaggagcuggacaaguacaagaacgcggucacggagcugcagcuccugaugcagagcaccccggccgccaacaaccgggcccgccgggagcugccccgcuucaugaacuacacccucaacaacaccaagaacaacaacgugacgcuguccaagaagcggaagcgccgguuccugggguuccuccugggcguggggagcgcgaucgccuccggcaucgccgucugcaaggugcugcaccucgagggcgaggugaacaagaucaagaacgcccugcuguccaccaacaaggccgucgugagccucuccaacggggugagcguccugaccuucaaggugcuggaccucaagaacuacaucgacaagcagcugcugcccauccugaacaagcagagcugcuccaucagcaacaucgagaccgucaucgaguuccagcagaagaacaaccgccuccuggagaucacgcgggaguucagcgugaacgcgggcgugaccacccccgucuccaccuacaugcugacgaacagcgagcuccugucccugaucaacgacaugccgaucaccaacgaccagaagaagcucaugagcaacaacgugcagaucgugcgccagcaguccuacagcaucaugugcaucaucaaggaggagguccuggccuacguggugcagcugccccucuacggggucaucgacacccccugcuggaagcugcacaccagcccccugugcacgaccaacaccaaggagggcuccaacaucugccucacccggacggaccgcgggugguacugcgacaacgccggcagcguguccuucuucccgcaggccgagaccugcaagguccagagcaaccggguguucugcgacaccaugaacucccugacccugcccagcgaggugaaccucugcaacaucgacaucuucaaccccaaguacgacugcaagaucaugacguccaagaccgacgucagcuccagcgugaucaccucccugggcgccaucgugagcugcuacgggaagaccaagugcacggcgagcaacaagaaccgcggcaucaucaagaccuucuccaacgggugcgacuacgucagcaacaagggcguggacaccguguccgucggcaacacccuguacuacgugaacaagcaggagggcaagagccucuacgugaagggggagcccaucaucaacuucuacgacccgcuggucuuccccuccgacgaguucgacgccagcaucucccaggugaacgagaagaucaaccagagccuggccuucauccggaaguccgacgagcuccugcacaacgugaacgucggcaagagcaccacgaacaucaugaucaccaccaucaucaucgugaucaucgugauccugcugcuccugaucgccgucgggcuguuccucuacugcaaggcccgcugaggacuaguggaagcauuuuccuggcugauuaaaagaaauuacucagcuauggucaucuguuccuguuagaaggcuaugcagcauauuauauacuaugcgcauguuaugaaaugcauaauaaaaaauuuuaaaaaaucuaaaagaucuaaaaaaaaaaaaaaaaaaaaaaaaaaaaaaaaaaaaaaaaaaaaaaaaaaaaaaaaaaaaaaaaugcaucccccccccccccccccccccccccccccccaaaggcucuuuucagagccaccagaauu

SEQ ID NO: 13059 - RNA, 2027 nt, Artificial Sequence
  mRNA product Design f-2 comprising derived and/or modified sequence from HRSV(Memphis-37)__AIY60640.1__F-del_DSCav1 (opt1)
gggagagcggcucggccauuuugucccagucaguccggaggcugcggcugcagaaguaccgccugcggaguaacugcaaagaagcuuaccauggagcugcccauccucaagaccaacgccaucaccacgauccuggccgcggugacccugugcuucgccagcucccagaacaucaccgaggaguucuaccagagcacgugcuccgccgucagcaagggcuaccucuccgcccugcgcaccgggugguacaccagcgugaucaccaucgagcuguccaacaucaaggagaacaagugcaacggcaccgacgccaaggugaagcucaucaagcaggagcuggacaaguacaagaacgcggucacggagcugcagcuccugaugcagagcaccccggccgccaacaaccgggcccgccgggagcugccccgcuucaugaacuacacccucaacaacaccaagaacaacaacgugacgcuguccaagaagcggaagcgccgguuccugggguuccuccugggcguggggagcgcgaucgccuccggcaucgccgucugcaaggugcugcaccucgagggcgaggugaacaagaucaagaacgcccugcugagcaccaacaaggccgucgugucccucagcaacgggguguccguccugaccuucaaggugcuggaccucaagaacuacaucgacaagcagcugcugcccauccucaacaagcagagcugcuccaucagcaacaucgagaccgugaucgaguuccagcagaagaacaaccgccugcuggagaucacgcgggaguucuccgucaacgcgggcgugaccacccccgugagcaccuacaugcucacgaacagcgagcugcugucccucaucaacgacaugccgaucaccaacgaccagaagaagcugaugagcaacaacguccagaucgugcgccagcaguccuacagcaucaugugcaucaucaaggaggaggugcuggccuacgucgugcagcucccccuguacggggugaucgacacccccugcuggaagcugcacaccagcccccucugcacgaccaacaccaaggagggcagcaacaucugccugacccggacggaccgcgggugguacugcgacaacgccggcuccgucagcuucuucccgcaggccgagaccugcaaggugcaguccaaccgggucuucugcgacaccaugaacagccugacccuccccuccgaggugaaccugugcaacaucgacaucuucaaccccaaguacgacugcaagaucaugacgagcaagaccgacguguccagcuccgucaucaccagccugggcgccaucguguccugcuacgggaagaccaagugcacggcgagcaacaagaaccgcggcaucaucaagaccuucuccaacgggugcgacuacgugagcaacaagggcgucgacaccgugagcgugggcaacacccucuacuacgucaacaagcaggaggggaagucccuguacgugaagggcgagcccaucaucaacuucuacgacccgcugguguuccccagcgacgaguucgacgccuccaucagccaggucaacgagaagaucaaccagucccucgccuucauccggaaguccgacgagcugcugcacaacgugaacguggggaaguccaccacgaacaucaugaucaccaccaucaucaucgucaucaucgugauccugcuccugcugaucgccgugggccucuuccuguacugcaaggcccgcugaggacuaguggaagcauuuuccuggcugauuaaaagaaauuacucagcuauggucaucuguuccuguuagaaggcuaugcagcauauuauauacuaugcgcauguuaugaaaugcauaauaaaaaauuuuaaaaaaucuaaaagaucuaaaaaaaaaaaaaaaaaaaaaaaaaaaaaaaaaaaaaaaaaaaaaaaaaaaaaaaaaaaaaaaaugcaucccccccccccccccccccccccccccccccaaaggcucuuuucagagccaccagaauu

SEQ ID NO: 13060 - RNA, 2027 nt, Artificial Sequence
  mRNA product Design f-2 comprising derived and/or modified sequence from HRSV(Memphis-37)__AIY60640.1__F-del_DSCav1 (opt2)
gggagagcggcucggccauuuugucccagucaguccggaggcugcggcugcagaaguaccgccugcggaguaacugcaaagaagcuuaccauggagcuccccauccucaagaccaacgccaucaccaccauccucgccgccgucacccucugcuucgccuccucccagaacaucaccgaggaguucuaccaguccaccugcuccgccgucuccaagggcuaccucuccgcccuccgcaccggcugguacaccuccgucaucaccaucgagcucuccaacaucaaggagaacaagugcaacggcaccgacgccaaggucaagcucaucaagcaggagcucgacaaguacaagaacgccgucaccgagcuccagcuccucaugcaguccacccccgccgccaacaaccgcgcccgccgcgagcucccccgcuucaugaacuacacccucaacaacaccaagaacaacaacgucacccucuccaagaagcgcaagcgccgcuuccucggcuuccuccucggcgucggcuccgccaucgccuccggcaucgccgucugcaagguccuccaccucgagggcgaggucaacaagaucaagaacgcccuccucuccaccaacaaggccgucgucucccucuccaacggcgucuccguccucaccuucaagguccucgaccucaagaacuacaucgacaagcagcuccuccccauccucaacaagcaguccugcuccaucuccaacaucgagaccgucaucgaguuccagcagaagaacaaccgccuccucgagaucacccgcgaguucuccgucaacgccggcgucaccacccccgucuccaccuacaugcucaccaacuccgagcuccucucccucaucaacgacaugcccaucaccaacgaccagaagaagcucauguccaacaacguccagaucguccgccagcaguccuacuccaucaugugcaucaucaaggaggagguccucgccuacgucguccagcucccccucuacggcgucaucgacacccccugcuggaagcuccacaccuccccccucugcaccaccaacaccaaggagggcuccaacaucugccucacccgcaccgaccgcggcugguacugcgacaacgccggcuccgucuccuucuucccccaggccgagaccugcaagguccaguccaaccgcgucuucugcgacaccaugaacucccucacccuccccuccgaggucaaccucugcaacaucgacaucuucaaccccaaguacgacugcaagaucaugaccuccaagaccgacgucuccuccuccgucaucaccucccucggcgccaucgucuccugcuacggcaagaccaagugcaccgccuccaacaagaaccgcggcaucaucaagaccuucuccaacggcugcgacuacgucuccaacaagggcgucgacaccgucuccgucggcaacacccucuacuacgucaacaagcaggagggcaagucccucuacgucaagggcgagcccaucaucaacuucuacgacccccucgucuuccccuccgacgaguucgacgccuccaucucccaggucaacgagaagaucaaccagucccucgccuucauccgcaaguccgacgagcuccuccacaacgucaacgucggcaaguccaccaccaacaucaugaucaccaccaucaucaucgucaucaucgucauccuccuccuccucaucgccgucggccucuuccucuacugcaaggcccgcugaggacuaguggaagcauuuuccuggcugauuaaaagaaauuacucagcuauggucaucuguuccuguuagaaggcuaugcagcauauuauauacuaugcgcauguuaugaaaugcauaauaaaaaauuuuaaaaaaucuaaaagaucuaaaaaaaaaaaaaaaaaaaaaaaaaaaaaaaaaaaaaaaaaaaaaaaaaaaaaaaaaaaaaaaaugcaucccccccccccccccccccccccccccccccaaaggcucuuuucagagccaccagaauu

SEQ ID NO: 13061 - RNA, 2027 nt, Artificial Sequence
  mRNA product Design f-2 comprising derived and/or modified sequence from HRSV(Memphis-37)__AIY60640.1__F-del_DSCav1 (opt3)
gggagagcggcucggccauuuugucccagucaguccggaggcugcggcugcagaaguaccgccugcggaguaacugcaaagaagcuuaccauggagcugcccauccucaagaccaacgccauuacaacuauacuugcugcagugacgcugugcuucgccagcucccagaauaucaccgaagaguuuuaccaaucuacauguucagcggucaguaaaggcuauuugagcgcuuuaagaacugggugguacaccuccguuauuacaaucgaacugucuaacauuaaggagaauaaaugcaacggaaccgacgccaaggugaaacuaaucaagcaggaacucgauaaguauaaaaaugcaguaacugagcugcagcuucugaugcagucgaccccugccgcuaacaauagggcacggcgcgaguugccacgauucaugaacuacacacucaauaacacgaagaauaacaaugugacucugagcaaaaagcguaaaagaagguuucuggguuuccucuuaggcgucgggucagccauagcuaguggaaucgccguguguaagguucugcaccuugaaggcgaggugaacaagauuaaaaaugcguugcuguccaccaacaaggcagucgugucucuaagcaacgguguauccguucucacauuuaaagugcuggaccuuaagaauuauaucgauaaacaacuguugccgauucucaacaagcagucaugcaguaucagcaauauagaaacugucauugaguuccagcagaaaaacaaucggcuguuagagaucacccgcgaauuuucugugaacgccggggugacaacccccgucuccacguacaugcugacuaauucagagcuccuuagccugauuaacgacaugccuaucacaaaugaucaaaagaaguugaugaguaacaauguucagaucgugagacagcagucuuauuccauuauguguauaaucaaagaagagguacuagcuuacgugguccaacugccacucuacggagugauugacacccccugcuggaagcugcauacuagcccucuuuguacaaccaacacgaaagaaggcucgaauaucugccugaccaggacagaucggggcugguauugugacaacgccgggucuguuuccuucuuuccacaggcagagacuugcaaggugcagucaaaucgcgucuucugugauaccaugaacaguuugacacuccccagcgaggugaaccugugcaauauagacauuuuuaacccuaaauacgauugcaagaucaugacuuccaagaccgacguaucuagcucaguuaucacaaguuuaggagcuauuguguccuguuaugguaaaaccaagugcacugccagcaauaaaaaccgaggcaucauuaagacguucucuaaugggugugauuacgucucaaacaaaggaguggacacagucagugugggcaauacccuguauuacguuaacaagcaagaagguaagagccuauaugugaaaggggagccaauaaucaauuuuuacgacccgcucguauuccccuccgaugaguucgacgcgucuauuucgcaggucaacgaaaagaucaaucagagccuggccuuuaucagaaaauccgaugaacuuuugcacaacgugaauguuggaaagucaacuaccaacauuaugauaacaaccaucauuaucgugauuaucgucauacugcuccugcuuaucgcagugggccuguucuuguacugcaaagcuaggugaggacuaguggaagcauuuuccuggcugauuaaaagaaauuacucagcuauggucaucuguuccuguuagaaggcuaugcagcauauuauauacuaugcgcauguuaugaaaugcauaauaaaaaauuuuaaaaaaucuaaaagaucuaaaaaaaaaaaaaaaaaaaaaaaaaaaaaaaaaaaaaaaaaaaaaaaaaaaaaaaaaaaaaaaaugcaucccccccccccccccccccccccccccccccaaaggcucuuuucagagccaccagaauu

SEQ ID NO: 13062 - RNA, 2027 nt, Artificial Sequence
  mRNA product Design f-2 comprising derived and/or modified sequence from HRSV(Memphis-37)__AIY60640.1__F-del_DSCav1 (opt4)
gggagagcggcucggccauuuugucccagucaguccggaggcugcggcugcagaaguaccgccugcggaguaacugcaaagaagcuuaccauggagcugcccauccugaagaccaacgccaucaccaccauccuggccgccgugacccugugcuucgccagcagccagaacaucaccgaggaguucuaccagagcaccugcagcgccgugagcaagggcuaccugagcgcccugagaaccggcugguacaccagcgugaucaccaucgagcugagcaacaucaaggagaacaagugcaacggcaccgacgccaaggugaagcugaucaagcaggagcuggacaaguacaagaacgccgugaccgagcugcagcugcugaugcagagcacccccgccgccaacaacagagccagaagagagcugcccagauucaugaacuacacccugaacaacaccaagaacaacaacgugacccugagcaagaagagaaagagaagauuccugggcuuccugcugggcgugggcagcgccaucgccagcggcaucgccgugugcaaggugcugcaccuggagggcgaggugaacaagaucaagaacgcccugcugagcaccaacaaggccguggugagccugagcaacggcgugagcgugcugaccuucaaggugcuggaccugaagaacuacaucgacaagcagcugcugcccauccugaacaagcagagcugcagcaucagcaacaucgagaccgugaucgaguuccagcagaagaacaacagacugcuggagaucaccagagaguucagcgugaacgccggcgugaccacccccgugagcaccuacaugcugaccaacagcgagcugcugagccugaucaacgacaugcccaucaccaacgaccagaagaagcugaugagcaacaacgugcagaucgugagacagcagagcuacagcaucaugugcaucaucaaggaggaggugcuggccuacguggugcagcugccccuguacggcgugaucgacacccccugcuggaagcugcacaccagcccccugugcaccaccaacaccaaggagggcagcaacaucugccugaccagaaccgacagaggcugguacugcgacaacgccggcagcgugagcuucuucccccaggccgagaccugcaaggugcagagcaacagaguguucugcgacaccaugaacagccugacccugcccagcgaggugaaccugugcaacaucgacaucuucaaccccaaguacgacugcaagaucaugaccagcaagaccgacgugagcagcagcgugaucaccagccugggcgccaucgugagcugcuacggcaagaccaagugcaccgccagcaacaagaacagaggcaucaucaagaccuucagcaacggcugcgacuacgugagcaacaagggcguggacaccgugagcgugggcaacacccuguacuacgugaacaagcaggagggcaagagccuguacgugaagggcgagcccaucaucaacuucuacgacccccugguguuccccagcgacgaguucgacgccagcaucagccaggugaacgagaagaucaaccagagccuggccuucaucagaaagagcgacgagcugcugcacaacgugaacgugggcaagagcaccaccaacaucaugaucaccaccaucaucaucgugaucaucgugauccugcugcugcugaucgccgugggccuguuccuguacugcaaggccagaugaggacuaguggaagcauuuuccuggcugauuaaaagaaauuacucagcuauggucaucuguuccuguuagaaggcuaugcagcauauuauauacuaugcgcauguuaugaaaugcauaauaaaaaauuuuaaaaaaucuaaaagaucuaaaaaaaaaaaaaaaaaaaaaaaaaaaaaaaaaaaaaaaaaaaaaaaaaaaaaaaaaaaaaaaaugcaucccccccccccccccccccccccccccccccaaaggcucuuuucagagccaccagaauu

SEQ ID NO: 13063 - RNA, 2027 nt, Artificial Sequence
  mRNA product Design f-2 comprising derived and/or modified sequence from HRSV(Memphis-37)__AIY60640.1__F-del_DSCav1 (opt5)
gggagagcggcucggccauuuugucccagucaguccggaggcugcggcugcagaaguaccgccugcggaguaacugcaaagaagcuuaccauggagcugcccauccucaagaccaacgccauuacaacgauccuggcugccgugacccuuugcuucgcgagcucccagaauauuacagaagaguuuuaccaaucuaccuguagcgcugucuccaaaggcuaucugucugcccucagaacagggugguacaccagcguuaucacaauugaacuguccaacaucaaggagaauaaaugcaacggaaccgacgccaaggugaaacuuaucaagcaggaacuggauaaguauaaaaaugcugugacggagcuccagcugcugaugcagucuaccccugccgcuaacaaucgggcccgcagagagcucccgcgguucaugaacuacacacugaauaacaccaagaauaacaaugucacacuuagcaaaaagcgcaaaagacgguuucugggcuuccuccugggggugggauccgcgauugccagcggcaucgcuguuuguaaggugcuucaccuggaaggggaggucaacaagauuaaaaaugcccuccugucuaccaacaaggcugugguuucccugagcaacggagugucuguccucacguuuaaagugcuggaccuuaagaauuauaucgauaaacaacugcuccccauucugaacaagcaguccugcagcaucucuaauauugaaacagugaucgaguuccagcagaaaaacaaucgccuucuggagaucaccagagaauuuuccgucaacgccggcguuacaaccccugugagcaccuacaugcucacaaauuccgagcugcugucucucauuaacgacaugcccaucacgaaugaucaaaagaagcugaugagcaacaaugugcagauuguccggcagcaguccuauagcaucauguguauuaucaaagaagaggugcuugcguacguugugcaacugccucucuacggcgucaucgacacccccugcuggaagcugcauacaucuccucuuuguaccacaaacaccaaagaaggguccaauauuugccugacgcgcacagauagaggaugguauugugacaacgccggcagcgugucuuucuuuccgcaggcugagaccugcaagguucagagcaaucggguguucugugauaccaugaacucccucacacugcccucugaggucaaccugugcaauaucgacauuuuuaacccuaaauacgauugcaagaucaugaccagcaagacagacguguccagcucugucauuacgucccucggggccaucgugagcuguuauggaaaaaccaagugcacagcuucuaauaaaaaccgcggcaucauuaagaccuucuccaaugggugugauuacguuagcaacaaaggaguggacacagucuccgugggcaauacccuguauuacguuaacaagcaagaaggcaagucucuuuaugugaaaggggagcccaucauuaauuuuuacgacccucuggucuuccccagcgaugaguucgacgccuccaucucucaggugaacgaaaagauuaaucagagccucgccuuuaucagaaaauccgaugaacugcugcacaacgugaauguuggaaagagcacgaccaacauuaugaucacaaccaucauuaucgucauuaucgugauucuucuccugcugaucgcugugggccucuuccuguacugcaaagcgcggugaggacuaguggaagcauuuuccuggcugauuaaaagaaauuacucagcuauggucaucuguuccuguuagaaggcuaugcagcauauuauauacuaugcgcauguuaugaaaugcauaauaaaaaauuuuaaaaaaucuaaaagaucuaaaaaaaaaaaaaaaaaaaaaaaaaaaaaaaaaaaaaaaaaaaaaaaaaaaaaaaaaaaaaaaaugcaucccccccccccccccccccccccccccccccaaaggcucuuuucagagccaccagaauu

SEQ ID NO: 13064 - RNA, 2027 nt, Artificial Sequence
  mRNA product Design f-2 comprising derived and/or modified sequence from HRSV(Memphis-37)__AIY60640.1__F-del_DSCav1 (opt6)
gggagagcggcucggccauuuugucccagucaguccggaggcugcggcugcagaaguaccgccugcggaguaacugcaaagaagcuuaccauggaauuaccaauccuuaaaacaaacgcaauaacaaccauccucgcagcaguaacucucugcuucgcuucaucucaaaacaucacagaagaauuuuaccaaagcacaugcucagcuguauccaaagguuaucuaucagccuugagaaccggaugguacacaucaguaauaacaauugaacuaucaaacauuaaagaaaacaaaugcaacggcaccgacgcaaaaguaaaacuaaucaaacaagaacuagacaaauauaaaaaugcaguaacagaauuacaauuauuaaugcaauccacaccagcugcaaacaaccgagcccgaagagaacuaccaagauucaugaacuacacacuaaacaacaccaaaaauaacaacgucacccuaucuaaaaaacguaaaagaagauucuuaggauuccucuuaggagucggauccgcaauagcaagcggcauagccguauguaaaguccuacacuuagaaggugaagugaauaaaauaaaaaacgcccuauuaagcacuaacaaagcaguagucucccuaucaaacggaguuucaguacucacauucaaaguacucgaccucaaaaacuacaucgacaaacaacuuuuaccaauucuaaacaaacaaucaugcuccauaucuaauaucgaaaccgucaucgaauuucaacaaaaaaacaauagacuacuagaaauaacuagagaauuuucaguaaacgccggcguuacgacaccagucucuacauacauguuaaccaauucagaacucuuaucauuaaucaacgacaugccaauaacaaacgaccaaaaaaaacuaauguccaauaacguacaaauagucagacaacaaucauacucaauuaugugcauaauaaaagaagaaguacuagcuuacguaguacaacucccccuauacggcguaauagacacuccauguuggaaauuacacacaucaccauuauguaccaccaauacaaaagaaggcucaaacauaugccuaacaagaacagauagaggaugguauugcgacaacgcaggcucaguuuccuuuuucccccaagcagaaaccugcaaaguacaaucaaaucguguuuuuugcgacaccaugaacucacucacauuaccaucagaaguaaaccuaugcaacauagacauauucaacccaaaauacgacugcaaaaucaugacaucaaaaacagacguauccucuucaguaauuacuagcuuaggagcaauagucucuuguuauggaaaaacaaaaugcacagccaguaacaaaaaccgcggaauaauaaaaaccuucucaaacgguugcgauuacgucucuaacaaaggagucgacacaguaucaguaggcaauacauuauacuacguuaacaaacaagaaggaaaaucuuuauacgucaaaggagaacccauuauaaacuuuuacgacccauuagucuucccuuccgacgaauuugacgccagcauuucacaaguaaacgaaaaaauaaaccaaucacucgcauuuauaagaaaaucugacgaauuacuccacaacguaaacguaggaaaauccacaacaaacauaaugauaacaaccauaaucaucgucauaauagucauacuucuccuauuaauugcaguaggcuuauuccuauacuguaaagcacgauaaggacuaguggaagcauuuuccuggcugauuaaaagaaauuacucagcuauggucaucuguuccuguuagaaggcuaugcagcauauuauauacuaugcgcauguuaugaaaugcauaauaaaaaauuuuaaaaaaucuaaaagaucuaaaaaaaaaaaaaaaaaaaaaaaaaaaaaaaaaaaaaaaaaaaaaaaaaaaaaaaaaaaaaaaaugcaucccccccccccccccccccccccccccccccaaaggcucuuuucagagccaccagaauu

SEQ ID NO: 13065 - RNA, 2027 nt, Artificial Sequence
  mRNA product Design f-2 comprising derived and/or modified sequence from HRSV(Memphis-37)__AIY60640.1__F-del_DSCav1 (opt11)
gggagagcggcucggccauuuugucccagucaguccggaggcugcggcugcagaaguaccgccugcggaguaacugcaaagaagcuuaccauggaacuaccaauccuaaaaacuaacgcaaucaccacaauccucgccgccgucacccuuugcuuugcguccucccaaaacauuacugaagaguucuaccaauccacgugcuccgccgucuccaaagguuaccuauccgcccuuaggaccggcugguacaccagcgucaucaccaucgaacuuuccaacaucaaagaaaacaaauguaacggcaccgacgcaaaagucaaacuuauuaaacaggaacucgacaaauauaagaaugccgucaccgaauuacaacuccucaugcaauccacccccgccgccaacaaccgagcaaggcgcgaacucccucgauucaugaauuacacccucaacaauaccaaaaacaacaacgucacccuauccaagaaacgcaaaagacgcuucuugggcuuccuccucggcgugggcuccgcaauagccuccgguauugccgugugcaaagucuuacaccucgaaggcgaggucaacaaaaucaaaaacgcccuccucuccaccaacaaagccgucgucagccuauccaacggcguuuccguccucaccuucaaaguacucgaccucaaaaacuacaucgacaaacaacuccuacccauacuaaacaaacaauccugcuccauuuccaacaucgaaaccguaaucgaguuccaacagaaaaacaaucgccuccuagaaaucacacgugaauuuucaguuaacgccggaguaacaacuccuguaucuaccuacaugcucaccaauuccgaacuccucagccucauaaacgacaugccaauaacaaacgaccaaaagaaacucaugucuaacaacguacaaaucgucagacaacaaaguuacucaaucauguguaucaucaaagaggaaguccuagcauacgugguccaacucccccucuacggaguaaucgacaccccaugcuggaaacuacacaccagcccccucuguaccacaaacacgaaagaagguuccaacaucugccugacccgaaccgaccgcggcugguacugcgauaacgcuggcuccgucucauucuucccccaagcagaaaccugcaaaguacaauccaaccgaguauucugcgacaccaugaacucacucacccuccccagcgaaguaaaccucugcaacaucgacauauucaacccaaaauacgacugcaaaauuaugaccucuaaaacagacguauccuccucuguaaucacaucccucggggccaucgucuccugcuacggcaaaaccaaaugcaccgccuccaacaaaaaccgcggaaucauaaaaaccuucuccaacggaugcgacuacgucucaaauaaaggcgucgacaccgucuccgucggcaacacgcuauacuacgucaacaaacaagaaggcaaaucacucuacgucaaaggugagcccaucaucaauuucuacgauccccucgucuucccaagcgacgaguucgacgccagcauaucccaaguaaacgagaaaaucaaccaaagccuggccuucauccgcaaauccgacgaacuacuacacaacguaaacguaggcaaguccacuaccaacauaaugaucaccacaaucaucauagucauaaucguuauacuacuccugcucaucgccguaggccucuuccucuauugcaaagcccgauagggacuaguggaagcauuuuccuggcugauuaaaagaaauuacucagcuauggucaucuguuccuguuagaaggcuaugcagcauauuauauacuaugcgcauguuaugaaaugcauaauaaaaaauuuuaaaaaaucuaaaagaucuaaaaaaaaaaaaaaaaaaaaaaaaaaaaaaaaaaaaaaaaaaaaaaaaaaaaaaaaaaaaaaaaugcaucccccccccccccccccccccccccccccccaaaggcucuuuucagagccaccagaauu

SEQ ID NO: 13066 - RNA, 2018 nt, Artificial Sequence
  mRNA product Design f-3 comprising derived and/or modified sequence from HRSV(Memphis-37)__AIY60640.1__F-del_DSCav1 (opt1)
gggagagucccgcagucggcguccagcggcucugcuuguucgugugugugucguugcaggccuuauucaagcuuaccauggagcugcccauccucaagaccaacgccaucaccacgauccuggccgcggugacccugugcuucgccagcucccagaacaucaccgaggaguucuaccagagcacgugcuccgccgucagcaagggcuaccucuccgcccugcgcaccgggugguacaccagcgugaucaccaucgagcuguccaacaucaaggagaacaagugcaacggcaccgacgccaaggugaagcucaucaagcaggagcuggacaaguacaagaacgcggucacggagcugcagcuccugaugcagagcaccccggccgccaacaaccgggcccgccgggagcugccccgcuucaugaacuacacccucaacaacaccaagaacaacaacgugacgcuguccaagaagcggaagcgccgguuccugggguuccuccugggcguggggagcgcgaucgccuccggcaucgccgucugcaaggugcugcaccucgagggcgaggugaacaagaucaagaacgcccugcuguccaccaacaaggccgucgugagccucuccaacggggugagcguccugaccuucaaggugcuggaccucaagaacuacaucgacaagcagcugcugcccauccugaacaagcagagcugcuccaucagcaacaucgagaccgucaucgaguuccagcagaagaacaaccgccuccuggagaucacgcgggaguucagcgugaacgcgggcgugaccacccccgucuccaccuacaugcugacgaacagcgagcuccugucccugaucaacgacaugccgaucaccaacgaccagaagaagcucaugagcaacaacgugcagaucgugcgccagcaguccuacagcaucaugugcaucaucaaggaggagguccuggccuacguggugcagcugccccucuacggggucaucgacacccccugcuggaagcugcacaccagcccccugugcacgaccaacaccaaggagggcuccaacaucugccucacccggacggaccgcgggugguacugcgacaacgccggcagcguguccuucuucccgcaggccgagaccugcaagguccagagcaaccggguguucugcgacaccaugaacucccugacccugcccagcgaggugaaccucugcaacaucgacaucuucaaccccaaguacgacugcaagaucaugacguccaagaccgacgucagcuccagcgugaucaccucccugggcgccaucgugagcugcuacgggaagaccaagugcacggcgagcaacaagaaccgcggcaucaucaagaccuucuccaacgggugcgacuacgucagcaacaagggcguggacaccguguccgucggcaacacccuguacuacgugaacaagcaggagggcaagagccucuacgugaagggggagcccaucaucaacuucuacgacccgcuggucuuccccuccgacgaguucgacgccagcaucucccaggugaacgagaagaucaaccagagccuggccuucauccggaaguccgacgagcuccugcacaacgugaacgucggcaagagcaccacgaacaucaugaucaccaccaucaucaucgugaucaucgugauccugcugcuccugaucgccgucgggcuguuccucuacugcaaggcccgcugaggacuaguacuggcugcaucucccuuuccucuguccuccauccuucucccaggauggugaagggggaccugguacccagugauccccaccccaggauccuaaaucaugacuuaccugcuaauaaaaacucauuggaaaagugagaagaucuaaaaaaaaaaaaaaaaaaaaaaaaaaaaaaaaaaaaaaaaaaaaaaaaaaaaaaaaaaaaaaaaugcaucccccccccccccccccccccccccccccccaaaggcucuuuucagagccaccagaauu

SEQ ID NO: 13067 - RNA, 2018 nt, Artificial Sequence
  mRNA product Design f-3 comprising derived and/or modified sequence from HRSV(Memphis-37)__AIY60640.1__F-del_DSCav1 (opt1)
gggagagucccgcagucggcguccagcggcucugcuuguucgugugugugucguugcaggccuuauucaagcuuaccauggagcugcccauccucaagaccaacgccaucaccacgauccuggccgcggugacccugugcuucgccagcucccagaacaucaccgaggaguucuaccagagcacgugcuccgccgucagcaagggcuaccucuccgcccugcgcaccgggugguacaccagcgugaucaccaucgagcuguccaacaucaaggagaacaagugcaacggcaccgacgccaaggugaagcucaucaagcaggagcuggacaaguacaagaacgcggucacggagcugcagcuccugaugcagagcaccccggccgccaacaaccgggcccgccgggagcugccccgcuucaugaacuacacccucaacaacaccaagaacaacaacgugacgcuguccaagaagcggaagcgccgguuccugggguuccuccugggcguggggagcgcgaucgccuccggcaucgccgucugcaaggugcugcaccucgagggcgaggugaacaagaucaagaacgcccugcugagcaccaacaaggccgucgugucccucagcaacgggguguccguccugaccuucaaggugcuggaccucaagaacuacaucgacaagcagcugcugcccauccucaacaagcagagcugcuccaucagcaacaucgagaccgugaucgaguuccagcagaagaacaaccgccugcuggagaucacgcgggaguucuccgucaacgcgggcgugaccacccccgugagcaccuacaugcucacgaacagcgagcugcugucccucaucaacgacaugccgaucaccaacgaccagaagaagcugaugagcaacaacguccagaucgugcgccagcaguccuacagcaucaugugcaucaucaaggaggaggugcuggccuacgucgugcagcucccccuguacggggugaucgacacccccugcuggaagcugcacaccagcccccucugcacgaccaacaccaaggagggcagcaacaucugccugacccggacggaccgcgggugguacugcgacaacgccggcuccgucagcuucuucccgcaggccgagaccugcaaggugcaguccaaccgggucuucugcgacaccaugaacagccugacccuccccuccgaggugaaccugugcaacaucgacaucuucaaccccaaguacgacugcaagaucaugacgagcaagaccgacguguccagcuccgucaucaccagccugggcgccaucguguccugcuacgggaagaccaagugcacggcgagcaacaagaaccgcggcaucaucaagaccuucuccaacgggugcgacuacgugagcaacaagggcgucgacaccgugagcgugggcaacacccucuacuacgucaacaagcaggaggggaagucccuguacgugaagggcgagcccaucaucaacuucuacgacccgcugguguuccccagcgacgaguucgacgccuccaucagccaggucaacgagaagaucaaccagucccucgccuucauccggaaguccgacgagcugcugcacaacgugaacguggggaaguccaccacgaacaucaugaucaccaccaucaucaucgucaucaucgugauccugcuccugcugaucgccgugggccucuuccuguacugcaaggcccgcugaggacuaguacuggcugcaucucccuuuccucuguccuccauccuucucccaggauggugaagggggaccugguacccagugauccccaccccaggauccuaaaucaugacuuaccugcuaauaaaaacucauuggaaaagugagaagaucuaaaaaaaaaaaaaaaaaaaaaaaaaaaaaaaaaaaaaaaaaaaaaaaaaaaaaaaaaaaaaaaaugcaucccccccccccccccccccccccccccccccaaaggcucuuuucagagccaccagaauu

SEQ ID NO: 13068 - RNA, 2018 nt, Artificial Sequence
  mRNA product Design f-3 comprising derived and/or modified sequence from HRSV(Memphis-37)__AIY60640.1__F-del_DSCav1 (opt2)
gggagagucccgcagucggcguccagcggcucugcuuguucgugugugugucguugcaggccuuauucaagcuuaccauggagcuccccauccucaagaccaacgccaucaccaccauccucgccgccgucacccucugcuucgccuccucccagaacaucaccgaggaguucuaccaguccaccugcuccgccgucuccaagggcuaccucuccgcccuccgcaccggcugguacaccuccgucaucaccaucgagcucuccaacaucaaggagaacaagugcaacggcaccgacgccaaggucaagcucaucaagcaggagcucgacaaguacaagaacgccgucaccgagcuccagcuccucaugcaguccacccccgccgccaacaaccgcgcccgccgcgagcucccccgcuucaugaacuacacccucaacaacaccaagaacaacaacgucacccucuccaagaagcgcaagcgccgcuuccucggcuuccuccucggcgucggcuccgccaucgccuccggcaucgccgucugcaagguccuccaccucgagggcgaggucaacaagaucaagaacgcccuccucuccaccaacaaggccgucgucucccucuccaacggcgucuccguccucaccuucaagguccucgaccucaagaacuacaucgacaagcagcuccuccccauccucaacaagcaguccugcuccaucuccaacaucgagaccgucaucgaguuccagcagaagaacaaccgccuccucgagaucacccgcgaguucuccgucaacgccggcgucaccacccccgucuccaccuacaugcucaccaacuccgagcuccucucccucaucaacgacaugcccaucaccaacgaccagaagaagcucauguccaacaacguccagaucguccgccagcaguccuacuccaucaugugcaucaucaaggaggagguccucgccuacgucguccagcucccccucuacggcgucaucgacacccccugcuggaagcuccacaccuccccccucugcaccaccaacaccaaggagggcuccaacaucugccucacccgcaccgaccgcggcugguacugcgacaacgccggcuccgucuccuucuucccccaggccgagaccugcaagguccaguccaaccgcgucuucugcgacaccaugaacucccucacccuccccuccgaggucaaccucugcaacaucgacaucuucaaccccaaguacgacugcaagaucaugaccuccaagaccgacgucuccuccuccgucaucaccucccucggcgccaucgucuccugcuacggcaagaccaagugcaccgccuccaacaagaaccgcggcaucaucaagaccuucuccaacggcugcgacuacgucuccaacaagggcgucgacaccgucuccgucggcaacacccucuacuacgucaacaagcaggagggcaagucccucuacgucaagggcgagcccaucaucaacuucuacgacccccucgucuuccccuccgacgaguucgacgccuccaucucccaggucaacgagaagaucaaccagucccucgccuucauccgcaaguccgacgagcuccuccacaacgucaacgucggcaaguccaccaccaacaucaugaucaccaccaucaucaucgucaucaucgucauccuccuccuccucaucgccgucggccucuuccucuacugcaaggcccgcugaggacuaguacuggcugcaucucccuuuccucuguccuccauccuucucccaggauggugaagggggaccugguacccagugauccccaccccaggauccuaaaucaugacuuaccugcuaauaaaaacucauuggaaaagugagaagaucuaaaaaaaaaaaaaaaaaaaaaaaaaaaaaaaaaaaaaaaaaaaaaaaaaaaaaaaaaaaaaaaaugcaucccccccccccccccccccccccccccccccaaaggcucuuuucagagccaccagaauu

SEQ ID NO: 13069 - RNA, 2018 nt, Artificial Sequence
  mRNA product Design f-3 comprising derived and/or modified sequence from HRSV(Memphis-37)__AIY60640.1__F-del_DSCav1 (opt3)
gggagagucccgcagucggcguccagcggcucugcuuguucgugugugugucguugcaggccuuauucaagcuuaccauggagcugcccauccucaagaccaacgccauuacaacuauacuugcugcagugacgcugugcuucgccagcucccagaauaucaccgaagaguuuuaccaaucuacauguucagcggucaguaaaggcuauuugagcgcuuuaagaacugggugguacaccuccguuauuacaaucgaacugucuaacauuaaggagaauaaaugcaacggaaccgacgccaaggugaaacuaaucaagcaggaacucgauaaguauaaaaaugcaguaacugagcugcagcuucugaugcagucgaccccugccgcuaacaauagggcacggcgcgaguugccacgauucaugaacuacacacucaauaacacgaagaauaacaaugugacucugagcaaaaagcguaaaagaagguuucuggguuuccucuuaggcgucgggucagccauagcuaguggaaucgccguguguaagguucugcaccuugaaggcgaggugaacaagauuaaaaaugcguugcuguccaccaacaaggcagucgugucucuaagcaacgguguauccguucucacauuuaaagugcuggaccuuaagaauuauaucgauaaacaacuguugccgauucucaacaagcagucaugcaguaucagcaauauagaaacugucauugaguuccagcagaaaaacaaucggcuguuagagaucacccgcgaauuuucugugaacgccggggugacaacccccgucuccacguacaugcugacuaauucagagcuccuuagccugauuaacgacaugccuaucacaaaugaucaaaagaaguugaugaguaacaauguucagaucgugagacagcagucuuauuccauuauguguauaaucaaagaagagguacuagcuuacgugguccaacugccacucuacggagugauugacacccccugcuggaagcugcauacuagcccucuuuguacaaccaacacgaaagaaggcucgaauaucugccugaccaggacagaucggggcugguauugugacaacgccgggucuguuuccuucuuuccacaggcagagacuugcaaggugcagucaaaucgcgucuucugugauaccaugaacaguuugacacuccccagcgaggugaaccugugcaauauagacauuuuuaacccuaaauacgauugcaagaucaugacuuccaagaccgacguaucuagcucaguuaucacaaguuuaggagcuauuguguccuguuaugguaaaaccaagugcacugccagcaauaaaaaccgaggcaucauuaagacguucucuaaugggugugauuacgucucaaacaaaggaguggacacagucagugugggcaauacccuguauuacguuaacaagcaagaagguaagagccuauaugugaaaggggagccaauaaucaauuuuuacgacccgcucguauuccccuccgaugaguucgacgcgucuauuucgcaggucaacgaaaagaucaaucagagccuggccuuuaucagaaaauccgaugaacuuuugcacaacgugaauguuggaaagucaacuaccaacauuaugauaacaaccaucauuaucgugauuaucgucauacugcuccugcuuaucgcagugggccuguucuuguacugcaaagcuaggugaggacuaguacuggcugcaucucccuuuccucuguccuccauccuucucccaggauggugaagggggaccugguacccagugauccccaccccaggauccuaaaucaugacuuaccugcuaauaaaaacucauuggaaaagugagaagaucuaaaaaaaaaaaaaaaaaaaaaaaaaaaaaaaaaaaaaaaaaaaaaaaaaaaaaaaaaaaaaaaaugcaucccccccccccccccccccccccccccccccaaaggcucuuuucagagccaccagaauu

SEQ ID NO: 13070 - RNA, 2018 nt, Artificial Sequence
  mRNA product Design f-3 comprising derived and/or modified sequence from HRSV(Memphis-37)__AIY60640.1__F-del_DSCav1 (opt4)
gggagagucccgcagucggcguccagcggcucugcuuguucgugugugugucguugcaggccuuauucaagcuuaccauggagcugcccauccugaagaccaacgccaucaccaccauccuggccgccgugacccugugcuucgccagcagccagaacaucaccgaggaguucuaccagagcaccugcagcgccgugagcaagggcuaccugagcgcccugagaaccggcugguacaccagcgugaucaccaucgagcugagcaacaucaaggagaacaagugcaacggcaccgacgccaaggugaagcugaucaagcaggagcuggacaaguacaagaacgccgugaccgagcugcagcugcugaugcagagcacccccgccgccaacaacagagccagaagagagcugcccagauucaugaacuacacccugaacaacaccaagaacaacaacgugacccugagcaagaagagaaagagaagauuccugggcuuccugcugggcgugggcagcgccaucgccagcggcaucgccgugugcaaggugcugcaccuggagggcgaggugaacaagaucaagaacgcccugcugagcaccaacaaggccguggugagccugagcaacggcgugagcgugcugaccuucaaggugcuggaccugaagaacuacaucgacaagcagcugcugcccauccugaacaagcagagcugcagcaucagcaacaucgagaccgugaucgaguuccagcagaagaacaacagacugcuggagaucaccagagaguucagcgugaacgccggcgugaccacccccgugagcaccuacaugcugaccaacagcgagcugcugagccugaucaacgacaugcccaucaccaacgaccagaagaagcugaugagcaacaacgugcagaucgugagacagcagagcuacagcaucaugugcaucaucaaggaggaggugcuggccuacguggugcagcugccccuguacggcgugaucgacacccccugcuggaagcugcacaccagcccccugugcaccaccaacaccaaggagggcagcaacaucugccugaccagaaccgacagaggcugguacugcgacaacgccggcagcgugagcuucuucccccaggccgagaccugcaaggugcagagcaacagaguguucugcgacaccaugaacagccugacccugcccagcgaggugaaccugugcaacaucgacaucuucaaccccaaguacgacugcaagaucaugaccagcaagaccgacgugagcagcagcgugaucaccagccugggcgccaucgugagcugcuacggcaagaccaagugcaccgccagcaacaagaacagaggcaucaucaagaccuucagcaacggcugcgacuacgugagcaacaagggcguggacaccgugagcgugggcaacacccuguacuacgugaacaagcaggagggcaagagccuguacgugaagggcgagcccaucaucaacuucuacgacccccugguguuccccagcgacgaguucgacgccagcaucagccaggugaacgagaagaucaaccagagccuggccuucaucagaaagagcgacgagcugcugcacaacgugaacgugggcaagagcaccaccaacaucaugaucaccaccaucaucaucgugaucaucgugauccugcugcugcugaucgccgugggccuguuccuguacugcaaggccagaugaggacuaguacuggcugcaucucccuuuccucuguccuccauccuucucccaggauggugaagggggaccugguacccagugauccccaccccaggauccuaaaucaugacuuaccugcuaauaaaaacucauuggaaaagugagaagaucuaaaaaaaaaaaaaaaaaaaaaaaaaaaaaaaaaaaaaaaaaaaaaaaaaaaaaaaaaaaaaaaaugcaucccccccccccccccccccccccccccccccaaaggcucuuuucagagccaccagaauu

SEQ ID NO: 13071 - RNA, 2018 nt, Artificial Sequence
  mRNA product Design f-3 comprising derived and/or modified sequence from HRSV(Memphis-37)__AIY60640.1__F-del_DSCav1 (opt5)
gggagagucccgcagucggcguccagcggcucugcuuguucgugugugugucguugcaggccuuauucaagcuuaccauggagcugcccauccucaagaccaacgccauuacaacgauccuggcugccgugacccuuugcuucgcgagcucccagaauauuacagaagaguuuuaccaaucuaccuguagcgcugucuccaaaggcuaucugucugcccucagaacagggugguacaccagcguuaucacaauugaacuguccaacaucaaggagaauaaaugcaacggaaccgacgccaaggugaaacuuaucaagcaggaacuggauaaguauaaaaaugcugugacggagcuccagcugcugaugcagucuaccccugccgcuaacaaucgggcccgcagagagcucccgcgguucaugaacuacacacugaauaacaccaagaauaacaaugucacacuuagcaaaaagcgcaaaagacgguuucugggcuuccuccugggggugggauccgcgauugccagcggcaucgcuguuuguaaggugcuucaccuggaaggggaggucaacaagauuaaaaaugcccuccugucuaccaacaaggcugugguuucccugagcaacggagugucuguccucacguuuaaagugcuggaccuuaagaauuauaucgauaaacaacugcuccccauucugaacaagcaguccugcagcaucucuaauauugaaacagugaucgaguuccagcagaaaaacaaucgccuucuggagaucaccagagaauuuuccgucaacgccggcguuacaaccccugugagcaccuacaugcucacaaauuccgagcugcugucucucauuaacgacaugcccaucacgaaugaucaaaagaagcugaugagcaacaaugugcagauuguccggcagcaguccuauagcaucauguguauuaucaaagaagaggugcuugcguacguugugcaacugccucucuacggcgucaucgacacccccugcuggaagcugcauacaucuccucuuuguaccacaaacaccaaagaaggguccaauauuugccugacgcgcacagauagaggaugguauugugacaacgccggcagcgugucuuucuuuccgcaggcugagaccugcaagguucagagcaaucggguguucugugauaccaugaacucccucacacugcccucugaggucaaccugugcaauaucgacauuuuuaacccuaaauacgauugcaagaucaugaccagcaagacagacguguccagcucugucauuacgucccucggggccaucgugagcuguuauggaaaaaccaagugcacagcuucuaauaaaaaccgcggcaucauuaagaccuucuccaaugggugugauuacguuagcaacaaaggaguggacacagucuccgugggcaauacccuguauuacguuaacaagcaagaaggcaagucucuuuaugugaaaggggagcccaucauuaauuuuuacgacccucuggucuuccccagcgaugaguucgacgccuccaucucucaggugaacgaaaagauuaaucagagccucgccuuuaucagaaaauccgaugaacugcugcacaacgugaauguuggaaagagcacgaccaacauuaugaucacaaccaucauuaucgucauuaucgugauucuucuccugcugaucgcugugggccucuuccuguacugcaaagcgcggugaggacuaguacuggcugcaucucccuuuccucuguccuccauccuucucccaggauggugaagggggaccugguacccagugauccccaccccaggauccuaaaucaugacuuaccugcuaauaaaaacucauuggaaaagugagaagaucuaaaaaaaaaaaaaaaaaaaaaaaaaaaaaaaaaaaaaaaaaaaaaaaaaaaaaaaaaaaaaaaaugcaucccccccccccccccccccccccccccccccaaaggcucuuuucagagccaccagaauu

SEQ ID NO: 13072 - RNA, 2018 nt, Artificial Sequence
  mRNA product Design f-3 comprising derived and/or modified sequence from HRSV(Memphis-37)__AIY60640.1__F-del_DSCav1 (opt6)
gggagagucccgcagucggcguccagcggcucugcuuguucgugugugugucguugcaggccuuauucaagcuuaccauggaauuaccaauccuuaaaacaaacgcaauaacaaccauccucgcagcaguaacucucugcuucgcuucaucucaaaacaucacagaagaauuuuaccaaagcacaugcucagcuguauccaaagguuaucuaucagccuugagaaccggaugguacacaucaguaauaacaauugaacuaucaaacauuaaagaaaacaaaugcaacggcaccgacgcaaaaguaaaacuaaucaaacaagaacuagacaaauauaaaaaugcaguaacagaauuacaauuauuaaugcaauccacaccagcugcaaacaaccgagcccgaagagaacuaccaagauucaugaacuacacacuaaacaacaccaaaaauaacaacgucacccuaucuaaaaaacguaaaagaagauucuuaggauuccucuuaggagucggauccgcaauagcaagcggcauagccguauguaaaguccuacacuuagaaggugaagugaauaaaauaaaaaacgcccuauuaagcacuaacaaagcaguagucucccuaucaaacggaguuucaguacucacauucaaaguacucgaccucaaaaacuacaucgacaaacaacuuuuaccaauucuaaacaaacaaucaugcuccauaucuaauaucgaaaccgucaucgaauuucaacaaaaaaacaauagacuacuagaaauaacuagagaauuuucaguaaacgccggcguuacgacaccagucucuacauacauguuaaccaauucagaacucuuaucauuaaucaacgacaugccaauaacaaacgaccaaaaaaaacuaauguccaauaacguacaaauagucagacaacaaucauacucaauuaugugcauaauaaaagaagaaguacuagcuuacguaguacaacucccccuauacggcguaauagacacuccauguuggaaauuacacacaucaccauuauguaccaccaauacaaaagaaggcucaaacauaugccuaacaagaacagauagaggaugguauugcgacaacgcaggcucaguuuccuuuuucccccaagcagaaaccugcaaaguacaaucaaaucguguuuuuugcgacaccaugaacucacucacauuaccaucagaaguaaaccuaugcaacauagacauauucaacccaaaauacgacugcaaaaucaugacaucaaaaacagacguauccucuucaguaauuacuagcuuaggagcaauagucucuuguuauggaaaaacaaaaugcacagccaguaacaaaaaccgcggaauaauaaaaaccuucucaaacgguugcgauuacgucucuaacaaaggagucgacacaguaucaguaggcaauacauuauacuacguuaacaaacaagaaggaaaaucuuuauacgucaaaggagaacccauuauaaacuuuuacgacccauuagucuucccuuccgacgaauuugacgccagcauuucacaaguaaacgaaaaaauaaaccaaucacucgcauuuauaagaaaaucugacgaauuacuccacaacguaaacguaggaaaauccacaacaaacauaaugauaacaaccauaaucaucgucauaauagucauacuucuccuauuaauugcaguaggcuuauuccuauacuguaaagcacgauaaggacuaguacuggcugcaucucccuuuccucuguccuccauccuucucccaggauggugaagggggaccugguacccagugauccccaccccaggauccuaaaucaugacuuaccugcuaauaaaaacucauuggaaaagugagaagaucuaaaaaaaaaaaaaaaaaaaaaaaaaaaaaaaaaaaaaaaaaaaaaaaaaaaaaaaaaaaaaaaaugcaucccccccccccccccccccccccccccccccaaaggcucuuuucagagccaccagaauu

SEQ ID NO: 13073 - RNA, 2018 nt, Artificial Sequence
  mRNA product Design f-3 comprising derived and/or modified sequence from HRSV(Memphis-37)__AIY60640.1__F-del_DSCav1 (opt11)
gggagagucccgcagucggcguccagcggcucugcuuguucgugugugugucguugcaggccuuauucaagcuuaccauggaacuaccaauccuaaaaacuaacgcaaucaccacaauccucgccgccgucacccuuugcuuugcguccucccaaaacauuacugaagaguucuaccaauccacgugcuccgccgucuccaaagguuaccuauccgcccuuaggaccggcugguacaccagcgucaucaccaucgaacuuuccaacaucaaagaaaacaaauguaacggcaccgacgcaaaagucaaacuuauuaaacaggaacucgacaaauauaagaaugccgucaccgaauuacaacuccucaugcaauccacccccgccgccaacaaccgagcaaggcgcgaacucccucgauucaugaauuacacccucaacaauaccaaaaacaacaacgucacccuauccaagaaacgcaaaagacgcuucuugggcuuccuccucggcgugggcuccgcaauagccuccgguauugccgugugcaaagucuuacaccucgaaggcgaggucaacaaaaucaaaaacgcccuccucuccaccaacaaagccgucgucagccuauccaacggcguuuccguccucaccuucaaaguacucgaccucaaaaacuacaucgacaaacaacuccuacccauacuaaacaaacaauccugcuccauuuccaacaucgaaaccguaaucgaguuccaacagaaaaacaaucgccuccuagaaaucacacgugaauuuucaguuaacgccggaguaacaacuccuguaucuaccuacaugcucaccaauuccgaacuccucagccucauaaacgacaugccaauaacaaacgaccaaaagaaacucaugucuaacaacguacaaaucgucagacaacaaaguuacucaaucauguguaucaucaaagaggaaguccuagcauacgugguccaacucccccucuacggaguaaucgacaccccaugcuggaaacuacacaccagcccccucuguaccacaaacacgaaagaagguuccaacaucugccugacccgaaccgaccgcggcugguacugcgauaacgcuggcuccgucucauucuucccccaagcagaaaccugcaaaguacaauccaaccgaguauucugcgacaccaugaacucacucacccuccccagcgaaguaaaccucugcaacaucgacauauucaacccaaaauacgacugcaaaauuaugaccucuaaaacagacguauccuccucuguaaucacaucccucggggccaucgucuccugcuacggcaaaaccaaaugcaccgccuccaacaaaaaccgcggaaucauaaaaaccuucuccaacggaugcgacuacgucucaaauaaaggcgucgacaccgucuccgucggcaacacgcuauacuacgucaacaaacaagaaggcaaaucacucuacgucaaaggugagcccaucaucaauuucuacgauccccucgucuucccaagcgacgaguucgacgccagcauaucccaaguaaacgagaaaaucaaccaaagccuggccuucauccgcaaauccgacgaacuacuacacaacguaaacguaggcaaguccacuaccaacauaaugaucaccacaaucaucauagucauaaucguuauacuacuccugcucaucgccguaggccucuuccucuauugcaaagcccgauagggacuaguacuggcugcaucucccuuuccucuguccuccauccuucucccaggauggugaagggggaccugguacccagugauccccaccccaggauccuaaaucaugacuuaccugcuaauaaaaacucauuggaaaagugagaagaucuaaaaaaaaaaaaaaaaaaaaaaaaaaaaaaaaaaaaaaaaaaaaaaaaaaaaaaaaaaaaaaaaugcaucccccccccccccccccccccccccccccccaaaggcucuuuucagagccaccagaauu

SEQ ID NO: 13074 - RNA, 2234 nt, Artificial Sequence
  mRNA product Design f-4 comprising derived and/or modified sequence from HRSV(Memphis-37)__AIY60640.1__F-del_DSCav1 (opt1)
gggagagucccgcagucggcguccagcggcucugcuuguucgugugugugucguugcaggccuuauucaagcuuaccauggagcugcccauccucaagaccaacgccaucaccacgauccuggccgcggugacccugugcuucgccagcucccagaacaucaccgaggaguucuaccagagcacgugcuccgccgucagcaagggcuaccucuccgcccugcgcaccgggugguacaccagcgugaucaccaucgagcuguccaacaucaaggagaacaagugcaacggcaccgacgccaaggugaagcucaucaagcaggagcuggacaaguacaagaacgcggucacggagcugcagcuccugaugcagagcaccccggccgccaacaaccgggcccgccgggagcugccccgcuucaugaacuacacccucaacaacaccaagaacaacaacgugacgcuguccaagaagcggaagcgccgguuccugggguuccuccugggcguggggagcgcgaucgccuccggcaucgccgucugcaaggugcugcaccucgagggcgaggugaacaagaucaagaacgcccugcuguccaccaacaaggccgucgugagccucuccaacggggugagcguccugaccuucaaggugcuggaccucaagaacuacaucgacaagcagcugcugcccauccugaacaagcagagcugcuccaucagcaacaucgagaccgucaucgaguuccagcagaagaacaaccgccuccuggagaucacgcgggaguucagcgugaacgcgggcgugaccacccccgucuccaccuacaugcugacgaacagcgagcuccugucccugaucaacgacaugccgaucaccaacgaccagaagaagcucaugagcaacaacgugcagaucgugcgccagcaguccuacagcaucaugugcaucaucaaggaggagguccuggccuacguggugcagcugccccucuacggggucaucgacacccccugcuggaagcugcacaccagcccccugugcacgaccaacaccaaggagggcuccaacaucugccucacccggacggaccgcgggugguacugcgacaacgccggcagcguguccuucuucccgcaggccgagaccugcaagguccagagcaaccggguguucugcgacaccaugaacucccugacccugcccagcgaggugaaccucugcaacaucgacaucuucaaccccaaguacgacugcaagaucaugacguccaagaccgacgucagcuccagcgugaucaccucccugggcgccaucgugagcugcuacgggaagaccaagugcacggcgagcaacaagaaccgcggcaucaucaagaccuucuccaacgggugcgacuacgucagcaacaagggcguggacaccguguccgucggcaacacccuguacuacgugaacaagcaggagggcaagagccucuacgugaagggggagcccaucaucaacuucuacgacccgcuggucuuccccuccgacgaguucgacgccagcaucucccaggugaacgagaagaucaaccagagccuggccuucauccggaaguccgacgagcuccugcacaacgugaacgucggcaagagcaccacgaacaucaugaucaccaccaucaucaucgugaucaucgugauccugcugcuccugaucgccgucgggcuguuccucuacugcaaggcccgcugaggacuagugaagggaacacccaaauuuaauucagccuuaagcacaauuaauuaagagugaaacguaauuguacaagcaguuggucacccaccauagggcaugaucaacaccgcaaccuuuccuuuuucccccagugauucugaaaaaccccucuucccuucagcuugcuuagauguuccaaauuuaguaagcuuaaggcggccuacagaagaaaaagaaaaaaaaggccacaaaaguucccucucacuuucaguaaauaaaauaaaagcagcaacagaaauaaagaaauaaaugaaauucaaaaugaaauaaauauuguguugugcagcauuaaaaaaucaauaaaaauuaaaaaugagcaagaucuaaaaaaaaaaaaaaaaaaaaaaaaaaaaaaaaaaaaaaaaaaaaaaaaaaaaaaaaaaaaaaaaugcaucccccccccccccccccccccccccccccccaaaggcucuuuucagagccaccagaauu

SEQ ID NO: 13075 - RNA, 2234 nt, Artificial Sequence
  mRNA product Design f-4 comprising derived and/or modified sequence from HRSV(Memphis-37)__AIY60640.1__F-del_DSCav1 (opt1)
gggagagucccgcagucggcguccagcggcucugcuuguucgugugugugucguugcaggccuuauucaagcuuaccauggagcugcccauccucaagaccaacgccaucaccacgauccuggccgcggugacccugugcuucgccagcucccagaacaucaccgaggaguucuaccagagcacgugcuccgccgucagcaagggcuaccucuccgcccugcgcaccgggugguacaccagcgugaucaccaucgagcuguccaacaucaaggagaacaagugcaacggcaccgacgccaaggugaagcucaucaagcaggagcuggacaaguacaagaacgcggucacggagcugcagcuccugaugcagagcaccccggccgccaacaaccgggcccgccgggagcugccccgcuucaugaacuacacccucaacaacaccaagaacaacaacgugacgcuguccaagaagcggaagcgccgguuccugggguuccuccugggcguggggagcgcgaucgccuccggcaucgccgucugcaaggugcugcaccucgagggcgaggugaacaagaucaagaacgcccugcugagcaccaacaaggccgucgugucccucagcaacgggguguccguccugaccuucaaggugcuggaccucaagaacuacaucgacaagcagcugcugcccauccucaacaagcagagcugcuccaucagcaacaucgagaccgugaucgaguuccagcagaagaacaaccgccugcuggagaucacgcgggaguucuccgucaacgcgggcgugaccacccccgugagcaccuacaugcucacgaacagcgagcugcugucccucaucaacgacaugccgaucaccaacgaccagaagaagcugaugagcaacaacguccagaucgugcgccagcaguccuacagcaucaugugcaucaucaaggaggaggugcuggccuacgucgugcagcucccccuguacggggugaucgacacccccugcuggaagcugcacaccagcccccucugcacgaccaacaccaaggagggcagcaacaucugccugacccggacggaccgcgggugguacugcgacaacgccggcuccgucagcuucuucccgcaggccgagaccugcaaggugcaguccaaccgggucuucugcgacaccaugaacagccugacccuccccuccgaggugaaccugugcaacaucgacaucuucaaccccaaguacgacugcaagaucaugacgagcaagaccgacguguccagcuccgucaucaccagccugggcgccaucguguccugcuacgggaagaccaagugcacggcgagcaacaagaaccgcggcaucaucaagaccuucuccaacgggugcgacuacgugagcaacaagggcgucgacaccgugagcgugggcaacacccucuacuacgucaacaagcaggaggggaagucccuguacgugaagggcgagcccaucaucaacuucuacgacccgcugguguuccccagcgacgaguucgacgccuccaucagccaggucaacgagaagaucaaccagucccucgccuucauccggaaguccgacgagcugcugcacaacgugaacguggggaaguccaccacgaacaucaugaucaccaccaucaucaucgucaucaucgugauccugcuccugcugaucgccgugggccucuuccuguacugcaaggcccgcugaggacuagugaagggaacacccaaauuuaauucagccuuaagcacaauuaauuaagagugaaacguaauuguacaagcaguuggucacccaccauagggcaugaucaacaccgcaaccuuuccuuuuucccccagugauucugaaaaaccccucuucccuucagcuugcuuagauguuccaaauuuaguaagcuuaaggcggccuacagaagaaaaagaaaaaaaaggccacaaaaguucccucucacuuucaguaaauaaaauaaaagcagcaacagaaauaaagaaauaaaugaaauucaaaaugaaauaaauauuguguugugcagcauuaaaaaaucaauaaaaauuaaaaaugagcaagaucuaaaaaaaaaaaaaaaaaaaaaaaaaaaaaaaaaaaaaaaaaaaaaaaaaaaaaaaaaaaaaaaaugcaucccccccccccccccccccccccccccccccaaaggcucuuuucagagccaccagaauu

SEQ ID NO: 13076 - RNA, 2234 nt, Artificial Sequence
  mRNA product Design f-4 comprising derived and/or modified sequence from HRSV(Memphis-37)__AIY60640.1__F-del_DSCav1 (opt2)
gggagagucccgcagucggcguccagcggcucugcuuguucgugugugugucguugcaggccuuauucaagcuuaccauggagcuccccauccucaagaccaacgccaucaccaccauccucgccgccgucacccucugcuucgccuccucccagaacaucaccgaggaguucuaccaguccaccugcuccgccgucuccaagggcuaccucuccgcccuccgcaccggcugguacaccuccgucaucaccaucgagcucuccaacaucaaggagaacaagugcaacggcaccgacgccaaggucaagcucaucaagcaggagcucgacaaguacaagaacgccgucaccgagcuccagcuccucaugcaguccacccccgccgccaacaaccgcgcccgccgcgagcucccccgcuucaugaacuacacccucaacaacaccaagaacaacaacgucacccucuccaagaagcgcaagcgccgcuuccucggcuuccuccucggcgucggcuccgccaucgccuccggcaucgccgucugcaagguccuccaccucgagggcgaggucaacaagaucaagaacgcccuccucuccaccaacaaggccgucgucucccucuccaacggcgucuccguccucaccuucaagguccucgaccucaagaacuacaucgacaagcagcuccuccccauccucaacaagcaguccugcuccaucuccaacaucgagaccgucaucgaguuccagcagaagaacaaccgccuccucgagaucacccgcgaguucuccgucaacgccggcgucaccacccccgucuccaccuacaugcucaccaacuccgagcuccucucccucaucaacgacaugcccaucaccaacgaccagaagaagcucauguccaacaacguccagaucguccgccagcaguccuacuccaucaugugcaucaucaaggaggagguccucgccuacgucguccagcucccccucuacggcgucaucgacacccccugcuggaagcuccacaccuccccccucugcaccaccaacaccaaggagggcuccaacaucugccucacccgcaccgaccgcggcugguacugcgacaacgccggcuccgucuccuucuucccccaggccgagaccugcaagguccaguccaaccgcgucuucugcgacaccaugaacucccucacccuccccuccgaggucaaccucugcaacaucgacaucuucaaccccaaguacgacugcaagaucaugaccuccaagaccgacgucuccuccuccgucaucaccucccucggcgccaucgucuccugcuacggcaagaccaagugcaccgccuccaacaagaaccgcggcaucaucaagaccuucuccaacggcugcgacuacgucuccaacaagggcgucgacaccgucuccgucggcaacacccucuacuacgucaacaagcaggagggcaagucccucuacgucaagggcgagcccaucaucaacuucuacgacccccucgucuuccccuccgacgaguucgacgccuccaucucccaggucaacgagaagaucaaccagucccucgccuucauccgcaaguccgacgagcuccuccacaacgucaacgucggcaaguccaccaccaacaucaugaucaccaccaucaucaucgucaucaucgucauccuccuccuccucaucgccgucggccucuuccucuacugcaaggcccgcugaggacuagugaagggaacacccaaauuuaauucagccuuaagcacaauuaauuaagagugaaacguaauuguacaagcaguuggucacccaccauagggcaugaucaacaccgcaaccuuuccuuuuucccccagugauucugaaaaaccccucuucccuucagcuugcuuagauguuccaaauuuaguaagcuuaaggcggccuacagaagaaaaagaaaaaaaaggccacaaaaguucccucucacuuucaguaaauaaaauaaaagcagcaacagaaauaaagaaauaaaugaaauucaaaaugaaauaaauauuguguugugcagcauuaaaaaaucaauaaaaauuaaaaaugagcaagaucuaaaaaaaaaaaaaaaaaaaaaaaaaaaaaaaaaaaaaaaaaaaaaaaaaaaaaaaaaaaaaaaaugcaucccccccccccccccccccccccccccccccaaaggcucuuuucagagccaccagaauu

SEQ ID NO: 13077 - RNA, 2234 nt, Artificial Sequence
  mRNA product Design f-4 comprising derived and/or modified sequence from HRSV(Memphis-37)__AIY60640.1__F-del_DSCav1 (opt3)
gggagagucccgcagucggcguccagcggcucugcuuguucgugugugugucguugcaggccuuauucaagcuuaccauggagcugcccauccucaagaccaacgccauuacaacuauacuugcugcagugacgcugugcuucgccagcucccagaauaucaccgaagaguuuuaccaaucuacauguucagcggucaguaaaggcuauuugagcgcuuuaagaacugggugguacaccuccguuauuacaaucgaacugucuaacauuaaggagaauaaaugcaacggaaccgacgccaaggugaaacuaaucaagcaggaacucgauaaguauaaaaaugcaguaacugagcugcagcuucugaugcagucgaccccugccgcuaacaauagggcacggcgcgaguugccacgauucaugaacuacacacucaauaacacgaagaauaacaaugugacucugagcaaaaagcguaaaagaagguuucuggguuuccucuuaggcgucgggucagccauagcuaguggaaucgccguguguaagguucugcaccuugaaggcgaggugaacaagauuaaaaaugcguugcuguccaccaacaaggcagucgugucucuaagcaacgguguauccguucucacauuuaaagugcuggaccuuaagaauuauaucgauaaacaacuguugccgauucucaacaagcagucaugcaguaucagcaauauagaaacugucauugaguuccagcagaaaaacaaucggcuguuagagaucacccgcgaauuuucugugaacgccggggugacaacccccgucuccacguacaugcugacuaauucagagcuccuuagccugauuaacgacaugccuaucacaaaugaucaaaagaaguugaugaguaacaauguucagaucgugagacagcagucuuauuccauuauguguauaaucaaagaagagguacuagcuuacgugguccaacugccacucuacggagugauugacacccccugcuggaagcugcauacuagcccucuuuguacaaccaacacgaaagaaggcucgaauaucugccugaccaggacagaucggggcugguauugugacaacgccgggucuguuuccuucuuuccacaggcagagacuugcaaggugcagucaaaucgcgucuucugugauaccaugaacaguuugacacuccccagcgaggugaaccugugcaauauagacauuuuuaacccuaaauacgauugcaagaucaugacuuccaagaccgacguaucuagcucaguuaucacaaguuuaggagcuauuguguccuguuaugguaaaaccaagugcacugccagcaauaaaaaccgaggcaucauuaagacguucucuaaugggugugauuacgucucaaacaaaggaguggacacagucagugugggcaauacccuguauuacguuaacaagcaagaagguaagagccuauaugugaaaggggagccaauaaucaauuuuuacgacccgcucguauuccccuccgaugaguucgacgcgucuauuucgcaggucaacgaaaagaucaaucagagccuggccuuuaucagaaaauccgaugaacuuuugcacaacgugaauguuggaaagucaacuaccaacauuaugauaacaaccaucauuaucgugauuaucgucauacugcuccugcuuaucgcagugggccuguucuuguacugcaaagcuaggugaggacuagugaagggaacacccaaauuuaauucagccuuaagcacaauuaauuaagagugaaacguaauuguacaagcaguuggucacccaccauagggcaugaucaacaccgcaaccuuuccuuuuucccccagugauucugaaaaaccccucuucccuucagcuugcuuagauguuccaaauuuaguaagcuuaaggcggccuacagaagaaaaagaaaaaaaaggccacaaaaguucccucucacuuucaguaaauaaaauaaaagcagcaacagaaauaaagaaauaaaugaaauucaaaaugaaauaaauauuguguugugcagcauuaaaaaaucaauaaaaauuaaaaaugagcaagaucuaaaaaaaaaaaaaaaaaaaaaaaaaaaaaaaaaaaaaaaaaaaaaaaaaaaaaaaaaaaaaaaaugcaucccccccccccccccccccccccccccccccaaaggcucuuuucagagccaccagaauu

SEQ ID NO: 13078 - RNA, 2234 nt, Artificial Sequence
  mRNA product Design f-4 comprising derived and/or modified sequence from HRSV(Memphis-37)__AIY60640.1__F-del_DSCav1 (opt4)
gggagagucccgcagucggcguccagcggcucugcuuguucgugugugugucguugcaggccuuauucaagcuuaccauggagcugcccauccugaagaccaacgccaucaccaccauccuggccgccgugacccugugcuucgccagcagccagaacaucaccgaggaguucuaccagagcaccugcagcgccgugagcaagggcuaccugagcgcccugagaaccggcugguacaccagcgugaucaccaucgagcugagcaacaucaaggagaacaagugcaacggcaccgacgccaaggugaagcugaucaagcaggagcuggacaaguacaagaacgccgugaccgagcugcagcugcugaugcagagcacccccgccgccaacaacagagccagaagagagcugcccagauucaugaacuacacccugaacaacaccaagaacaacaacgugacccugagcaagaagagaaagagaagauuccugggcuuccugcugggcgugggcagcgccaucgccagcggcaucgccgugugcaaggugcugcaccuggagggcgaggugaacaagaucaagaacgcccugcugagcaccaacaaggccguggugagccugagcaacggcgugagcgugcugaccuucaaggugcuggaccugaagaacuacaucgacaagcagcugcugcccauccugaacaagcagagcugcagcaucagcaacaucgagaccgugaucgaguuccagcagaagaacaacagacugcuggagaucaccagagaguucagcgugaacgccggcgugaccacccccgugagcaccuacaugcugaccaacagcgagcugcugagccugaucaacgacaugcccaucaccaacgaccagaagaagcugaugagcaacaacgugcagaucgugagacagcagagcuacagcaucaugugcaucaucaaggaggaggugcuggccuacguggugcagcugccccuguacggcgugaucgacacccccugcuggaagcugcacaccagcccccugugcaccaccaacaccaaggagggcagcaacaucugccugaccagaaccgacagaggcugguacugcgacaacgccggcagcgugagcuucuucccccaggccgagaccugcaaggugcagagcaacagaguguucugcgacaccaugaacagccugacccugcccagcgaggugaaccugugcaacaucgacaucuucaaccccaaguacgacugcaagaucaugaccagcaagaccgacgugagcagcagcgugaucaccagccugggcgccaucgugagcugcuacggcaagaccaagugcaccgccagcaacaagaacagaggcaucaucaagaccuucagcaacggcugcgacuacgugagcaacaagggcguggacaccgugagcgugggcaacacccuguacuacgugaacaagcaggagggcaagagccuguacgugaagggcgagcccaucaucaacuucuacgacccccugguguuccccagcgacgaguucgacgccagcaucagccaggugaacgagaagaucaaccagagccuggccuucaucagaaagagcgacgagcugcugcacaacgugaacgugggcaagagcaccaccaacaucaugaucaccaccaucaucaucgugaucaucgugauccugcugcugcugaucgccgugggccuguuccuguacugcaaggccagaugaggacuagugaagggaacacccaaauuuaauucagccuuaagcacaauuaauuaagagugaaacguaauuguacaagcaguuggucacccaccauagggcaugaucaacaccgcaaccuuuccuuuuucccccagugauucugaaaaaccccucuucccuucagcuugcuuagauguuccaaauuuaguaagcuuaaggcggccuacagaagaaaaagaaaaaaaaggccacaaaaguucccucucacuuucaguaaauaaaauaaaagcagcaacagaaauaaagaaauaaaugaaauucaaaaugaaauaaauauuguguugugcagcauuaaaaaaucaauaaaaauuaaaaaugagcaagaucuaaaaaaaaaaaaaaaaaaaaaaaaaaaaaaaaaaaaaaaaaaaaaaaaaaaaaaaaaaaaaaaaugcaucccccccccccccccccccccccccccccccaaaggcucuuuucagagccaccagaauu

SEQ ID NO: 13079 - RNA, 2234 nt, Artificial Sequence
  mRNA product Design f-4 comprising derived and/or modified sequence from HRSV(Memphis-37)__AIY60640.1__F-del_DSCav1 (opt5)
gggagagucccgcagucggcguccagcggcucugcuuguucgugugugugucguugcaggccuuauucaagcuuaccauggagcugcccauccucaagaccaacgccauuacaacgauccuggcugccgugacccuuugcuucgcgagcucccagaauauuacagaagaguuuuaccaaucuaccuguagcgcugucuccaaaggcuaucugucugcccucagaacagggugguacaccagcguuaucacaauugaacuguccaacaucaaggagaauaaaugcaacggaaccgacgccaaggugaaacuuaucaagcaggaacuggauaaguauaaaaaugcugugacggagcuccagcugcugaugcagucuaccccugccgcuaacaaucgggcccgcagagagcucccgcgguucaugaacuacacacugaauaacaccaagaauaacaaugucacacuuagcaaaaagcgcaaaagacgguuucugggcuuccuccugggggugggauccgcgauugccagcggcaucgcuguuuguaaggugcuucaccuggaaggggaggucaacaagauuaaaaaugcccuccugucuaccaacaaggcugugguuucccugagcaacggagugucuguccucacguuuaaagugcuggaccuuaagaauuauaucgauaaacaacugcuccccauucugaacaagcaguccugcagcaucucuaauauugaaacagugaucgaguuccagcagaaaaacaaucgccuucuggagaucaccagagaauuuuccgucaacgccggcguuacaaccccugugagcaccuacaugcucacaaauuccgagcugcugucucucauuaacgacaugcccaucacgaaugaucaaaagaagcugaugagcaacaaugugcagauuguccggcagcaguccuauagcaucauguguauuaucaaagaagaggugcuugcguacguugugcaacugccucucuacggcgucaucgacacccccugcuggaagcugcauacaucuccucuuuguaccacaaacaccaaagaaggguccaauauuugccugacgcgcacagauagaggaugguauugugacaacgccggcagcgugucuuucuuuccgcaggcugagaccugcaagguucagagcaaucggguguucugugauaccaugaacucccucacacugcccucugaggucaaccugugcaauaucgacauuuuuaacccuaaauacgauugcaagaucaugaccagcaagacagacguguccagcucugucauuacgucccucggggccaucgugagcuguuauggaaaaaccaagugcacagcuucuaauaaaaaccgcggcaucauuaagaccuucuccaaugggugugauuacguuagcaacaaaggaguggacacagucuccgugggcaauacccuguauuacguuaacaagcaagaaggcaagucucuuuaugugaaaggggagcccaucauuaauuuuuacgacccucuggucuuccccagcgaugaguucgacgccuccaucucucaggugaacgaaaagauuaaucagagccucgccuuuaucagaaaauccgaugaacugcugcacaacgugaauguuggaaagagcacgaccaacauuaugaucacaaccaucauuaucgucauuaucgugauucuucuccugcugaucgcugugggccucuuccuguacugcaaagcgcggugaggacuagugaagggaacacccaaauuuaauucagccuuaagcacaauuaauuaagagugaaacguaauuguacaagcaguuggucacccaccauagggcaugaucaacaccgcaaccuuuccuuuuucccccagugauucugaaaaaccccucuucccuucagcuugcuuagauguuccaaauuuaguaagcuuaaggcggccuacagaagaaaaagaaaaaaaaggccacaaaaguucccucucacuuucaguaaauaaaauaaaagcagcaacagaaauaaagaaauaaaugaaauucaaaaugaaauaaauauuguguugugcagcauuaaaaaaucaauaaaaauuaaaaaugagcaagaucuaaaaaaaaaaaaaaaaaaaaaaaaaaaaaaaaaaaaaaaaaaaaaaaaaaaaaaaaaaaaaaaaugcaucccccccccccccccccccccccccccccccaaaggcucuuuucagagccaccagaauu

SEQ ID NO: 13080 - RNA, 2234 nt, Artificial Sequence
  mRNA product Design f-4 comprising derived and/or modified sequence from HRSV(Memphis-37)__AIY60640.1__F-del_DSCav1 (opt6)
gggagagucccgcagucggcguccagcggcucugcuuguucgugugugugucguugcaggccuuauucaagcuuaccauggaauuaccaauccuuaaaacaaacgcaauaacaaccauccucgcagcaguaacucucugcuucgcuucaucucaaaacaucacagaagaauuuuaccaaagcacaugcucagcuguauccaaagguuaucuaucagccuugagaaccggaugguacacaucaguaauaacaauugaacuaucaaacauuaaagaaaacaaaugcaacggcaccgacgcaaaaguaaaacuaaucaaacaagaacuagacaaauauaaaaaugcaguaacagaauuacaauuauuaaugcaauccacaccagcugcaaacaaccgagcccgaagagaacuaccaagauucaugaacuacacacuaaacaacaccaaaaauaacaacgucacccuaucuaaaaaacguaaaagaagauucuuaggauuccucuuaggagucggauccgcaauagcaagcggcauagccguauguaaaguccuacacuuagaaggugaagugaauaaaauaaaaaacgcccuauuaagcacuaacaaagcaguagucucccuaucaaacggaguuucaguacucacauucaaaguacucgaccucaaaaacuacaucgacaaacaacuuuuaccaauucuaaacaaacaaucaugcuccauaucuaauaucgaaaccgucaucgaauuucaacaaaaaaacaauagacuacuagaaauaacuagagaauuuucaguaaacgccggcguuacgacaccagucucuacauacauguuaaccaauucagaacucuuaucauuaaucaacgacaugccaauaacaaacgaccaaaaaaaacuaauguccaauaacguacaaauagucagacaacaaucauacucaauuaugugcauaauaaaagaagaaguacuagcuuacguaguacaacucccccuauacggcguaauagacacuccauguuggaaauuacacacaucaccauuauguaccaccaauacaaaagaaggcucaaacauaugccuaacaagaacagauagaggaugguauugcgacaacgcaggcucaguuuccuuuuucccccaagcagaaaccugcaaaguacaaucaaaucguguuuuuugcgacaccaugaacucacucacauuaccaucagaaguaaaccuaugcaacauagacauauucaacccaaaauacgacugcaaaaucaugacaucaaaaacagacguauccucuucaguaauuacuagcuuaggagcaauagucucuuguuauggaaaaacaaaaugcacagccaguaacaaaaaccgcggaauaauaaaaaccuucucaaacgguugcgauuacgucucuaacaaaggagucgacacaguaucaguaggcaauacauuauacuacguuaacaaacaagaaggaaaaucuuuauacgucaaaggagaacccauuauaaacuuuuacgacccauuagucuucccuuccgacgaauuugacgccagcauuucacaaguaaacgaaaaaauaaaccaaucacucgcauuuauaagaaaaucugacgaauuacuccacaacguaaacguaggaaaauccacaacaaacauaaugauaacaaccauaaucaucgucauaauagucauacuucuccuauuaauugcaguaggcuuauuccuauacuguaaagcacgauaaggacuagugaagggaacacccaaauuuaauucagccuuaagcacaauuaauuaagagugaaacguaauuguacaagcaguuggucacccaccauagggcaugaucaacaccgcaaccuuuccuuuuucccccagugauucugaaaaaccccucuucccuucagcuugcuuagauguuccaaauuuaguaagcuuaaggcggccuacagaagaaaaagaaaaaaaaggccacaaaaguucccucucacuuucaguaaauaaaauaaaagcagcaacagaaauaaagaaauaaaugaaauucaaaaugaaauaaauauuguguugugcagcauuaaaaaaucaauaaaaauuaaaaaugagcaagaucuaaaaaaaaaaaaaaaaaaaaaaaaaaaaaaaaaaaaaaaaaaaaaaaaaaaaaaaaaaaaaaaaugcaucccccccccccccccccccccccccccccccaaaggcucuuuucagagccaccagaauu

SEQ ID NO: 13081 - RNA, 2234 nt, Artificial Sequence
  mRNA product Design f-4 comprising derived and/or modified sequence from HRSV(Memphis-37)__AIY60640.1__F-del_DSCav1 (opt11)
gggagagucccgcagucggcguccagcggcucugcuuguucgugugugugucguugcaggccuuauucaagcuuaccauggaacuaccaauccuaaaaacuaacgcaaucaccacaauccucgccgccgucacccuuugcuuugcguccucccaaaacauuacugaagaguucuaccaauccacgugcuccgccgucuccaaagguuaccuauccgcccuuaggaccggcugguacaccagcgucaucaccaucgaacuuuccaacaucaaagaaaacaaauguaacggcaccgacgcaaaagucaaacuuauuaaacaggaacucgacaaauauaagaaugccgucaccgaauuacaacuccucaugcaauccacccccgccgccaacaaccgagcaaggcgcgaacucccucgauucaugaauuacacccucaacaauaccaaaaacaacaacgucacccuauccaagaaacgcaaaagacgcuucuugggcuuccuccucggcgugggcuccgcaauagccuccgguauugccgugugcaaagucuuacaccucgaaggcgaggucaacaaaaucaaaaacgcccuccucuccaccaacaaagccgucgucagccuauccaacggcguuuccguccucaccuucaaaguacucgaccucaaaaacuacaucgacaaacaacuccuacccauacuaaacaaacaauccugcuccauuuccaacaucgaaaccguaaucgaguuccaacagaaaaacaaucgccuccuagaaaucacacgugaauuuucaguuaacgccggaguaacaacuccuguaucuaccuacaugcucaccaauuccgaacuccucagccucauaaacgacaugccaauaacaaacgaccaaaagaaacucaugucuaacaacguacaaaucgucagacaacaaaguuacucaaucauguguaucaucaaagaggaaguccuagcauacgugguccaacucccccucuacggaguaaucgacaccccaugcuggaaacuacacaccagcccccucuguaccacaaacacgaaagaagguuccaacaucugccugacccgaaccgaccgcggcugguacugcgauaacgcuggcuccgucucauucuucccccaagcagaaaccugcaaaguacaauccaaccgaguauucugcgacaccaugaacucacucacccuccccagcgaaguaaaccucugcaacaucgacauauucaacccaaaauacgacugcaaaauuaugaccucuaaaacagacguauccuccucuguaaucacaucccucggggccaucgucuccugcuacggcaaaaccaaaugcaccgccuccaacaaaaaccgcggaaucauaaaaaccuucuccaacggaugcgacuacgucucaaauaaaggcgucgacaccgucuccgucggcaacacgcuauacuacgucaacaaacaagaaggcaaaucacucuacgucaaaggugagcccaucaucaauuucuacgauccccucgucuucccaagcgacgaguucgacgccagcauaucccaaguaaacgagaaaaucaaccaaagccuggccuucauccgcaaauccgacgaacuacuacacaacguaaacguaggcaaguccacuaccaacauaaugaucaccacaaucaucauagucauaaucguuauacuacuccugcucaucgccguaggccucuuccucuauugcaaagcccgauagggacuagugaagggaacacccaaauuuaauucagccuuaagcacaauuaauuaagagugaaacguaauuguacaagcaguuggucacccaccauagggcaugaucaacaccgcaaccuuuccuuuuucccccagugauucugaaaaaccccucuucccuucagcuugcuuagauguuccaaauuuaguaagcuuaaggcggccuacagaagaaaaagaaaaaaaaggccacaaaaguucccucucacuuucaguaaauaaaauaaaagcagcaacagaaauaaagaaauaaaugaaauucaaaaugaaauaaauauuguguugugcagcauuaaaaaaucaauaaaaauuaaaaaugagcaagaucuaaaaaaaaaaaaaaaaaaaaaaaaaaaaaaaaaaaaaaaaaaaaaaaaaaaaaaaaaaaaaaaaugcaucccccccccccccccccccccccccccccccaaaggcucuuuucagagccaccagaauu

SEQ ID NO: 13082 - RNA, 2010 nt, Artificial Sequence
  mRNA product Design f-5 comprising derived and/or modified sequence from HRSV(Memphis-37)__AIY60640.1__F-del_DSCav1 (opt1)
gggagacuuucccauucuguagcagaauuugguguugccuguggucuuggucccgcggagaagcuuaccauggagcugcccauccucaagaccaacgccaucaccacgauccuggccgcggugacccugugcuucgccagcucccagaacaucaccgaggaguucuaccagagcacgugcuccgccgucagcaagggcuaccucuccgcccugcgcaccgggugguacaccagcgugaucaccaucgagcuguccaacaucaaggagaacaagugcaacggcaccgacgccaaggugaagcucaucaagcaggagcuggacaaguacaagaacgcggucacggagcugcagcuccugaugcagagcaccccggccgccaacaaccgggcccgccgggagcugccccgcuucaugaacuacacccucaacaacaccaagaacaacaacgugacgcuguccaagaagcggaagcgccgguuccugggguuccuccugggcguggggagcgcgaucgccuccggcaucgccgucugcaaggugcugcaccucgagggcgaggugaacaagaucaagaacgcccugcuguccaccaacaaggccgucgugagccucuccaacggggugagcguccugaccuucaaggugcuggaccucaagaacuacaucgacaagcagcugcugcccauccugaacaagcagagcugcuccaucagcaacaucgagaccgucaucgaguuccagcagaagaacaaccgccuccuggagaucacgcgggaguucagcgugaacgcgggcgugaccacccccgucuccaccuacaugcugacgaacagcgagcuccugucccugaucaacgacaugccgaucaccaacgaccagaagaagcucaugagcaacaacgugcagaucgugcgccagcaguccuacagcaucaugugcaucaucaaggaggagguccuggccuacguggugcagcugccccucuacggggucaucgacacccccugcuggaagcugcacaccagcccccugugcacgaccaacaccaaggagggcuccaacaucugccucacccggacggaccgcgggugguacugcgacaacgccggcagcguguccuucuucccgcaggccgagaccugcaagguccagagcaaccggguguucugcgacaccaugaacucccugacccugcccagcgaggugaaccucugcaacaucgacaucuucaaccccaaguacgacugcaagaucaugacguccaagaccgacgucagcuccagcgugaucaccucccugggcgccaucgugagcugcuacgggaagaccaagugcacggcgagcaacaagaaccgcggcaucaucaagaccuucuccaacgggugcgacuacgucagcaacaagggcguggacaccguguccgucggcaacacccuguacuacgugaacaagcaggagggcaagagccucuacgugaagggggagcccaucaucaacuucuacgacccgcuggucuuccccuccgacgaguucgacgccagcaucucccaggugaacgagaagaucaaccagagccuggccuucauccggaaguccgacgagcuccugcacaacgugaacgucggcaagagcaccacgaacaucaugaucaccaccaucaucaucgugaucaucgugauccugcugcuccugaucgccgucgggcuguuccucuacugcaaggcccgcugaggacuaguacuggcugcaucucccuuuccucuguccuccauccuucucccaggauggugaagggggaccugguacccagugauccccaccccaggauccuaaaucaugacuuaccugcuaauaaaaacucauuggaaaagugagaagaucuaaaaaaaaaaaaaaaaaaaaaaaaaaaaaaaaaaaaaaaaaaaaaaaaaaaaaaaaaaaaaaaaugcaucccccccccccccccccccccccccccccccaaaggcucuuuucagagccaccagaauu

SEQ ID NO: 13083 - RNA, 2010 nt, Artificial Sequence
  mRNA product Design f-5 comprising derived and/or modified sequence from HRSV(Memphis-37)__AIY60640.1__F-del_DSCav1 (opt1)
gggagacuuucccauucuguagcagaauuugguguugccuguggucuuggucccgcggagaagcuuaccauggagcugcccauccucaagaccaacgccaucaccacgauccuggccgcggugacccugugcuucgccagcucccagaacaucaccgaggaguucuaccagagcacgugcuccgccgucagcaagggcuaccucuccgcccugcgcaccgggugguacaccagcgugaucaccaucgagcuguccaacaucaaggagaacaagugcaacggcaccgacgccaaggugaagcucaucaagcaggagcuggacaaguacaagaacgcggucacggagcugcagcuccugaugcagagcaccccggccgccaacaaccgggcccgccgggagcugccccgcuucaugaacuacacccucaacaacaccaagaacaacaacgugacgcuguccaagaagcggaagcgccgguuccugggguuccuccugggcguggggagcgcgaucgccuccggcaucgccgucugcaaggugcugcaccucgagggcgaggugaacaagaucaagaacgcccugcugagcaccaacaaggccgucgugucccucagcaacgggguguccguccugaccuucaaggugcuggaccucaagaacuacaucgacaagcagcugcugcccauccucaacaagcagagcugcuccaucagcaacaucgagaccgugaucgaguuccagcagaagaacaaccgccugcuggagaucacgcgggaguucuccgucaacgcgggcgugaccacccccgugagcaccuacaugcucacgaacagcgagcugcugucccucaucaacgacaugccgaucaccaacgaccagaagaagcugaugagcaacaacguccagaucgugcgccagcaguccuacagcaucaugugcaucaucaaggaggaggugcuggccuacgucgugcagcucccccuguacggggugaucgacacccccugcuggaagcugcacaccagcccccucugcacgaccaacaccaaggagggcagcaacaucugccugacccggacggaccgcgggugguacugcgacaacgccggcuccgucagcuucuucccgcaggccgagaccugcaaggugcaguccaaccgggucuucugcgacaccaugaacagccugacccuccccuccgaggugaaccugugcaacaucgacaucuucaaccccaaguacgacugcaagaucaugacgagcaagaccgacguguccagcuccgucaucaccagccugggcgccaucguguccugcuacgggaagaccaagugcacggcgagcaacaagaaccgcggcaucaucaagaccuucuccaacgggugcgacuacgugagcaacaagggcgucgacaccgugagcgugggcaacacccucuacuacgucaacaagcaggaggggaagucccuguacgugaagggcgagcccaucaucaacuucuacgacccgcugguguuccccagcgacgaguucgacgccuccaucagccaggucaacgagaagaucaaccagucccucgccuucauccggaaguccgacgagcugcugcacaacgugaacguggggaaguccaccacgaacaucaugaucaccaccaucaucaucgucaucaucgugauccugcuccugcugaucgccgugggccucuuccuguacugcaaggcccgcugaggacuaguacuggcugcaucucccuuuccucuguccuccauccuucucccaggauggugaagggggaccugguacccagugauccccaccccaggauccuaaaucaugacuuaccugcuaauaaaaacucauuggaaaagugagaagaucuaaaaaaaaaaaaaaaaaaaaaaaaaaaaaaaaaaaaaaaaaaaaaaaaaaaaaaaaaaaaaaaaugcaucccccccccccccccccccccccccccccccaaaggcucuuuucagagccaccagaauu

SEQ ID NO: 13084 - RNA, 2010 nt, Artificial Sequence
  mRNA product Design f-5 comprising derived and/or modified sequence from HRSV(Memphis-37)__AIY60640.1__F-del_DSCav1 (opt2)
gggagacuuucccauucuguagcagaauuugguguugccuguggucuuggucccgcggagaagcuuaccauggagcuccccauccucaagaccaacgccaucaccaccauccucgccgccgucacccucugcuucgccuccucccagaacaucaccgaggaguucuaccaguccaccugcuccgccgucuccaagggcuaccucuccgcccuccgcaccggcugguacaccuccgucaucaccaucgagcucuccaacaucaaggagaacaagugcaacggcaccgacgccaaggucaagcucaucaagcaggagcucgacaaguacaagaacgccgucaccgagcuccagcuccucaugcaguccacccccgccgccaacaaccgcgcccgccgcgagcucccccgcuucaugaacuacacccucaacaacaccaagaacaacaacgucacccucuccaagaagcgcaagcgccgcuuccucggcuuccuccucggcgucggcuccgccaucgccuccggcaucgccgucugcaagguccuccaccucgagggcgaggucaacaagaucaagaacgcccuccucuccaccaacaaggccgucgucucccucuccaacggcgucuccguccucaccuucaagguccucgaccucaagaacuacaucgacaagcagcuccuccccauccucaacaagcaguccugcuccaucuccaacaucgagaccgucaucgaguuccagcagaagaacaaccgccuccucgagaucacccgcgaguucuccgucaacgccggcgucaccacccccgucuccaccuacaugcucaccaacuccgagcuccucucccucaucaacgacaugcccaucaccaacgaccagaagaagcucauguccaacaacguccagaucguccgccagcaguccuacuccaucaugugcaucaucaaggaggagguccucgccuacgucguccagcucccccucuacggcgucaucgacacccccugcuggaagcuccacaccuccccccucugcaccaccaacaccaaggagggcuccaacaucugccucacccgcaccgaccgcggcugguacugcgacaacgccggcuccgucuccuucuucccccaggccgagaccugcaagguccaguccaaccgcgucuucugcgacaccaugaacucccucacccuccccuccgaggucaaccucugcaacaucgacaucuucaaccccaaguacgacugcaagaucaugaccuccaagaccgacgucuccuccuccgucaucaccucccucggcgccaucgucuccugcuacggcaagaccaagugcaccgccuccaacaagaaccgcggcaucaucaagaccuucuccaacggcugcgacuacgucuccaacaagggcgucgacaccgucuccgucggcaacacccucuacuacgucaacaagcaggagggcaagucccucuacgucaagggcgagcccaucaucaacuucuacgacccccucgucuuccccuccgacgaguucgacgccuccaucucccaggucaacgagaagaucaaccagucccucgccuucauccgcaaguccgacgagcuccuccacaacgucaacgucggcaaguccaccaccaacaucaugaucaccaccaucaucaucgucaucaucgucauccuccuccuccucaucgccgucggccucuuccucuacugcaaggcccgcugaggacuaguacuggcugcaucucccuuuccucuguccuccauccuucucccaggauggugaagggggaccugguacccagugauccccaccccaggauccuaaaucaugacuuaccugcuaauaaaaacucauuggaaaagugagaagaucuaaaaaaaaaaaaaaaaaaaaaaaaaaaaaaaaaaaaaaaaaaaaaaaaaaaaaaaaaaaaaaaaugcaucccccccccccccccccccccccccccccccaaaggcucuuuucagagccaccagaauu

SEQ ID NO: 13085 - RNA, 2010 nt, Artificial Sequence
  mRNA product Design f-5 comprising derived and/or modified sequence from HRSV(Memphis-37)__AIY60640.1__F-del_DSCav1 (opt3)
gggagacuuucccauucuguagcagaauuugguguugccuguggucuuggucccgcggagaagcuuaccauggagcugcccauccucaagaccaacgccauuacaacuauacuugcugcagugacgcugugcuucgccagcucccagaauaucaccgaagaguuuuaccaaucuacauguucagcggucaguaaaggcuauuugagcgcuuuaagaacugggugguacaccuccguuauuacaaucgaacugucuaacauuaaggagaauaaaugcaacggaaccgacgccaaggugaaacuaaucaagcaggaacucgauaaguauaaaaaugcaguaacugagcugcagcuucugaugcagucgaccccugccgcuaacaauagggcacggcgcgaguugccacgauucaugaacuacacacucaauaacacgaagaauaacaaugugacucugagcaaaaagcguaaaagaagguuucuggguuuccucuuaggcgucgggucagccauagcuaguggaaucgccguguguaagguucugcaccuugaaggcgaggugaacaagauuaaaaaugcguugcuguccaccaacaaggcagucgugucucuaagcaacgguguauccguucucacauuuaaagugcuggaccuuaagaauuauaucgauaaacaacuguugccgauucucaacaagcagucaugcaguaucagcaauauagaaacugucauugaguuccagcagaaaaacaaucggcuguuagagaucacccgcgaauuuucugugaacgccggggugacaacccccgucuccacguacaugcugacuaauucagagcuccuuagccugauuaacgacaugccuaucacaaaugaucaaaagaaguugaugaguaacaauguucagaucgugagacagcagucuuauuccauuauguguauaaucaaagaagagguacuagcuuacgugguccaacugccacucuacggagugauugacacccccugcuggaagcugcauacuagcccucuuuguacaaccaacacgaaagaaggcucgaauaucugccugaccaggacagaucggggcugguauugugacaacgccgggucuguuuccuucuuuccacaggcagagacuugcaaggugcagucaaaucgcgucuucugugauaccaugaacaguuugacacuccccagcgaggugaaccugugcaauauagacauuuuuaacccuaaauacgauugcaagaucaugacuuccaagaccgacguaucuagcucaguuaucacaaguuuaggagcuauuguguccuguuaugguaaaaccaagugcacugccagcaauaaaaaccgaggcaucauuaagacguucucuaaugggugugauuacgucucaaacaaaggaguggacacagucagugugggcaauacccuguauuacguuaacaagcaagaagguaagagccuauaugugaaaggggagccaauaaucaauuuuuacgacccgcucguauuccccuccgaugaguucgacgcgucuauuucgcaggucaacgaaaagaucaaucagagccuggccuuuaucagaaaauccgaugaacuuuugcacaacgugaauguuggaaagucaacuaccaacauuaugauaacaaccaucauuaucgugauuaucgucauacugcuccugcuuaucgcagugggccuguucuuguacugcaaagcuaggugaggacuaguacuggcugcaucucccuuuccucuguccuccauccuucucccaggauggugaagggggaccugguacccagugauccccaccccaggauccuaaaucaugacuuaccugcuaauaaaaacucauuggaaaagugagaagaucuaaaaaaaaaaaaaaaaaaaaaaaaaaaaaaaaaaaaaaaaaaaaaaaaaaaaaaaaaaaaaaaaugcaucccccccccccccccccccccccccccccccaaaggcucuuuucagagccaccagaauu

SEQ ID NO: 13086 - RNA, 2010 nt, Artificial Sequence
  mRNA product Design f-5 comprising derived and/or modified sequence from HRSV(Memphis-37)__AIY60640.1__F-del_DSCav1 (opt4)
gggagacuuucccauucuguagcagaauuugguguugccuguggucuuggucccgcggagaagcuuaccauggagcugcccauccugaagaccaacgccaucaccaccauccuggccgccgugacccugugcuucgccagcagccagaacaucaccgaggaguucuaccagagcaccugcagcgccgugagcaagggcuaccugagcgcccugagaaccggcugguacaccagcgugaucaccaucgagcugagcaacaucaaggagaacaagugcaacggcaccgacgccaaggugaagcugaucaagcaggagcuggacaaguacaagaacgccgugaccgagcugcagcugcugaugcagagcacccccgccgccaacaacagagccagaagagagcugcccagauucaugaacuacacccugaacaacaccaagaacaacaacgugacccugagcaagaagagaaagagaagauuccugggcuuccugcugggcgugggcagcgccaucgccagcggcaucgccgugugcaaggugcugcaccuggagggcgaggugaacaagaucaagaacgcccugcugagcaccaacaaggccguggugagccugagcaacggcgugagcgugcugaccuucaaggugcuggaccugaagaacuacaucgacaagcagcugcugcccauccugaacaagcagagcugcagcaucagcaacaucgagaccgugaucgaguuccagcagaagaacaacagacugcuggagaucaccagagaguucagcgugaacgccggcgugaccacccccgugagcaccuacaugcugaccaacagcgagcugcugagccugaucaacgacaugcccaucaccaacgaccagaagaagcugaugagcaacaacgugcagaucgugagacagcagagcuacagcaucaugugcaucaucaaggaggaggugcuggccuacguggugcagcugccccuguacggcgugaucgacacccccugcuggaagcugcacaccagcccccugugcaccaccaacaccaaggagggcagcaacaucugccugaccagaaccgacagaggcugguacugcgacaacgccggcagcgugagcuucuucccccaggccgagaccugcaaggugcagagcaacagaguguucugcgacaccaugaacagccugacccugcccagcgaggugaaccugugcaacaucgacaucuucaaccccaaguacgacugcaagaucaugaccagcaagaccgacgugagcagcagcgugaucaccagccugggcgccaucgugagcugcuacggcaagaccaagugcaccgccagcaacaagaacagaggcaucaucaagaccuucagcaacggcugcgacuacgugagcaacaagggcguggacaccgugagcgugggcaacacccuguacuacgugaacaagcaggagggcaagagccuguacgugaagggcgagcccaucaucaacuucuacgacccccugguguuccccagcgacgaguucgacgccagcaucagccaggugaacgagaagaucaaccagagccuggccuucaucagaaagagcgacgagcugcugcacaacgugaacgugggcaagagcaccaccaacaucaugaucaccaccaucaucaucgugaucaucgugauccugcugcugcugaucgccgugggccuguuccuguacugcaaggccagaugaggacuaguacuggcugcaucucccuuuccucuguccuccauccuucucccaggauggugaagggggaccugguacccagugauccccaccccaggauccuaaaucaugacuuaccugcuaauaaaaacucauuggaaaagugagaagaucuaaaaaaaaaaaaaaaaaaaaaaaaaaaaaaaaaaaaaaaaaaaaaaaaaaaaaaaaaaaaaaaaugcaucccccccccccccccccccccccccccccccaaaggcucuuuucagagccaccagaauu

SEQ ID NO: 13087 - RNA, 2010 nt, Artificial Sequence
  mRNA product Design f-5 comprising derived and/or modified sequence from HRSV(Memphis-37)__AIY60640.1__F-del_DSCav1 (opt5)
gggagacuuucccauucuguagcagaauuugguguugccuguggucuuggucccgcggagaagcuuaccauggagcugcccauccucaagaccaacgccauuacaacgauccuggcugccgugacccuuugcuucgcgagcucccagaauauuacagaagaguuuuaccaaucuaccuguagcgcugucuccaaaggcuaucugucugcccucagaacagggugguacaccagcguuaucacaauugaacuguccaacaucaaggagaauaaaugcaacggaaccgacgccaaggugaaacuuaucaagcaggaacuggauaaguauaaaaaugcugugacggagcuccagcugcugaugcagucuaccccugccgcuaacaaucgggcccgcagagagcucccgcgguucaugaacuacacacugaauaacaccaagaauaacaaugucacacuuagcaaaaagcgcaaaagacgguuucugggcuuccuccugggggugggauccgcgauugccagcggcaucgcuguuuguaaggugcuucaccuggaaggggaggucaacaagauuaaaaaugcccuccugucuaccaacaaggcugugguuucccugagcaacggagugucuguccucacguuuaaagugcuggaccuuaagaauuauaucgauaaacaacugcuccccauucugaacaagcaguccugcagcaucucuaauauugaaacagugaucgaguuccagcagaaaaacaaucgccuucuggagaucaccagagaauuuuccgucaacgccggcguuacaaccccugugagcaccuacaugcucacaaauuccgagcugcugucucucauuaacgacaugcccaucacgaaugaucaaaagaagcugaugagcaacaaugugcagauuguccggcagcaguccuauagcaucauguguauuaucaaagaagaggugcuugcguacguugugcaacugccucucuacggcgucaucgacacccccugcuggaagcugcauacaucuccucuuuguaccacaaacaccaaagaaggguccaauauuugccugacgcgcacagauagaggaugguauugugacaacgccggcagcgugucuuucuuuccgcaggcugagaccugcaagguucagagcaaucggguguucugugauaccaugaacucccucacacugcccucugaggucaaccugugcaauaucgacauuuuuaacccuaaauacgauugcaagaucaugaccagcaagacagacguguccagcucugucauuacgucccucggggccaucgugagcuguuauggaaaaaccaagugcacagcuucuaauaaaaaccgcggcaucauuaagaccuucuccaaugggugugauuacguuagcaacaaaggaguggacacagucuccgugggcaauacccuguauuacguuaacaagcaagaaggcaagucucuuuaugugaaaggggagcccaucauuaauuuuuacgacccucuggucuuccccagcgaugaguucgacgccuccaucucucaggugaacgaaaagauuaaucagagccucgccuuuaucagaaaauccgaugaacugcugcacaacgugaauguuggaaagagcacgaccaacauuaugaucacaaccaucauuaucgucauuaucgugauucuucuccugcugaucgcugugggccucuuccuguacugcaaagcgcggugaggacuaguacuggcugcaucucccuuuccucuguccuccauccuucucccaggauggugaagggggaccugguacccagugauccccaccccaggauccuaaaucaugacuuaccugcuaauaaaaacucauuggaaaagugagaagaucuaaaaaaaaaaaaaaaaaaaaaaaaaaaaaaaaaaaaaaaaaaaaaaaaaaaaaaaaaaaaaaaaugcaucccccccccccccccccccccccccccccccaaaggcucuuuucagagccaccagaauu

SEQ ID NO: 13088 - RNA, 2010 nt, Artificial Sequence
  mRNA product Design f-5 comprising derived and/or modified sequence from HRSV(Memphis-37)__AIY60640.1__F-del_DSCav1 (opt6)
gggagacuuucccauucuguagcagaauuugguguugccuguggucuuggucccgcggagaagcuuaccauggaauuaccaauccuuaaaacaaacgcaauaacaaccauccucgcagcaguaacucucugcuucgcuucaucucaaaacaucacagaagaauuuuaccaaagcacaugcucagcuguauccaaagguuaucuaucagccuugagaaccggaugguacacaucaguaauaacaauugaacuaucaaacauuaaagaaaacaaaugcaacggcaccgacgcaaaaguaaaacuaaucaaacaagaacuagacaaauauaaaaaugcaguaacagaauuacaauuauuaaugcaauccacaccagcugcaaacaaccgagcccgaagagaacuaccaagauucaugaacuacacacuaaacaacaccaaaaauaacaacgucacccuaucuaaaaaacguaaaagaagauucuuaggauuccucuuaggagucggauccgcaauagcaagcggcauagccguauguaaaguccuacacuuagaaggugaagugaauaaaauaaaaaacgcccuauuaagcacuaacaaagcaguagucucccuaucaaacggaguuucaguacucacauucaaaguacucgaccucaaaaacuacaucgacaaacaacuuuuaccaauucuaaacaaacaaucaugcuccauaucuaauaucgaaaccgucaucgaauuucaacaaaaaaacaauagacuacuagaaauaacuagagaauuuucaguaaacgccggcguuacgacaccagucucuacauacauguuaaccaauucagaacucuuaucauuaaucaacgacaugccaauaacaaacgaccaaaaaaaacuaauguccaauaacguacaaauagucagacaacaaucauacucaauuaugugcauaauaaaagaagaaguacuagcuuacguaguacaacucccccuauacggcguaauagacacuccauguuggaaauuacacacaucaccauuauguaccaccaauacaaaagaaggcucaaacauaugccuaacaagaacagauagaggaugguauugcgacaacgcaggcucaguuuccuuuuucccccaagcagaaaccugcaaaguacaaucaaaucguguuuuuugcgacaccaugaacucacucacauuaccaucagaaguaaaccuaugcaacauagacauauucaacccaaaauacgacugcaaaaucaugacaucaaaaacagacguauccucuucaguaauuacuagcuuaggagcaauagucucuuguuauggaaaaacaaaaugcacagccaguaacaaaaaccgcggaauaauaaaaaccuucucaaacgguugcgauuacgucucuaacaaaggagucgacacaguaucaguaggcaauacauuauacuacguuaacaaacaagaaggaaaaucuuuauacgucaaaggagaacccauuauaaacuuuuacgacccauuagucuucccuuccgacgaauuugacgccagcauuucacaaguaaacgaaaaaauaaaccaaucacucgcauuuauaagaaaaucugacgaauuacuccacaacguaaacguaggaaaauccacaacaaacauaaugauaacaaccauaaucaucgucauaauagucauacuucuccuauuaauugcaguaggcuuauuccuauacuguaaagcacgauaaggacuaguacuggcugcaucucccuuuccucuguccuccauccuucucccaggauggugaagggggaccugguacccagugauccccaccccaggauccuaaaucaugacuuaccugcuaauaaaaacucauuggaaaagugagaagaucuaaaaaaaaaaaaaaaaaaaaaaaaaaaaaaaaaaaaaaaaaaaaaaaaaaaaaaaaaaaaaaaaugcaucccccccccccccccccccccccccccccccaaaggcucuuuucagagccaccagaauu

SEQ ID NO: 13089 - RNA, 2010 nt, Artificial Sequence
  mRNA product Design f-5 comprising derived and/or modified sequence from HRSV(Memphis-37)__AIY60640.1__F-del_DSCav1 (opt11)
gggagacuuucccauucuguagcagaauuugguguugccuguggucuuggucccgcggagaagcuuaccauggaacuaccaauccuaaaaacuaacgcaaucaccacaauccucgccgccgucacccuuugcuuugcguccucccaaaacauuacugaagaguucuaccaauccacgugcuccgccgucuccaaagguuaccuauccgcccuuaggaccggcugguacaccagcgucaucaccaucgaacuuuccaacaucaaagaaaacaaauguaacggcaccgacgcaaaagucaaacuuauuaaacaggaacucgacaaauauaagaaugccgucaccgaauuacaacuccucaugcaauccacccccgccgccaacaaccgagcaaggcgcgaacucccucgauucaugaauuacacccucaacaauaccaaaaacaacaacgucacccuauccaagaaacgcaaaagacgcuucuugggcuuccuccucggcgugggcuccgcaauagccuccgguauugccgugugcaaagucuuacaccucgaaggcgaggucaacaaaaucaaaaacgcccuccucuccaccaacaaagccgucgucagccuauccaacggcguuuccguccucaccuucaaaguacucgaccucaaaaacuacaucgacaaacaacuccuacccauacuaaacaaacaauccugcuccauuuccaacaucgaaaccguaaucgaguuccaacagaaaaacaaucgccuccuagaaaucacacgugaauuuucaguuaacgccggaguaacaacuccuguaucuaccuacaugcucaccaauuccgaacuccucagccucauaaacgacaugccaauaacaaacgaccaaaagaaacucaugucuaacaacguacaaaucgucagacaacaaaguuacucaaucauguguaucaucaaagaggaaguccuagcauacgugguccaacucccccucuacggaguaaucgacaccccaugcuggaaacuacacaccagcccccucuguaccacaaacacgaaagaagguuccaacaucugccugacccgaaccgaccgcggcugguacugcgauaacgcuggcuccgucucauucuucccccaagcagaaaccugcaaaguacaauccaaccgaguauucugcgacaccaugaacucacucacccuccccagcgaaguaaaccucugcaacaucgacauauucaacccaaaauacgacugcaaaauuaugaccucuaaaacagacguauccuccucuguaaucacaucccucggggccaucgucuccugcuacggcaaaaccaaaugcaccgccuccaacaaaaaccgcggaaucauaaaaaccuucuccaacggaugcgacuacgucucaaauaaaggcgucgacaccgucuccgucggcaacacgcuauacuacgucaacaaacaagaaggcaaaucacucuacgucaaaggugagcccaucaucaauuucuacgauccccucgucuucccaagcgacgaguucgacgccagcauaucccaaguaaacgagaaaaucaaccaaagccuggccuucauccgcaaauccgacgaacuacuacacaacguaaacguaggcaaguccacuaccaacauaaugaucaccacaaucaucauagucauaaucguuauacuacuccugcucaucgccguaggccucuuccucuauugcaaagcccgauagggacuaguacuggcugcaucucccuuuccucuguccuccauccuucucccaggauggugaagggggaccugguacccagugauccccaccccaggauccuaaaucaugacuuaccugcuaauaaaaacucauuggaaaagugagaagaucuaaaaaaaaaaaaaaaaaaaaaaaaaaaaaaaaaaaaaaaaaaaaaaaaaaaaaaaaaaaaaaaaugcaucccccccccccccccccccccccccccccccaaaggcucuuuucagagccaccagaauu

SEQ ID NO: 13090 - RNA, 2006 nt, Artificial Sequence
  mRNA product Design g-1 comprising derived and/or modified sequence from HRSV(Memphis-37)__AIY60640.1__F-del_DSCav1 (opt1)
gggagacuuucccauucuguagcagaauuugguguugccuguggucuuggucccgcggagaagcuuaccauggagcugcccauccucaagaccaacgccaucaccacgauccuggccgcggugacccugugcuucgccagcucccagaacaucaccgaggaguucuaccagagcacgugcuccgccgucagcaagggcuaccucuccgcccugcgcaccgggugguacaccagcgugaucaccaucgagcuguccaacaucaaggagaacaagugcaacggcaccgacgccaaggugaagcucaucaagcaggagcuggacaaguacaagaacgcggucacggagcugcagcuccugaugcagagcaccccggccgccaacaaccgggcccgccgggagcugccccgcuucaugaacuacacccucaacaacaccaagaacaacaacgugacgcuguccaagaagcggaagcgccgguuccugggguuccuccugggcguggggagcgcgaucgccuccggcaucgccgucugcaaggugcugcaccucgagggcgaggugaacaagaucaagaacgcccugcuguccaccaacaaggccgucgugagccucuccaacggggugagcguccugaccuucaaggugcuggaccucaagaacuacaucgacaagcagcugcugcccauccugaacaagcagagcugcuccaucagcaacaucgagaccgucaucgaguuccagcagaagaacaaccgccuccuggagaucacgcgggaguucagcgugaacgcgggcgugaccacccccgucuccaccuacaugcugacgaacagcgagcuccugucccugaucaacgacaugccgaucaccaacgaccagaagaagcucaugagcaacaacgugcagaucgugcgccagcaguccuacagcaucaugugcaucaucaaggaggagguccuggccuacguggugcagcugccccucuacggggucaucgacacccccugcuggaagcugcacaccagcccccugugcacgaccaacaccaaggagggcuccaacaucugccucacccggacggaccgcgggugguacugcgacaacgccggcagcguguccuucuucccgcaggccgagaccugcaagguccagagcaaccggguguucugcgacaccaugaacucccugacccugcccagcgaggugaaccucugcaacaucgacaucuucaaccccaaguacgacugcaagaucaugacguccaagaccgacgucagcuccagcgugaucaccucccugggcgccaucgugagcugcuacgggaagaccaagugcacggcgagcaacaagaaccgcggcaucaucaagaccuucuccaacgggugcgacuacgucagcaacaagggcguggacaccguguccgucggcaacacccuguacuacgugaacaagcaggagggcaagagccucuacgugaagggggagcccaucaucaacuucuacgacccgcuggucuuccccuccgacgaguucgacgccagcaucucccaggugaacgagaagaucaaccagagccuggccuucauccggaaguccgacgagcuccugcacaacgugaacgucggcaagagcaccacgaacaucaugaucaccaccaucaucaucgugaucaucgugauccugcugcuccugaucgccgucgggcuguuccucuacugcaaggcccgcugaggacuaguggaagcauuuuccuggcugauuaaaagaaauuacucagcuauggucaucuguuccuguuagaaggcuaugcagcauauuauauacuaugcgcauguuaugaaaugcauaauaaaaaauuuuaaaaaaucuaaaagaucuaaaaaaaaaaaaaaaaaaaaaaaaaaaaaaaaaaaaaaaaaaaaaaaaaaaaaaaaaaaaaaaaugcaucccccccccccccccccccccccccccccccaaaggcucuuuucagagccaccagaauu

SEQ ID NO: 13091 - RNA, 2006 nt, Artificial Sequence
  mRNA product Design g-1 comprising derived and/or modified sequence from HRSV(Memphis-37)__AIY60640.1__F-del_DSCav1 (opt1)
gggagacuuucccauucuguagcagaauuugguguugccuguggucuuggucccgcggagaagcuuaccauggagcugcccauccucaagaccaacgccaucaccacgauccuggccgcggugacccugugcuucgccagcucccagaacaucaccgaggaguucuaccagagcacgugcuccgccgucagcaagggcuaccucuccgcccugcgcaccgggugguacaccagcgugaucaccaucgagcuguccaacaucaaggagaacaagugcaacggcaccgacgccaaggugaagcucaucaagcaggagcuggacaaguacaagaacgcggucacggagcugcagcuccugaugcagagcaccccggccgccaacaaccgggcccgccgggagcugccccgcuucaugaacuacacccucaacaacaccaagaacaacaacgugacgcuguccaagaagcggaagcgccgguuccugggguuccuccugggcguggggagcgcgaucgccuccggcaucgccgucugcaaggugcugcaccucgagggcgaggugaacaagaucaagaacgcccugcugagcaccaacaaggccgucgugucccucagcaacgggguguccguccugaccuucaaggugcuggaccucaagaacuacaucgacaagcagcugcugcccauccucaacaagcagagcugcuccaucagcaacaucgagaccgugaucgaguuccagcagaagaacaaccgccugcuggagaucacgcgggaguucuccgucaacgcgggcgugaccacccccgugagcaccuacaugcucacgaacagcgagcugcugucccucaucaacgacaugccgaucaccaacgaccagaagaagcugaugagcaacaacguccagaucgugcgccagcaguccuacagcaucaugugcaucaucaaggaggaggugcuggccuacgucgugcagcucccccuguacggggugaucgacacccccugcuggaagcugcacaccagcccccucugcacgaccaacaccaaggagggcagcaacaucugccugacccggacggaccgcgggugguacugcgacaacgccggcuccgucagcuucuucccgcaggccgagaccugcaaggugcaguccaaccgggucuucugcgacaccaugaacagccugacccuccccuccgaggugaaccugugcaacaucgacaucuucaaccccaaguacgacugcaagaucaugacgagcaagaccgacguguccagcuccgucaucaccagccugggcgccaucguguccugcuacgggaagaccaagugcacggcgagcaacaagaaccgcggcaucaucaagaccuucuccaacgggugcgacuacgugagcaacaagggcgucgacaccgugagcgugggcaacacccucuacuacgucaacaagcaggaggggaagucccuguacgugaagggcgagcccaucaucaacuucuacgacccgcugguguuccccagcgacgaguucgacgccuccaucagccaggucaacgagaagaucaaccagucccucgccuucauccggaaguccgacgagcugcugcacaacgugaacguggggaaguccaccacgaacaucaugaucaccaccaucaucaucgucaucaucgugauccugcuccugcugaucgccgugggccucuuccuguacugcaaggcccgcugaggacuaguggaagcauuuuccuggcugauuaaaagaaauuacucagcuauggucaucuguuccuguuagaaggcuaugcagcauauuauauacuaugcgcauguuaugaaaugcauaauaaaaaauuuuaaaaaaucuaaaagaucuaaaaaaaaaaaaaaaaaaaaaaaaaaaaaaaaaaaaaaaaaaaaaaaaaaaaaaaaaaaaaaaaugcaucccccccccccccccccccccccccccccccaaaggcucuuuucagagccaccagaauu

SEQ ID NO: 13092 - RNA, 2006 nt, Artificial Sequence
  mRNA product Design g-1 comprising derived and/or modified sequence from HRSV(Memphis-37)__AIY60640.1__F-del_DSCav1 (opt2)
gggagacuuucccauucuguagcagaauuugguguugccuguggucuuggucccgcggagaagcuuaccauggagcuccccauccucaagaccaacgccaucaccaccauccucgccgccgucacccucugcuucgccuccucccagaacaucaccgaggaguucuaccaguccaccugcuccgccgucuccaagggcuaccucuccgcccuccgcaccggcugguacaccuccgucaucaccaucgagcucuccaacaucaaggagaacaagugcaacggcaccgacgccaaggucaagcucaucaagcaggagcucgacaaguacaagaacgccgucaccgagcuccagcuccucaugcaguccacccccgccgccaacaaccgcgcccgccgcgagcucccccgcuucaugaacuacacccucaacaacaccaagaacaacaacgucacccucuccaagaagcgcaagcgccgcuuccucggcuuccuccucggcgucggcuccgccaucgccuccggcaucgccgucugcaagguccuccaccucgagggcgaggucaacaagaucaagaacgcccuccucuccaccaacaaggccgucgucucccucuccaacggcgucuccguccucaccuucaagguccucgaccucaagaacuacaucgacaagcagcuccuccccauccucaacaagcaguccugcuccaucuccaacaucgagaccgucaucgaguuccagcagaagaacaaccgccuccucgagaucacccgcgaguucuccgucaacgccggcgucaccacccccgucuccaccuacaugcucaccaacuccgagcuccucucccucaucaacgacaugcccaucaccaacgaccagaagaagcucauguccaacaacguccagaucguccgccagcaguccuacuccaucaugugcaucaucaaggaggagguccucgccuacgucguccagcucccccucuacggcgucaucgacacccccugcuggaagcuccacaccuccccccucugcaccaccaacaccaaggagggcuccaacaucugccucacccgcaccgaccgcggcugguacugcgacaacgccggcuccgucuccuucuucccccaggccgagaccugcaagguccaguccaaccgcgucuucugcgacaccaugaacucccucacccuccccuccgaggucaaccucugcaacaucgacaucuucaaccccaaguacgacugcaagaucaugaccuccaagaccgacgucuccuccuccgucaucaccucccucggcgccaucgucuccugcuacggcaagaccaagugcaccgccuccaacaagaaccgcggcaucaucaagaccuucuccaacggcugcgacuacgucuccaacaagggcgucgacaccgucuccgucggcaacacccucuacuacgucaacaagcaggagggcaagucccucuacgucaagggcgagcccaucaucaacuucuacgacccccucgucuuccccuccgacgaguucgacgccuccaucucccaggucaacgagaagaucaaccagucccucgccuucauccgcaaguccgacgagcuccuccacaacgucaacgucggcaaguccaccaccaacaucaugaucaccaccaucaucaucgucaucaucgucauccuccuccuccucaucgccgucggccucuuccucuacugcaaggcccgcugaggacuaguggaagcauuuuccuggcugauuaaaagaaauuacucagcuauggucaucuguuccuguuagaaggcuaugcagcauauuauauacuaugcgcauguuaugaaaugcauaauaaaaaauuuuaaaaaaucuaaaagaucuaaaaaaaaaaaaaaaaaaaaaaaaaaaaaaaaaaaaaaaaaaaaaaaaaaaaaaaaaaaaaaaaugcaucccccccccccccccccccccccccccccccaaaggcucuuuucagagccaccagaauu

SEQ ID NO: 13093 - RNA, 2006 nt, Artificial Sequence
  mRNA product Design g-1 comprising derived and/or modified sequence from HRSV(Memphis-37)__AIY60640.1__F-del_DSCav1 (opt3)
gggagacuuucccauucuguagcagaauuugguguugccuguggucuuggucccgcggagaagcuuaccauggagcugcccauccucaagaccaacgccauuacaacuauacuugcugcagugacgcugugcuucgccagcucccagaauaucaccgaagaguuuuaccaaucuacauguucagcggucaguaaaggcuauuugagcgcuuuaagaacugggugguacaccuccguuauuacaaucgaacugucuaacauuaaggagaauaaaugcaacggaaccgacgccaaggugaaacuaaucaagcaggaacucgauaaguauaaaaaugcaguaacugagcugcagcuucugaugcagucgaccccugccgcuaacaauagggcacggcgcgaguugccacgauucaugaacuacacacucaauaacacgaagaauaacaaugugacucugagcaaaaagcguaaaagaagguuucuggguuuccucuuaggcgucgggucagccauagcuaguggaaucgccguguguaagguucugcaccuugaaggcgaggugaacaagauuaaaaaugcguugcuguccaccaacaaggcagucgugucucuaagcaacgguguauccguucucacauuuaaagugcuggaccuuaagaauuauaucgauaaacaacuguugccgauucucaacaagcagucaugcaguaucagcaauauagaaacugucauugaguuccagcagaaaaacaaucggcuguuagagaucacccgcgaauuuucugugaacgccggggugacaacccccgucuccacguacaugcugacuaauucagagcuccuuagccugauuaacgacaugccuaucacaaaugaucaaaagaaguugaugaguaacaauguucagaucgugagacagcagucuuauuccauuauguguauaaucaaagaagagguacuagcuuacgugguccaacugccacucuacggagugauugacacccccugcuggaagcugcauacuagcccucuuuguacaaccaacacgaaagaaggcucgaauaucugccugaccaggacagaucggggcugguauugugacaacgccgggucuguuuccuucuuuccacaggcagagacuugcaaggugcagucaaaucgcgucuucugugauaccaugaacaguuugacacuccccagcgaggugaaccugugcaauauagacauuuuuaacccuaaauacgauugcaagaucaugacuuccaagaccgacguaucuagcucaguuaucacaaguuuaggagcuauuguguccuguuaugguaaaaccaagugcacugccagcaauaaaaaccgaggcaucauuaagacguucucuaaugggugugauuacgucucaaacaaaggaguggacacagucagugugggcaauacccuguauuacguuaacaagcaagaagguaagagccuauaugugaaaggggagccaauaaucaauuuuuacgacccgcucguauuccccuccgaugaguucgacgcgucuauuucgcaggucaacgaaaagaucaaucagagccuggccuuuaucagaaaauccgaugaacuuuugcacaacgugaauguuggaaagucaacuaccaacauuaugauaacaaccaucauuaucgugauuaucgucauacugcuccugcuuaucgcagugggccuguucuuguacugcaaagcuaggugaggacuaguggaagcauuuuccuggcugauuaaaagaaauuacucagcuauggucaucuguuccuguuagaaggcuaugcagcauauuauauacuaugcgcauguuaugaaaugcauaauaaaaaauuuuaaaaaaucuaaaagaucuaaaaaaaaaaaaaaaaaaaaaaaaaaaaaaaaaaaaaaaaaaaaaaaaaaaaaaaaaaaaaaaaugcaucccccccccccccccccccccccccccccccaaaggcucuuuucagagccaccagaauu

SEQ ID NO: 13094 - RNA, 2006 nt, Artificial Sequence
  mRNA product Design g-1 comprising derived and/or modified sequence from HRSV(Memphis-37)__AIY60640.1__F-del_DSCav1 (opt4)
gggagacuuucccauucuguagcagaauuugguguugccuguggucuuggucccgcggagaagcuuaccauggagcugcccauccugaagaccaacgccaucaccaccauccuggccgccgugacccugugcuucgccagcagccagaacaucaccgaggaguucuaccagagcaccugcagcgccgugagcaagggcuaccugagcgcccugagaaccggcugguacaccagcgugaucaccaucgagcugagcaacaucaaggagaacaagugcaacggcaccgacgccaaggugaagcugaucaagcaggagcuggacaaguacaagaacgccgugaccgagcugcagcugcugaugcagagcacccccgccgccaacaacagagccagaagagagcugcccagauucaugaacuacacccugaacaacaccaagaacaacaacgugacccugagcaagaagagaaagagaagauuccugggcuuccugcugggcgugggcagcgccaucgccagcggcaucgccgugugcaaggugcugcaccuggagggcgaggugaacaagaucaagaacgcccugcugagcaccaacaaggccguggugagccugagcaacggcgugagcgugcugaccuucaaggugcuggaccugaagaacuacaucgacaagcagcugcugcccauccugaacaagcagagcugcagcaucagcaacaucgagaccgugaucgaguuccagcagaagaacaacagacugcuggagaucaccagagaguucagcgugaacgccggcgugaccacccccgugagcaccuacaugcugaccaacagcgagcugcugagccugaucaacgacaugcccaucaccaacgaccagaagaagcugaugagcaacaacgugcagaucgugagacagcagagcuacagcaucaugugcaucaucaaggaggaggugcuggccuacguggugcagcugccccuguacggcgugaucgacacccccugcuggaagcugcacaccagcccccugugcaccaccaacaccaaggagggcagcaacaucugccugaccagaaccgacagaggcugguacugcgacaacgccggcagcgugagcuucuucccccaggccgagaccugcaaggugcagagcaacagaguguucugcgacaccaugaacagccugacccugcccagcgaggugaaccugugcaacaucgacaucuucaaccccaaguacgacugcaagaucaugaccagcaagaccgacgugagcagcagcgugaucaccagccugggcgccaucgugagcugcuacggcaagaccaagugcaccgccagcaacaagaacagaggcaucaucaagaccuucagcaacggcugcgacuacgugagcaacaagggcguggacaccgugagcgugggcaacacccuguacuacgugaacaagcaggagggcaagagccuguacgugaagggcgagcccaucaucaacuucuacgacccccugguguuccccagcgacgaguucgacgccagcaucagccaggugaacgagaagaucaaccagagccuggccuucaucagaaagagcgacgagcugcugcacaacgugaacgugggcaagagcaccaccaacaucaugaucaccaccaucaucaucgugaucaucgugauccugcugcugcugaucgccgugggccuguuccuguacugcaaggccagaugaggacuaguggaagcauuuuccuggcugauuaaaagaaauuacucagcuauggucaucuguuccuguuagaaggcuaugcagcauauuauauacuaugcgcauguuaugaaaugcauaauaaaaaauuuuaaaaaaucuaaaagaucuaaaaaaaaaaaaaaaaaaaaaaaaaaaaaaaaaaaaaaaaaaaaaaaaaaaaaaaaaaaaaaaaugcaucccccccccccccccccccccccccccccccaaaggcucuuuucagagccaccagaauu

SEQ ID NO: 13095 - RNA, 2006 nt, Artificial Sequence
  mRNA product Design g-1 comprising derived and/or modified sequence from HRSV(Memphis-37)__AIY60640.1__F-del_DSCav1 (opt5)
gggagacuuucccauucuguagcagaauuugguguugccuguggucuuggucccgcggagaagcuuaccauggagcugcccauccucaagaccaacgccauuacaacgauccuggcugccgugacccuuugcuucgcgagcucccagaauauuacagaagaguuuuaccaaucuaccuguagcgcugucuccaaaggcuaucugucugcccucagaacagggugguacaccagcguuaucacaauugaacuguccaacaucaaggagaauaaaugcaacggaaccgacgccaaggugaaacuuaucaagcaggaacuggauaaguauaaaaaugcugugacggagcuccagcugcugaugcagucuaccccugccgcuaacaaucgggcccgcagagagcucccgcgguucaugaacuacacacugaauaacaccaagaauaacaaugucacacuuagcaaaaagcgcaaaagacgguuucugggcuuccuccugggggugggauccgcgauugccagcggcaucgcuguuuguaaggugcuucaccuggaaggggaggucaacaagauuaaaaaugcccuccugucuaccaacaaggcugugguuucccugagcaacggagugucuguccucacguuuaaagugcuggaccuuaagaauuauaucgauaaacaacugcuccccauucugaacaagcaguccugcagcaucucuaauauugaaacagugaucgaguuccagcagaaaaacaaucgccuucuggagaucaccagagaauuuuccgucaacgccggcguuacaaccccugugagcaccuacaugcucacaaauuccgagcugcugucucucauuaacgacaugcccaucacgaaugaucaaaagaagcugaugagcaacaaugugcagauuguccggcagcaguccuauagcaucauguguauuaucaaagaagaggugcuugcguacguugugcaacugccucucuacggcgucaucgacacccccugcuggaagcugcauacaucuccucuuuguaccacaaacaccaaagaaggguccaauauuugccugacgcgcacagauagaggaugguauugugacaacgccggcagcgugucuuucuuuccgcaggcugagaccugcaagguucagagcaaucggguguucugugauaccaugaacucccucacacugcccucugaggucaaccugugcaauaucgacauuuuuaacccuaaauacgauugcaagaucaugaccagcaagacagacguguccagcucugucauuacgucccucggggccaucgugagcuguuauggaaaaaccaagugcacagcuucuaauaaaaaccgcggcaucauuaagaccuucuccaaugggugugauuacguuagcaacaaaggaguggacacagucuccgugggcaauacccuguauuacguuaacaagcaagaaggcaagucucuuuaugugaaaggggagcccaucauuaauuuuuacgacccucuggucuuccccagcgaugaguucgacgccuccaucucucaggugaacgaaaagauuaaucagagccucgccuuuaucagaaaauccgaugaacugcugcacaacgugaauguuggaaagagcacgaccaacauuaugaucacaaccaucauuaucgucauuaucgugauucuucuccugcugaucgcugugggccucuuccuguacugcaaagcgcggugaggacuaguggaagcauuuuccuggcugauuaaaagaaauuacucagcuauggucaucuguuccuguuagaaggcuaugcagcauauuauauacuaugcgcauguuaugaaaugcauaauaaaaaauuuuaaaaaaucuaaaagaucuaaaaaaaaaaaaaaaaaaaaaaaaaaaaaaaaaaaaaaaaaaaaaaaaaaaaaaaaaaaaaaaaugcaucccccccccccccccccccccccccccccccaaaggcucuuuucagagccaccagaauu

SEQ ID NO: 13096 - RNA, 2006 nt, Artificial Sequence
  mRNA product Design g-1 comprising derived and/or modified sequence from HRSV(Memphis-37)__AIY60640.1__F-del_DSCav1 (opt6)
gggagacuuucccauucuguagcagaauuugguguugccuguggucuuggucccgcggagaagcuuaccauggaauuaccaauccuuaaaacaaacgcaauaacaaccauccucgcagcaguaacucucugcuucgcuucaucucaaaacaucacagaagaauuuuaccaaagcacaugcucagcuguauccaaagguuaucuaucagccuugagaaccggaugguacacaucaguaauaacaauugaacuaucaaacauuaaagaaaacaaaugcaacggcaccgacgcaaaaguaaaacuaaucaaacaagaacuagacaaauauaaaaaugcaguaacagaauuacaauuauuaaugcaauccacaccagcugcaaacaaccgagcccgaagagaacuaccaagauucaugaacuacacacuaaacaacaccaaaaauaacaacgucacccuaucuaaaaaacguaaaagaagauucuuaggauuccucuuaggagucggauccgcaauagcaagcggcauagccguauguaaaguccuacacuuagaaggugaagugaauaaaauaaaaaacgcccuauuaagcacuaacaaagcaguagucucccuaucaaacggaguuucaguacucacauucaaaguacucgaccucaaaaacuacaucgacaaacaacuuuuaccaauucuaaacaaacaaucaugcuccauaucuaauaucgaaaccgucaucgaauuucaacaaaaaaacaauagacuacuagaaauaacuagagaauuuucaguaaacgccggcguuacgacaccagucucuacauacauguuaaccaauucagaacucuuaucauuaaucaacgacaugccaauaacaaacgaccaaaaaaaacuaauguccaauaacguacaaauagucagacaacaaucauacucaauuaugugcauaauaaaagaagaaguacuagcuuacguaguacaacucccccuauacggcguaauagacacuccauguuggaaauuacacacaucaccauuauguaccaccaauacaaaagaaggcucaaacauaugccuaacaagaacagauagaggaugguauugcgacaacgcaggcucaguuuccuuuuucccccaagcagaaaccugcaaaguacaaucaaaucguguuuuuugcgacaccaugaacucacucacauuaccaucagaaguaaaccuaugcaacauagacauauucaacccaaaauacgacugcaaaaucaugacaucaaaaacagacguauccucuucaguaauuacuagcuuaggagcaauagucucuuguuauggaaaaacaaaaugcacagccaguaacaaaaaccgcggaauaauaaaaaccuucucaaacgguugcgauuacgucucuaacaaaggagucgacacaguaucaguaggcaauacauuauacuacguuaacaaacaagaaggaaaaucuuuauacgucaaaggagaacccauuauaaacuuuuacgacccauuagucuucccuuccgacgaauuugacgccagcauuucacaaguaaacgaaaaaauaaaccaaucacucgcauuuauaagaaaaucugacgaauuacuccacaacguaaacguaggaaaauccacaacaaacauaaugauaacaaccauaaucaucgucauaauagucauacuucuccuauuaauugcaguaggcuuauuccuauacuguaaagcacgauaaggacuaguggaagcauuuuccuggcugauuaaaagaaauuacucagcuauggucaucuguuccuguuagaaggcuaugcagcauauuauauacuaugcgcauguuaugaaaugcauaauaaaaaauuuuaaaaaaucuaaaagaucuaaaaaaaaaaaaaaaaaaaaaaaaaaaaaaaaaaaaaaaaaaaaaaaaaaaaaaaaaaaaaaaaugcaucccccccccccccccccccccccccccccccaaaggcucuuuucagagccaccagaauu

SEQ ID NO: 13097 - RNA, 2006 nt, Artificial Sequence
  mRNA product Design g-1 comprising derived and/or modified sequence from HRSV(Memphis-37)__AIY60640.1__F-del_DSCav1 (opt11)
gggagacuuucccauucuguagcagaauuugguguugccuguggucuuggucccgcggagaagcuuaccauggaacuaccaauccuaaaaacuaacgcaaucaccacaauccucgccgccgucacccuuugcuuugcguccucccaaaacauuacugaagaguucuaccaauccacgugcuccgccgucuccaaagguuaccuauccgcccuuaggaccggcugguacaccagcgucaucaccaucgaacuuuccaacaucaaagaaaacaaauguaacggcaccgacgcaaaagucaaacuuauuaaacaggaacucgacaaauauaagaaugccgucaccgaauuacaacuccucaugcaauccacccccgccgccaacaaccgagcaaggcgcgaacucccucgauucaugaauuacacccucaacaauaccaaaaacaacaacgucacccuauccaagaaacgcaaaagacgcuucuugggcuuccuccucggcgugggcuccgcaauagccuccgguauugccgugugcaaagucuuacaccucgaaggcgaggucaacaaaaucaaaaacgcccuccucuccaccaacaaagccgucgucagccuauccaacggcguuuccguccucaccuucaaaguacucgaccucaaaaacuacaucgacaaacaacuccuacccauacuaaacaaacaauccugcuccauuuccaacaucgaaaccguaaucgaguuccaacagaaaaacaaucgccuccuagaaaucacacgugaauuuucaguuaacgccggaguaacaacuccuguaucuaccuacaugcucaccaauuccgaacuccucagccucauaaacgacaugccaauaacaaacgaccaaaagaaacucaugucuaacaacguacaaaucgucagacaacaaaguuacucaaucauguguaucaucaaagaggaaguccuagcauacgugguccaacucccccucuacggaguaaucgacaccccaugcuggaaacuacacaccagcccccucuguaccacaaacacgaaagaagguuccaacaucugccugacccgaaccgaccgcggcugguacugcgauaacgcuggcuccgucucauucuucccccaagcagaaaccugcaaaguacaauccaaccgaguauucugcgacaccaugaacucacucacccuccccagcgaaguaaaccucugcaacaucgacauauucaacccaaaauacgacugcaaaauuaugaccucuaaaacagacguauccuccucuguaaucacaucccucggggccaucgucuccugcuacggcaaaaccaaaugcaccgccuccaacaaaaaccgcggaaucauaaaaaccuucuccaacggaugcgacuacgucucaaauaaaggcgucgacaccgucuccgucggcaacacgcuauacuacgucaacaaacaagaaggcaaaucacucuacgucaaaggugagcccaucaucaauuucuacgauccccucgucuucccaagcgacgaguucgacgccagcauaucccaaguaaacgagaaaaucaaccaaagccuggccuucauccgcaaauccgacgaacuacuacacaacguaaacguaggcaaguccacuaccaacauaaugaucaccacaaucaucauagucauaaucguuauacuacuccugcucaucgccguaggccucuuccucuauugcaaagcccgauagggacuaguggaagcauuuuccuggcugauuaaaagaaauuacucagcuauggucaucuguuccuguuagaaggcuaugcagcauauuauauacuaugcgcauguuaugaaaugcauaauaaaaaauuuuaaaaaaucuaaaagaucuaaaaaaaaaaaaaaaaaaaaaaaaaaaaaaaaaaaaaaaaaaaaaaaaaaaaaaaaaaaaaaaaugcaucccccccccccccccccccccccccccccccaaaggcucuuuucagagccaccagaauu

SEQ ID NO: 13098 - RNA, 2021 nt, Artificial Sequence
  mRNA product Design g-2 comprising derived and/or modified sequence from HRSV(Memphis-37)__AIY60640.1__F-del_DSCav1 (opt1)
gggagaguccgcucagccagguugcagaagcggcuuagcguguguccuaaucuucucucugcguguagguaggccugugccgcaaacaagcuuaccauggagcugcccauccucaagaccaacgccaucaccacgauccuggccgcggugacccugugcuucgccagcucccagaacaucaccgaggaguucuaccagagcacgugcuccgccgucagcaagggcuaccucuccgcccugcgcaccgggugguacaccagcgugaucaccaucgagcuguccaacaucaaggagaacaagugcaacggcaccgacgccaaggugaagcucaucaagcaggagcuggacaaguacaagaacgcggucacggagcugcagcuccugaugcagagcaccccggccgccaacaaccgggcccgccgggagcugccccgcuucaugaacuacacccucaacaacaccaagaacaacaacgugacgcuguccaagaagcggaagcgccgguuccugggguuccuccugggcguggggagcgcgaucgccuccggcaucgccgucugcaaggugcugcaccucgagggcgaggugaacaagaucaagaacgcccugcuguccaccaacaaggccgucgugagccucuccaacggggugagcguccugaccuucaaggugcuggaccucaagaacuacaucgacaagcagcugcugcccauccugaacaagcagagcugcuccaucagcaacaucgagaccgucaucgaguuccagcagaagaacaaccgccuccuggagaucacgcgggaguucagcgugaacgcgggcgugaccacccccgucuccaccuacaugcugacgaacagcgagcuccugucccugaucaacgacaugccgaucaccaacgaccagaagaagcucaugagcaacaacgugcagaucgugcgccagcaguccuacagcaucaugugcaucaucaaggaggagguccuggccuacguggugcagcugccccucuacggggucaucgacacccccugcuggaagcugcacaccagcccccugugcacgaccaacaccaaggagggcuccaacaucugccucacccggacggaccgcgggugguacugcgacaacgccggcagcguguccuucuucccgcaggccgagaccugcaagguccagagcaaccggguguucugcgacaccaugaacucccugacccugcccagcgaggugaaccucugcaacaucgacaucuucaaccccaaguacgacugcaagaucaugacguccaagaccgacgucagcuccagcgugaucaccucccugggcgccaucgugagcugcuacgggaagaccaagugcacggcgagcaacaagaaccgcggcaucaucaagaccuucuccaacgggugcgacuacgucagcaacaagggcguggacaccguguccgucggcaacacccuguacuacgugaacaagcaggagggcaagagccucuacgugaagggggagcccaucaucaacuucuacgacccgcuggucuuccccuccgacgaguucgacgccagcaucucccaggugaacgagaagaucaaccagagccuggccuucauccggaaguccgacgagcuccugcacaacgugaacgucggcaagagcaccacgaacaucaugaucaccaccaucaucaucgugaucaucgugauccugcugcuccugaucgccgucgggcuguuccucuacugcaaggcccgcugaggacuaguaauaaggaaacuguaugaaugucugugggcaggaagugaagagauccuucuguaaagguuuuuggaauuaugucugcugaauaauaaacuuuuuugaaauaauaaaucugguagaaaaaugagaucuaaaaaaaaaaaaaaaaaaaaaaaaaaaaaaaaaaaaaaaaaaaaaaaaaaaaaaaaaaaaaaaaugcaucccccccccccccccccccccccccccccccaaaggcucuuuucagagccaccagaauu

SEQ ID NO: 13099 - RNA, 2021 nt, Artificial Sequence
  mRNA product Design g-2 comprising derived and/or modified sequence from HRSV(Memphis-37)__AIY60640.1__F-del_DSCav1 (opt1)
gggagaguccgcucagccagguugcagaagcggcuuagcguguguccuaaucuucucucugcguguagguaggccugugccgcaaacaagcuuaccauggagcugcccauccucaagaccaacgccaucaccacgauccuggccgcggugacccugugcuucgccagcucccagaacaucaccgaggaguucuaccagagcacgugcuccgccgucagcaagggcuaccucuccgcccugcgcaccgggugguacaccagcgugaucaccaucgagcuguccaacaucaaggagaacaagugcaacggcaccgacgccaaggugaagcucaucaagcaggagcuggacaaguacaagaacgcggucacggagcugcagcuccugaugcagagcaccccggccgccaacaaccgggcccgccgggagcugccccgcuucaugaacuacacccucaacaacaccaagaacaacaacgugacgcuguccaagaagcggaagcgccgguuccugggguuccuccugggcguggggagcgcgaucgccuccggcaucgccgucugcaaggugcugcaccucgagggcgaggugaacaagaucaagaacgcccugcugagcaccaacaaggccgucgugucccucagcaacgggguguccguccugaccuucaaggugcuggaccucaagaacuacaucgacaagcagcugcugcccauccucaacaagcagagcugcuccaucagcaacaucgagaccgugaucgaguuccagcagaagaacaaccgccugcuggagaucacgcgggaguucuccgucaacgcgggcgugaccacccccgugagcaccuacaugcucacgaacagcgagcugcugucccucaucaacgacaugccgaucaccaacgaccagaagaagcugaugagcaacaacguccagaucgugcgccagcaguccuacagcaucaugugcaucaucaaggaggaggugcuggccuacgucgugcagcucccccuguacggggugaucgacacccccugcuggaagcugcacaccagcccccucugcacgaccaacaccaaggagggcagcaacaucugccugacccggacggaccgcgggugguacugcgacaacgccggcuccgucagcuucuucccgcaggccgagaccugcaaggugcaguccaaccgggucuucugcgacaccaugaacagccugacccuccccuccgaggugaaccugugcaacaucgacaucuucaaccccaaguacgacugcaagaucaugacgagcaagaccgacguguccagcuccgucaucaccagccugggcgccaucguguccugcuacgggaagaccaagugcacggcgagcaacaagaaccgcggcaucaucaagaccuucuccaacgggugcgacuacgugagcaacaagggcgucgacaccgugagcgugggcaacacccucuacuacgucaacaagcaggaggggaagucccuguacgugaagggcgagcccaucaucaacuucuacgacccgcugguguuccccagcgacgaguucgacgccuccaucagccaggucaacgagaagaucaaccagucccucgccuucauccggaaguccgacgagcugcugcacaacgugaacguggggaaguccaccacgaacaucaugaucaccaccaucaucaucgucaucaucgugauccugcuccugcugaucgccgugggccucuuccuguacugcaaggcccgcugaggacuaguaauaaggaaacuguaugaaugucugugggcaggaagugaagagauccuucuguaaagguuuuuggaauuaugucugcugaauaauaaacuuuuuugaaauaauaaaucugguagaaaaaugagaucuaaaaaaaaaaaaaaaaaaaaaaaaaaaaaaaaaaaaaaaaaaaaaaaaaaaaaaaaaaaaaaaaugcaucccccccccccccccccccccccccccccccaaaggcucuuuucagagccaccagaauu

SEQ ID NO: 13100 - RNA, 2021 nt, Artificial Sequence
  mRNA product Design g-2 comprising derived and/or modified sequence from HRSV(Memphis-37)__AIY60640.1__F-del_DSCav1 (opt2)
gggagaguccgcucagccagguugcagaagcggcuuagcguguguccuaaucuucucucugcguguagguaggccugugccgcaaacaagcuuaccauggagcuccccauccucaagaccaacgccaucaccaccauccucgccgccgucacccucugcuucgccuccucccagaacaucaccgaggaguucuaccaguccaccugcuccgccgucuccaagggcuaccucuccgcccuccgcaccggcugguacaccuccgucaucaccaucgagcucuccaacaucaaggagaacaagugcaacggcaccgacgccaaggucaagcucaucaagcaggagcucgacaaguacaagaacgccgucaccgagcuccagcuccucaugcaguccacccccgccgccaacaaccgcgcccgccgcgagcucccccgcuucaugaacuacacccucaacaacaccaagaacaacaacgucacccucuccaagaagcgcaagcgccgcuuccucggcuuccuccucggcgucggcuccgccaucgccuccggcaucgccgucugcaagguccuccaccucgagggcgaggucaacaagaucaagaacgcccuccucuccaccaacaaggccgucgucucccucuccaacggcgucuccguccucaccuucaagguccucgaccucaagaacuacaucgacaagcagcuccuccccauccucaacaagcaguccugcuccaucuccaacaucgagaccgucaucgaguuccagcagaagaacaaccgccuccucgagaucacccgcgaguucuccgucaacgccggcgucaccacccccgucuccaccuacaugcucaccaacuccgagcuccucucccucaucaacgacaugcccaucaccaacgaccagaagaagcucauguccaacaacguccagaucguccgccagcaguccuacuccaucaugugcaucaucaaggaggagguccucgccuacgucguccagcucccccucuacggcgucaucgacacccccugcuggaagcuccacaccuccccccucugcaccaccaacaccaaggagggcuccaacaucugccucacccgcaccgaccgcggcugguacugcgacaacgccggcuccgucuccuucuucccccaggccgagaccugcaagguccaguccaaccgcgucuucugcgacaccaugaacucccucacccuccccuccgaggucaaccucugcaacaucgacaucuucaaccccaaguacgacugcaagaucaugaccuccaagaccgacgucuccuccuccgucaucaccucccucggcgccaucgucuccugcuacggcaagaccaagugcaccgccuccaacaagaaccgcggcaucaucaagaccuucuccaacggcugcgacuacgucuccaacaagggcgucgacaccgucuccgucggcaacacccucuacuacgucaacaagcaggagggcaagucccucuacgucaagggcgagcccaucaucaacuucuacgacccccucgucuuccccuccgacgaguucgacgccuccaucucccaggucaacgagaagaucaaccagucccucgccuucauccgcaaguccgacgagcuccuccacaacgucaacgucggcaaguccaccaccaacaucaugaucaccaccaucaucaucgucaucaucgucauccuccuccuccucaucgccgucggccucuuccucuacugcaaggcccgcugaggacuaguaauaaggaaacuguaugaaugucugugggcaggaagugaagagauccuucuguaaagguuuuuggaauuaugucugcugaauaauaaacuuuuuugaaauaauaaaucugguagaaaaaugagaucuaaaaaaaaaaaaaaaaaaaaaaaaaaaaaaaaaaaaaaaaaaaaaaaaaaaaaaaaaaaaaaaaugcaucccccccccccccccccccccccccccccccaaaggcucuuuucagagccaccagaauu

SEQ ID NO: 13101 - RNA, 2021 nt, Artificial Sequence
  mRNA product Design g-2 comprising derived and/or modified sequence from HRSV(Memphis-37)__AIY60640.1__F-del_DSCav1 (opt3)
gggagaguccgcucagccagguugcagaagcggcuuagcguguguccuaaucuucucucugcguguagguaggccugugccgcaaacaagcuuaccauggagcugcccauccucaagaccaacgccauuacaacuauacuugcugcagugacgcugugcuucgccagcucccagaauaucaccgaagaguuuuaccaaucuacauguucagcggucaguaaaggcuauuugagcgcuuuaagaacugggugguacaccuccguuauuacaaucgaacugucuaacauuaaggagaauaaaugcaacggaaccgacgccaaggugaaacuaaucaagcaggaacucgauaaguauaaaaaugcaguaacugagcugcagcuucugaugcagucgaccccugccgcuaacaauagggcacggcgcgaguugccacgauucaugaacuacacacucaauaacacgaagaauaacaaugugacucugagcaaaaagcguaaaagaagguuucuggguuuccucuuaggcgucgggucagccauagcuaguggaaucgccguguguaagguucugcaccuugaaggcgaggugaacaagauuaaaaaugcguugcuguccaccaacaaggcagucgugucucuaagcaacgguguauccguucucacauuuaaagugcuggaccuuaagaauuauaucgauaaacaacuguugccgauucucaacaagcagucaugcaguaucagcaauauagaaacugucauugaguuccagcagaaaaacaaucggcuguuagagaucacccgcgaauuuucugugaacgccggggugacaacccccgucuccacguacaugcugacuaauucagagcuccuuagccugauuaacgacaugccuaucacaaaugaucaaaagaaguugaugaguaacaauguucagaucgugagacagcagucuuauuccauuauguguauaaucaaagaagagguacuagcuuacgugguccaacugccacucuacggagugauugacacccccugcuggaagcugcauacuagcccucuuuguacaaccaacacgaaagaaggcucgaauaucugccugaccaggacagaucggggcugguauugugacaacgccgggucuguuuccuucuuuccacaggcagagacuugcaaggugcagucaaaucgcgucuucugugauaccaugaacaguuugacacuccccagcgaggugaaccugugcaauauagacauuuuuaacccuaaauacgauugcaagaucaugacuuccaagaccgacguaucuagcucaguuaucacaaguuuaggagcuauuguguccuguuaugguaaaaccaagugcacugccagcaauaaaaaccgaggcaucauuaagacguucucuaaugggugugauuacgucucaaacaaaggaguggacacagucagugugggcaauacccuguauuacguuaacaagcaagaagguaagagccuauaugugaaaggggagccaauaaucaauuuuuacgacccgcucguauuccccuccgaugaguucgacgcgucuauuucgcaggucaacgaaaagaucaaucagagccuggccuuuaucagaaaauccgaugaacuuuugcacaacgugaauguuggaaagucaacuaccaacauuaugauaacaaccaucauuaucgugauuaucgucauacugcuccugcuuaucgcagugggccuguucuuguacugcaaagcuaggugaggacuaguaauaaggaaacuguaugaaugucugugggcaggaagugaagagauccuucuguaaagguuuuuggaauuaugucugcugaauaauaaacuuuuuugaaauaauaaaucugguagaaaaaugagaucuaaaaaaaaaaaaaaaaaaaaaaaaaaaaaaaaaaaaaaaaaaaaaaaaaaaaaaaaaaaaaaaaugcaucccccccccccccccccccccccccccccccaaaggcucuuuucagagccaccagaauu

SEQ ID NO: 13102 - RNA, 2021 nt, Artificial Sequence
  mRNA product Design g-2 comprising derived and/or modified sequence from HRSV(Memphis-37)__AIY60640.1__F-del_DSCav1 (opt4)
gggagaguccgcucagccagguugcagaagcggcuuagcguguguccuaaucuucucucugcguguagguaggccugugccgcaaacaagcuuaccauggagcugcccauccugaagaccaacgccaucaccaccauccuggccgccgugacccugugcuucgccagcagccagaacaucaccgaggaguucuaccagagcaccugcagcgccgugagcaagggcuaccugagcgcccugagaaccggcugguacaccagcgugaucaccaucgagcugagcaacaucaaggagaacaagugcaacggcaccgacgccaaggugaagcugaucaagcaggagcuggacaaguacaagaacgccgugaccgagcugcagcugcugaugcagagcacccccgccgccaacaacagagccagaagagagcugcccagauucaugaacuacacccugaacaacaccaagaacaacaacgugacccugagcaagaagagaaagagaagauuccugggcuuccugcugggcgugggcagcgccaucgccagcggcaucgccgugugcaaggugcugcaccuggagggcgaggugaacaagaucaagaacgcccugcugagcaccaacaaggccguggugagccugagcaacggcgugagcgugcugaccuucaaggugcuggaccugaagaacuacaucgacaagcagcugcugcccauccugaacaagcagagcugcagcaucagcaacaucgagaccgugaucgaguuccagcagaagaacaacagacugcuggagaucaccagagaguucagcgugaacgccggcgugaccacccccgugagcaccuacaugcugaccaacagcgagcugcugagccugaucaacgacaugcccaucaccaacgaccagaagaagcugaugagcaacaacgugcagaucgugagacagcagagcuacagcaucaugugcaucaucaaggaggaggugcuggccuacguggugcagcugccccuguacggcgugaucgacacccccugcuggaagcugcacaccagcccccugugcaccaccaacaccaaggagggcagcaacaucugccugaccagaaccgacagaggcugguacugcgacaacgccggcagcgugagcuucuucccccaggccgagaccugcaaggugcagagcaacagaguguucugcgacaccaugaacagccugacccugcccagcgaggugaaccugugcaacaucgacaucuucaaccccaaguacgacugcaagaucaugaccagcaagaccgacgugagcagcagcgugaucaccagccugggcgccaucgugagcugcuacggcaagaccaagugcaccgccagcaacaagaacagaggcaucaucaagaccuucagcaacggcugcgacuacgugagcaacaagggcguggacaccgugagcgugggcaacacccuguacuacgugaacaagcaggagggcaagagccuguacgugaagggcgagcccaucaucaacuucuacgacccccugguguuccccagcgacgaguucgacgccagcaucagccaggugaacgagaagaucaaccagagccuggccuucaucagaaagagcgacgagcugcugcacaacgugaacgugggcaagagcaccaccaacaucaugaucaccaccaucaucaucgugaucaucgugauccugcugcugcugaucgccgugggccuguuccuguacugcaaggccagaugaggacuaguaauaaggaaacuguaugaaugucugugggcaggaagugaagagauccuucuguaaagguuuuuggaauuaugucugcugaauaauaaacuuuuuugaaauaauaaaucugguagaaaaaugagaucuaaaaaaaaaaaaaaaaaaaaaaaaaaaaaaaaaaaaaaaaaaaaaaaaaaaaaaaaaaaaaaaaugcaucccccccccccccccccccccccccccccccaaaggcucuuuucagagccaccagaauu

SEQ ID NO: 13103 - RNA, 2021 nt, Artificial Sequence
  mRNA product Design g-2 comprising derived and/or modified sequence from HRSV(Memphis-37)__AIY60640.1__F-del_DSCav1 (opt5)
gggagaguccgcucagccagguugcagaagcggcuuagcguguguccuaaucuucucucugcguguagguaggccugugccgcaaacaagcuuaccauggagcugcccauccucaagaccaacgccauuacaacgauccuggcugccgugacccuuugcuucgcgagcucccagaauauuacagaagaguuuuaccaaucuaccuguagcgcugucuccaaaggcuaucugucugcccucagaacagggugguacaccagcguuaucacaauugaacuguccaacaucaaggagaauaaaugcaacggaaccgacgccaaggugaaacuuaucaagcaggaacuggauaaguauaaaaaugcugugacggagcuccagcugcugaugcagucuaccccugccgcuaacaaucgggcccgcagagagcucccgcgguucaugaacuacacacugaauaacaccaagaauaacaaugucacacuuagcaaaaagcgcaaaagacgguuucugggcuuccuccugggggugggauccgcgauugccagcggcaucgcuguuuguaaggugcuucaccuggaaggggaggucaacaagauuaaaaaugcccuccugucuaccaacaaggcugugguuucccugagcaacggagugucuguccucacguuuaaagugcuggaccuuaagaauuauaucgauaaacaacugcuccccauucugaacaagcaguccugcagcaucucuaauauugaaacagugaucgaguuccagcagaaaaacaaucgccuucuggagaucaccagagaauuuuccgucaacgccggcguuacaaccccugugagcaccuacaugcucacaaauuccgagcugcugucucucauuaacgacaugcccaucacgaaugaucaaaagaagcugaugagcaacaaugugcagauuguccggcagcaguccuauagcaucauguguauuaucaaagaagaggugcuugcguacguugugcaacugccucucuacggcgucaucgacacccccugcuggaagcugcauacaucuccucuuuguaccacaaacaccaaagaaggguccaauauuugccugacgcgcacagauagaggaugguauugugacaacgccggcagcgugucuuucuuuccgcaggcugagaccugcaagguucagagcaaucggguguucugugauaccaugaacucccucacacugcccucugaggucaaccugugcaauaucgacauuuuuaacccuaaauacgauugcaagaucaugaccagcaagacagacguguccagcucugucauuacgucccucggggccaucgugagcuguuauggaaaaaccaagugcacagcuucuaauaaaaaccgcggcaucauuaagaccuucuccaaugggugugauuacguuagcaacaaaggaguggacacagucuccgugggcaauacccuguauuacguuaacaagcaagaaggcaagucucuuuaugugaaaggggagcccaucauuaauuuuuacgacccucuggucuuccccagcgaugaguucgacgccuccaucucucaggugaacgaaaagauuaaucagagccucgccuuuaucagaaaauccgaugaacugcugcacaacgugaauguuggaaagagcacgaccaacauuaugaucacaaccaucauuaucgucauuaucgugauucuucuccugcugaucgcugugggccucuuccuguacugcaaagcgcggugaggacuaguaauaaggaaacuguaugaaugucugugggcaggaagugaagagauccuucuguaaagguuuuuggaauuaugucugcugaauaauaaacuuuuuugaaauaauaaaucugguagaaaaaugagaucuaaaaaaaaaaaaaaaaaaaaaaaaaaaaaaaaaaaaaaaaaaaaaaaaaaaaaaaaaaaaaaaaugcaucccccccccccccccccccccccccccccccaaaggcucuuuucagagccaccagaauu

SEQ ID NO: 13104 - RNA, 2021 nt, Artificial Sequence
  mRNA product Design g-2 comprising derived and/or modified sequence from HRSV(Memphis-37)__AIY60640.1__F-del_DSCav1 (opt6)
gggagaguccgcucagccagguugcagaagcggcuuagcguguguccuaaucuucucucugcguguagguaggccugugccgcaaacaagcuuaccauggaauuaccaauccuuaaaacaaacgcaauaacaaccauccucgcagcaguaacucucugcuucgcuucaucucaaaacaucacagaagaauuuuaccaaagcacaugcucagcuguauccaaagguuaucuaucagccuugagaaccggaugguacacaucaguaauaacaauugaacuaucaaacauuaaagaaaacaaaugcaacggcaccgacgcaaaaguaaaacuaaucaaacaagaacuagacaaauauaaaaaugcaguaacagaauuacaauuauuaaugcaauccacaccagcugcaaacaaccgagcccgaagagaacuaccaagauucaugaacuacacacuaaacaacaccaaaaauaacaacgucacccuaucuaaaaaacguaaaagaagauucuuaggauuccucuuaggagucggauccgcaauagcaagcggcauagccguauguaaaguccuacacuuagaaggugaagugaauaaaauaaaaaacgcccuauuaagcacuaacaaagcaguagucucccuaucaaacggaguuucaguacucacauucaaaguacucgaccucaaaaacuacaucgacaaacaacuuuuaccaauucuaaacaaacaaucaugcuccauaucuaauaucgaaaccgucaucgaauuucaacaaaaaaacaauagacuacuagaaauaacuagagaauuuucaguaaacgccggcguuacgacaccagucucuacauacauguuaaccaauucagaacucuuaucauuaaucaacgacaugccaauaacaaacgaccaaaaaaaacuaauguccaauaacguacaaauagucagacaacaaucauacucaauuaugugcauaauaaaagaagaaguacuagcuuacguaguacaacucccccuauacggcguaauagacacuccauguuggaaauuacacacaucaccauuauguaccaccaauacaaaagaaggcucaaacauaugccuaacaagaacagauagaggaugguauugcgacaacgcaggcucaguuuccuuuuucccccaagcagaaaccugcaaaguacaaucaaaucguguuuuuugcgacaccaugaacucacucacauuaccaucagaaguaaaccuaugcaacauagacauauucaacccaaaauacgacugcaaaaucaugacaucaaaaacagacguauccucuucaguaauuacuagcuuaggagcaauagucucuuguuauggaaaaacaaaaugcacagccaguaacaaaaaccgcggaauaauaaaaaccuucucaaacgguugcgauuacgucucuaacaaaggagucgacacaguaucaguaggcaauacauuauacuacguuaacaaacaagaaggaaaaucuuuauacgucaaaggagaacccauuauaaacuuuuacgacccauuagucuucccuuccgacgaauuugacgccagcauuucacaaguaaacgaaaaaauaaaccaaucacucgcauuuauaagaaaaucugacgaauuacuccacaacguaaacguaggaaaauccacaacaaacauaaugauaacaaccauaaucaucgucauaauagucauacuucuccuauuaauugcaguaggcuuauuccuauacuguaaagcacgauaaggacuaguaauaaggaaacuguaugaaugucugugggcaggaagugaagagauccuucuguaaagguuuuuggaauuaugucugcugaauaauaaacuuuuuugaaauaauaaaucugguagaaaaaugagaucuaaaaaaaaaaaaaaaaaaaaaaaaaaaaaaaaaaaaaaaaaaaaaaaaaaaaaaaaaaaaaaaaugcaucccccccccccccccccccccccccccccccaaaggcucuuuucagagccaccagaauu

SEQ ID NO: 13105 - RNA, 2021 nt, Artificial Sequence
  mRNA product Design g-2 comprising derived and/or modified sequence from HRSV(Memphis-37)__AIY60640.1__F-del_DSCav1 (opt11)
gggagaguccgcucagccagguugcagaagcggcuuagcguguguccuaaucuucucucugcguguagguaggccugugccgcaaacaagcuuaccauggaacuaccaauccuaaaaacuaacgcaaucaccacaauccucgccgccgucacccuuugcuuugcguccucccaaaacauuacugaagaguucuaccaauccacgugcuccgccgucuccaaagguuaccuauccgcccuuaggaccggcugguacaccagcgucaucaccaucgaacuuuccaacaucaaagaaaacaaauguaacggcaccgacgcaaaagucaaacuuauuaaacaggaacucgacaaauauaagaaugccgucaccgaauuacaacuccucaugcaauccacccccgccgccaacaaccgagcaaggcgcgaacucccucgauucaugaauuacacccucaacaauaccaaaaacaacaacgucacccuauccaagaaacgcaaaagacgcuucuugggcuuccuccucggcgugggcuccgcaauagccuccgguauugccgugugcaaagucuuacaccucgaaggcgaggucaacaaaaucaaaaacgcccuccucuccaccaacaaagccgucgucagccuauccaacggcguuuccguccucaccuucaaaguacucgaccucaaaaacuacaucgacaaacaacuccuacccauacuaaacaaacaauccugcuccauuuccaacaucgaaaccguaaucgaguuccaacagaaaaacaaucgccuccuagaaaucacacgugaauuuucaguuaacgccggaguaacaacuccuguaucuaccuacaugcucaccaauuccgaacuccucagccucauaaacgacaugccaauaacaaacgaccaaaagaaacucaugucuaacaacguacaaaucgucagacaacaaaguuacucaaucauguguaucaucaaagaggaaguccuagcauacgugguccaacucccccucuacggaguaaucgacaccccaugcuggaaacuacacaccagcccccucuguaccacaaacacgaaagaagguuccaacaucugccugacccgaaccgaccgcggcugguacugcgauaacgcuggcuccgucucauucuucccccaagcagaaaccugcaaaguacaauccaaccgaguauucugcgacaccaugaacucacucacccuccccagcgaaguaaaccucugcaacaucgacauauucaacccaaaauacgacugcaaaauuaugaccucuaaaacagacguauccuccucuguaaucacaucccucggggccaucgucuccugcuacggcaaaaccaaaugcaccgccuccaacaaaaaccgcggaaucauaaaaaccuucuccaacggaugcgacuacgucucaaauaaaggcgucgacaccgucuccgucggcaacacgcuauacuacgucaacaaacaagaaggcaaaucacucuacgucaaaggugagcccaucaucaauuucuacgauccccucgucuucccaagcgacgaguucgacgccagcauaucccaaguaaacgagaaaaucaaccaaagccuggccuucauccgcaaauccgacgaacuacuacacaacguaaacguaggcaaguccacuaccaacauaaugaucaccacaaucaucauagucauaaucguuauacuacuccugcucaucgccguaggccucuuccucuauugcaaagcccgauagggacuaguaauaaggaaacuguaugaaugucugugggcaggaagugaagagauccuucuguaaagguuuuuggaauuaugucugcugaauaauaaacuuuuuugaaauaauaaaucugguagaaaaaugagaucuaaaaaaaaaaaaaaaaaaaaaaaaaaaaaaaaaaaaaaaaaaaaaaaaaaaaaaaaaaaaaaaaugcaucccccccccccccccccccccccccccccccaaaggcucuuuucagagccaccagaauu

SEQ ID NO: 13106 - RNA, 2253 nt, Artificial Sequence
  mRNA product Design g-3 comprising derived and/or modified sequence from HRSV(Memphis-37)__AIY60640.1__F-del_DSCav1 (opt1)
gggagaguccgcucagccagguugcagaagcggcuuagcguguguccuaaucuucucucugcguguagguaggccugugccgcaaacaagcuuaccauggagcugcccauccucaagaccaacgccaucaccacgauccuggccgcggugacccugugcuucgccagcucccagaacaucaccgaggaguucuaccagagcacgugcuccgccgucagcaagggcuaccucuccgcccugcgcaccgggugguacaccagcgugaucaccaucgagcuguccaacaucaaggagaacaagugcaacggcaccgacgccaaggugaagcucaucaagcaggagcuggacaaguacaagaacgcggucacggagcugcagcuccugaugcagagcaccccggccgccaacaaccgggcccgccgggagcugccccgcuucaugaacuacacccucaacaacaccaagaacaacaacgugacgcuguccaagaagcggaagcgccgguuccugggguuccuccugggcguggggagcgcgaucgccuccggcaucgccgucugcaaggugcugcaccucgagggcgaggugaacaagaucaagaacgcccugcuguccaccaacaaggccgucgugagccucuccaacggggugagcguccugaccuucaaggugcuggaccucaagaacuacaucgacaagcagcugcugcccauccugaacaagcagagcugcuccaucagcaacaucgagaccgucaucgaguuccagcagaagaacaaccgccuccuggagaucacgcgggaguucagcgugaacgcgggcgugaccacccccgucuccaccuacaugcugacgaacagcgagcuccugucccugaucaacgacaugccgaucaccaacgaccagaagaagcucaugagcaacaacgugcagaucgugcgccagcaguccuacagcaucaugugcaucaucaaggaggagguccuggccuacguggugcagcugccccucuacggggucaucgacacccccugcuggaagcugcacaccagcccccugugcacgaccaacaccaaggagggcuccaacaucugccucacccggacggaccgcgggugguacugcgacaacgccggcagcguguccuucuucccgcaggccgagaccugcaagguccagagcaaccggguguucugcgacaccaugaacucccugacccugcccagcgaggugaaccucugcaacaucgacaucuucaaccccaaguacgacugcaagaucaugacguccaagaccgacgucagcuccagcgugaucaccucccugggcgccaucgugagcugcuacgggaagaccaagugcacggcgagcaacaagaaccgcggcaucaucaagaccuucuccaacgggugcgacuacgucagcaacaagggcguggacaccguguccgucggcaacacccuguacuacgugaacaagcaggagggcaagagccucuacgugaagggggagcccaucaucaacuucuacgacccgcuggucuuccccuccgacgaguucgacgccagcaucucccaggugaacgagaagaucaaccagagccuggccuucauccggaaguccgacgagcuccugcacaacgugaacgucggcaagagcaccacgaacaucaugaucaccaccaucaucaucgugaucaucgugauccugcugcuccugaucgccgucgggcuguuccucuacugcaaggcccgcugaggacuagugaagggaacacccaaauuuaauucagccuuaagcacaauuaauuaagagugaaacguaauuguacaagcaguuggucacccaccauagggcaugaucaacaccgcaaccuuuccuuuuucccccagugauucugaaaaaccccucuucccuucagcuugcuuagauguuccaaauuuaguaagcuuaaggcggccuacagaagaaaaagaaaaaaaaggccacaaaaguucccucucacuuucaguaaauaaaauaaaagcagcaacagaaauaaagaaauaaaugaaauucaaaaugaaauaaauauuguguugugcagcauuaaaaaaucaauaaaaauuaaaaaugagcaagaucuaaaaaaaaaaaaaaaaaaaaaaaaaaaaaaaaaaaaaaaaaaaaaaaaaaaaaaaaaaaaaaaaugcaucccccccccccccccccccccccccccccccaaaggcucuuuucagagccaccagaauu

SEQ ID NO: 13107 - RNA, 2253 nt, Artificial Sequence
  mRNA product Design g-3 comprising derived and/or modified sequence from HRSV(Memphis-37)__AIY60640.1__F-del_DSCav1 (opt1)
gggagaguccgcucagccagguugcagaagcggcuuagcguguguccuaaucuucucucugcguguagguaggccugugccgcaaacaagcuuaccauggagcugcccauccucaagaccaacgccaucaccacgauccuggccgcggugacccugugcuucgccagcucccagaacaucaccgaggaguucuaccagagcacgugcuccgccgucagcaagggcuaccucuccgcccugcgcaccgggugguacaccagcgugaucaccaucgagcuguccaacaucaaggagaacaagugcaacggcaccgacgccaaggugaagcucaucaagcaggagcuggacaaguacaagaacgcggucacggagcugcagcuccugaugcagagcaccccggccgccaacaaccgggcccgccgggagcugccccgcuucaugaacuacacccucaacaacaccaagaacaacaacgugacgcuguccaagaagcggaagcgccgguuccugggguuccuccugggcguggggagcgcgaucgccuccggcaucgccgucugcaaggugcugcaccucgagggcgaggugaacaagaucaagaacgcccugcugagcaccaacaaggccgucgugucccucagcaacgggguguccguccugaccuucaaggugcuggaccucaagaacuacaucgacaagcagcugcugcccauccucaacaagcagagcugcuccaucagcaacaucgagaccgugaucgaguuccagcagaagaacaaccgccugcuggagaucacgcgggaguucuccgucaacgcgggcgugaccacccccgugagcaccuacaugcucacgaacagcgagcugcugucccucaucaacgacaugccgaucaccaacgaccagaagaagcugaugagcaacaacguccagaucgugcgccagcaguccuacagcaucaugugcaucaucaaggaggaggugcuggccuacgucgugcagcucccccuguacggggugaucgacacccccugcuggaagcugcacaccagcccccucugcacgaccaacaccaaggagggcagcaacaucugccugacccggacggaccgcgggugguacugcgacaacgccggcuccgucagcuucuucccgcaggccgagaccugcaaggugcaguccaaccgggucuucugcgacaccaugaacagccugacccuccccuccgaggugaaccugugcaacaucgacaucuucaaccccaaguacgacugcaagaucaugacgagcaagaccgacguguccagcuccgucaucaccagccugggcgccaucguguccugcuacgggaagaccaagugcacggcgagcaacaagaaccgcggcaucaucaagaccuucuccaacgggugcgacuacgugagcaacaagggcgucgacaccgugagcgugggcaacacccucuacuacgucaacaagcaggaggggaagucccuguacgugaagggcgagcccaucaucaacuucuacgacccgcugguguuccccagcgacgaguucgacgccuccaucagccaggucaacgagaagaucaaccagucccucgccuucauccggaaguccgacgagcugcugcacaacgugaacguggggaaguccaccacgaacaucaugaucaccaccaucaucaucgucaucaucgugauccugcuccugcugaucgccgugggccucuuccuguacugcaaggcccgcugaggacuagugaagggaacacccaaauuuaauucagccuuaagcacaauuaauuaagagugaaacguaauuguacaagcaguuggucacccaccauagggcaugaucaacaccgcaaccuuuccuuuuucccccagugauucugaaaaaccccucuucccuucagcuugcuuagauguuccaaauuuaguaagcuuaaggcggccuacagaagaaaaagaaaaaaaaggccacaaaaguucccucucacuuucaguaaauaaaauaaaagcagcaacagaaauaaagaaauaaaugaaauucaaaaugaaauaaauauuguguugugcagcauuaaaaaaucaauaaaaauuaaaaaugagcaagaucuaaaaaaaaaaaaaaaaaaaaaaaaaaaaaaaaaaaaaaaaaaaaaaaaaaaaaaaaaaaaaaaaugcaucccccccccccccccccccccccccccccccaaaggcucuuuucagagccaccagaauu

SEQ ID NO: 13108 - RNA, 2253 nt, Artificial Sequence
  mRNA product Design g-3 comprising derived and/or modified sequence from HRSV(Memphis-37)__AIY60640.1__F-del_DSCav1 (opt2)
gggagaguccgcucagccagguugcagaagcggcuuagcguguguccuaaucuucucucugcguguagguaggccugugccgcaaacaagcuuaccauggagcuccccauccucaagaccaacgccaucaccaccauccucgccgccgucacccucugcuucgccuccucccagaacaucaccgaggaguucuaccaguccaccugcuccgccgucuccaagggcuaccucuccgcccuccgcaccggcugguacaccuccgucaucaccaucgagcucuccaacaucaaggagaacaagugcaacggcaccgacgccaaggucaagcucaucaagcaggagcucgacaaguacaagaacgccgucaccgagcuccagcuccucaugcaguccacccccgccgccaacaaccgcgcccgccgcgagcucccccgcuucaugaacuacacccucaacaacaccaagaacaacaacgucacccucuccaagaagcgcaagcgccgcuuccucggcuuccuccucggcgucggcuccgccaucgccuccggcaucgccgucugcaagguccuccaccucgagggcgaggucaacaagaucaagaacgcccuccucuccaccaacaaggccgucgucucccucuccaacggcgucuccguccucaccuucaagguccucgaccucaagaacuacaucgacaagcagcuccuccccauccucaacaagcaguccugcuccaucuccaacaucgagaccgucaucgaguuccagcagaagaacaaccgccuccucgagaucacccgcgaguucuccgucaacgccggcgucaccacccccgucuccaccuacaugcucaccaacuccgagcuccucucccucaucaacgacaugcccaucaccaacgaccagaagaagcucauguccaacaacguccagaucguccgccagcaguccuacuccaucaugugcaucaucaaggaggagguccucgccuacgucguccagcucccccucuacggcgucaucgacacccccugcuggaagcuccacaccuccccccucugcaccaccaacaccaaggagggcuccaacaucugccucacccgcaccgaccgcggcugguacugcgacaacgccggcuccgucuccuucuucccccaggccgagaccugcaagguccaguccaaccgcgucuucugcgacaccaugaacucccucacccuccccuccgaggucaaccucugcaacaucgacaucuucaaccccaaguacgacugcaagaucaugaccuccaagaccgacgucuccuccuccgucaucaccucccucggcgccaucgucuccugcuacggcaagaccaagugcaccgccuccaacaagaaccgcggcaucaucaagaccuucuccaacggcugcgacuacgucuccaacaagggcgucgacaccgucuccgucggcaacacccucuacuacgucaacaagcaggagggcaagucccucuacgucaagggcgagcccaucaucaacuucuacgacccccucgucuuccccuccgacgaguucgacgccuccaucucccaggucaacgagaagaucaaccagucccucgccuucauccgcaaguccgacgagcuccuccacaacgucaacgucggcaaguccaccaccaacaucaugaucaccaccaucaucaucgucaucaucgucauccuccuccuccucaucgccgucggccucuuccucuacugcaaggcccgcugaggacuagugaagggaacacccaaauuuaauucagccuuaagcacaauuaauuaagagugaaacguaauuguacaagcaguuggucacccaccauagggcaugaucaacaccgcaaccuuuccuuuuucccccagugauucugaaaaaccccucuucccuucagcuugcuuagauguuccaaauuuaguaagcuuaaggcggccuacagaagaaaaagaaaaaaaaggccacaaaaguucccucucacuuucaguaaauaaaauaaaagcagcaacagaaauaaagaaauaaaugaaauucaaaaugaaauaaauauuguguugugcagcauuaaaaaaucaauaaaaauuaaaaaugagcaagaucuaaaaaaaaaaaaaaaaaaaaaaaaaaaaaaaaaaaaaaaaaaaaaaaaaaaaaaaaaaaaaaaaugcaucccccccccccccccccccccccccccccccaaaggcucuuuucagagccaccagaauu

SEQ ID NO: 13109 - RNA, 2253 nt, Artificial Sequence
  mRNA product Design g-3 comprising derived and/or modified sequence from HRSV(Memphis-37)__AIY60640.1__F-del_DSCav1 (opt3)
gggagaguccgcucagccagguugcagaagcggcuuagcguguguccuaaucuucucucugcguguagguaggccugugccgcaaacaagcuuaccauggagcugcccauccucaagaccaacgccauuacaacuauacuugcugcagugacgcugugcuucgccagcucccagaauaucaccgaagaguuuuaccaaucuacauguucagcggucaguaaaggcuauuugagcgcuuuaagaacugggugguacaccuccguuauuacaaucgaacugucuaacauuaaggagaauaaaugcaacggaaccgacgccaaggugaaacuaaucaagcaggaacucgauaaguauaaaaaugcaguaacugagcugcagcuucugaugcagucgaccccugccgcuaacaauagggcacggcgcgaguugccacgauucaugaacuacacacucaauaacacgaagaauaacaaugugacucugagcaaaaagcguaaaagaagguuucuggguuuccucuuaggcgucgggucagccauagcuaguggaaucgccguguguaagguucugcaccuugaaggcgaggugaacaagauuaaaaaugcguugcuguccaccaacaaggcagucgugucucuaagcaacgguguauccguucucacauuuaaagugcuggaccuuaagaauuauaucgauaaacaacuguugccgauucucaacaagcagucaugcaguaucagcaauauagaaacugucauugaguuccagcagaaaaacaaucggcuguuagagaucacccgcgaauuuucugugaacgccggggugacaacccccgucuccacguacaugcugacuaauucagagcuccuuagccugauuaacgacaugccuaucacaaaugaucaaaagaaguugaugaguaacaauguucagaucgugagacagcagucuuauuccauuauguguauaaucaaagaagagguacuagcuuacgugguccaacugccacucuacggagugauugacacccccugcuggaagcugcauacuagcccucuuuguacaaccaacacgaaagaaggcucgaauaucugccugaccaggacagaucggggcugguauugugacaacgccgggucuguuuccuucuuuccacaggcagagacuugcaaggugcagucaaaucgcgucuucugugauaccaugaacaguuugacacuccccagcgaggugaaccugugcaauauagacauuuuuaacccuaaauacgauugcaagaucaugacuuccaagaccgacguaucuagcucaguuaucacaaguuuaggagcuauuguguccuguuaugguaaaaccaagugcacugccagcaauaaaaaccgaggcaucauuaagacguucucuaaugggugugauuacgucucaaacaaaggaguggacacagucagugugggcaauacccuguauuacguuaacaagcaagaagguaagagccuauaugugaaaggggagccaauaaucaauuuuuacgacccgcucguauuccccuccgaugaguucgacgcgucuauuucgcaggucaacgaaaagaucaaucagagccuggccuuuaucagaaaauccgaugaacuuuugcacaacgugaauguuggaaagucaacuaccaacauuaugauaacaaccaucauuaucgugauuaucgucauacugcuccugcuuaucgcagugggccuguucuuguacugcaaagcuaggugaggacuagugaagggaacacccaaauuuaauucagccuuaagcacaauuaauuaagagugaaacguaauuguacaagcaguuggucacccaccauagggcaugaucaacaccgcaaccuuuccuuuuucccccagugauucugaaaaaccccucuucccuucagcuugcuuagauguuccaaauuuaguaagcuuaaggcggccuacagaagaaaaagaaaaaaaaggccacaaaaguucccucucacuuucaguaaauaaaauaaaagcagcaacagaaauaaagaaauaaaugaaauucaaaaugaaauaaauauuguguugugcagcauuaaaaaaucaauaaaaauuaaaaaugagcaagaucuaaaaaaaaaaaaaaaaaaaaaaaaaaaaaaaaaaaaaaaaaaaaaaaaaaaaaaaaaaaaaaaaugcaucccccccccccccccccccccccccccccccaaaggcucuuuucagagccaccagaauu

SEQ ID NO: 13110 - RNA, 2253 nt, Artificial Sequence
  mRNA product Design g-3 comprising derived and/or modified sequence from HRSV(Memphis-37)__AIY60640.1__F-del_DSCav1 (opt4)
gggagaguccgcucagccagguugcagaagcggcuuagcguguguccuaaucuucucucugcguguagguaggccugugccgcaaacaagcuuaccauggagcugcccauccugaagaccaacgccaucaccaccauccuggccgccgugacccugugcuucgccagcagccagaacaucaccgaggaguucuaccagagcaccugcagcgccgugagcaagggcuaccugagcgcccugagaaccggcugguacaccagcgugaucaccaucgagcugagcaacaucaaggagaacaagugcaacggcaccgacgccaaggugaagcugaucaagcaggagcuggacaaguacaagaacgccgugaccgagcugcagcugcugaugcagagcacccccgccgccaacaacagagccagaagagagcugcccagauucaugaacuacacccugaacaacaccaagaacaacaacgugacccugagcaagaagagaaagagaagauuccugggcuuccugcugggcgugggcagcgccaucgccagcggcaucgccgugugcaaggugcugcaccuggagggcgaggugaacaagaucaagaacgcccugcugagcaccaacaaggccguggugagccugagcaacggcgugagcgugcugaccuucaaggugcuggaccugaagaacuacaucgacaagcagcugcugcccauccugaacaagcagagcugcagcaucagcaacaucgagaccgugaucgaguuccagcagaagaacaacagacugcuggagaucaccagagaguucagcgugaacgccggcgugaccacccccgugagcaccuacaugcugaccaacagcgagcugcugagccugaucaacgacaugcccaucaccaacgaccagaagaagcugaugagcaacaacgugcagaucgugagacagcagagcuacagcaucaugugcaucaucaaggaggaggugcuggccuacguggugcagcugccccuguacggcgugaucgacacccccugcuggaagcugcacaccagcccccugugcaccaccaacaccaaggagggcagcaacaucugccugaccagaaccgacagaggcugguacugcgacaacgccggcagcgugagcuucuucccccaggccgagaccugcaaggugcagagcaacagaguguucugcgacaccaugaacagccugacccugcccagcgaggugaaccugugcaacaucgacaucuucaaccccaaguacgacugcaagaucaugaccagcaagaccgacgugagcagcagcgugaucaccagccugggcgccaucgugagcugcuacggcaagaccaagugcaccgccagcaacaagaacagaggcaucaucaagaccuucagcaacggcugcgacuacgugagcaacaagggcguggacaccgugagcgugggcaacacccuguacuacgugaacaagcaggagggcaagagccuguacgugaagggcgagcccaucaucaacuucuacgacccccugguguuccccagcgacgaguucgacgccagcaucagccaggugaacgagaagaucaaccagagccuggccuucaucagaaagagcgacgagcugcugcacaacgugaacgugggcaagagcaccaccaacaucaugaucaccaccaucaucaucgugaucaucgugauccugcugcugcugaucgccgugggccuguuccuguacugcaaggccagaugaggacuagugaagggaacacccaaauuuaauucagccuuaagcacaauuaauuaagagugaaacguaauuguacaagcaguuggucacccaccauagggcaugaucaacaccgcaaccuuuccuuuuucccccagugauucugaaaaaccccucuucccuucagcuugcuuagauguuccaaauuuaguaagcuuaaggcggccuacagaagaaaaagaaaaaaaaggccacaaaaguucccucucacuuucaguaaauaaaauaaaagcagcaacagaaauaaagaaauaaaugaaauucaaaaugaaauaaauauuguguugugcagcauuaaaaaaucaauaaaaauuaaaaaugagcaagaucuaaaaaaaaaaaaaaaaaaaaaaaaaaaaaaaaaaaaaaaaaaaaaaaaaaaaaaaaaaaaaaaaugcaucccccccccccccccccccccccccccccccaaaggcucuuuucagagccaccagaauu

SEQ ID NO: 13111 - RNA, 2253 nt, Artificial Sequence
  mRNA product Design g-3 comprising derived and/or modified sequence from HRSV(Memphis-37)__AIY60640.1__F-del_DSCav1 (opt5)
gggagaguccgcucagccagguugcagaagcggcuuagcguguguccuaaucuucucucugcguguagguaggccugugccgcaaacaagcuuaccauggagcugcccauccucaagaccaacgccauuacaacgauccuggcugccgugacccuuugcuucgcgagcucccagaauauuacagaagaguuuuaccaaucuaccuguagcgcugucuccaaaggcuaucugucugcccucagaacagggugguacaccagcguuaucacaauugaacuguccaacaucaaggagaauaaaugcaacggaaccgacgccaaggugaaacuuaucaagcaggaacuggauaaguauaaaaaugcugugacggagcuccagcugcugaugcagucuaccccugccgcuaacaaucgggcccgcagagagcucccgcgguucaugaacuacacacugaauaacaccaagaauaacaaugucacacuuagcaaaaagcgcaaaagacgguuucugggcuuccuccugggggugggauccgcgauugccagcggcaucgcuguuuguaaggugcuucaccuggaaggggaggucaacaagauuaaaaaugcccuccugucuaccaacaaggcugugguuucccugagcaacggagugucuguccucacguuuaaagugcuggaccuuaagaauuauaucgauaaacaacugcuccccauucugaacaagcaguccugcagcaucucuaauauugaaacagugaucgaguuccagcagaaaaacaaucgccuucuggagaucaccagagaauuuuccgucaacgccggcguuacaaccccugugagcaccuacaugcucacaaauuccgagcugcugucucucauuaacgacaugcccaucacgaaugaucaaaagaagcugaugagcaacaaugugcagauuguccggcagcaguccuauagcaucauguguauuaucaaagaagaggugcuugcguacguugugcaacugccucucuacggcgucaucgacacccccugcuggaagcugcauacaucuccucuuuguaccacaaacaccaaagaaggguccaauauuugccugacgcgcacagauagaggaugguauugugacaacgccggcagcgugucuuucuuuccgcaggcugagaccugcaagguucagagcaaucggguguucugugauaccaugaacucccucacacugcccucugaggucaaccugugcaauaucgacauuuuuaacccuaaauacgauugcaagaucaugaccagcaagacagacguguccagcucugucauuacgucccucggggccaucgugagcuguuauggaaaaaccaagugcacagcuucuaauaaaaaccgcggcaucauuaagaccuucuccaaugggugugauuacguuagcaacaaaggaguggacacagucuccgugggcaauacccuguauuacguuaacaagcaagaaggcaagucucuuuaugugaaaggggagcccaucauuaauuuuuacgacccucuggucuuccccagcgaugaguucgacgccuccaucucucaggugaacgaaaagauuaaucagagccucgccuuuaucagaaaauccgaugaacugcugcacaacgugaauguuggaaagagcacgaccaacauuaugaucacaaccaucauuaucgucauuaucgugauucuucuccugcugaucgcugugggccucuuccuguacugcaaagcgcggugaggacuagugaagggaacacccaaauuuaauucagccuuaagcacaauuaauuaagagugaaacguaauuguacaagcaguuggucacccaccauagggcaugaucaacaccgcaaccuuuccuuuuucccccagugauucugaaaaaccccucuucccuucagcuugcuuagauguuccaaauuuaguaagcuuaaggcggccuacagaagaaaaagaaaaaaaaggccacaaaaguucccucucacuuucaguaaauaaaauaaaagcagcaacagaaauaaagaaauaaaugaaauucaaaaugaaauaaauauuguguugugcagcauuaaaaaaucaauaaaaauuaaaaaugagcaagaucuaaaaaaaaaaaaaaaaaaaaaaaaaaaaaaaaaaaaaaaaaaaaaaaaaaaaaaaaaaaaaaaaugcaucccccccccccccccccccccccccccccccaaaggcucuuuucagagccaccagaauu

SEQ ID NO: 13112 - RNA, 2253 nt, Artificial Sequence
  mRNA product Design g-3 comprising derived and/or modified sequence from HRSV(Memphis-37)__AIY60640.1__F-del_DSCav1 (opt6)
gggagaguccgcucagccagguugcagaagcggcuuagcguguguccuaaucuucucucugcguguagguaggccugugccgcaaacaagcuuaccauggaauuaccaauccuuaaaacaaacgcaauaacaaccauccucgcagcaguaacucucugcuucgcuucaucucaaaacaucacagaagaauuuuaccaaagcacaugcucagcuguauccaaagguuaucuaucagccuugagaaccggaugguacacaucaguaauaacaauugaacuaucaaacauuaaagaaaacaaaugcaacggcaccgacgcaaaaguaaaacuaaucaaacaagaacuagacaaauauaaaaaugcaguaacagaauuacaauuauuaaugcaauccacaccagcugcaaacaaccgagcccgaagagaacuaccaagauucaugaacuacacacuaaacaacaccaaaaauaacaacgucacccuaucuaaaaaacguaaaagaagauucuuaggauuccucuuaggagucggauccgcaauagcaagcggcauagccguauguaaaguccuacacuuagaaggugaagugaauaaaauaaaaaacgcccuauuaagcacuaacaaagcaguagucucccuaucaaacggaguuucaguacucacauucaaaguacucgaccucaaaaacuacaucgacaaacaacuuuuaccaauucuaaacaaacaaucaugcuccauaucuaauaucgaaaccgucaucgaauuucaacaaaaaaacaauagacuacuagaaauaacuagagaauuuucaguaaacgccggcguuacgacaccagucucuacauacauguuaaccaauucagaacucuuaucauuaaucaacgacaugccaauaacaaacgaccaaaaaaaacuaauguccaauaacguacaaauagucagacaacaaucauacucaauuaugugcauaauaaaagaagaaguacuagcuuacguaguacaacucccccuauacggcguaauagacacuccauguuggaaauuacacacaucaccauuauguaccaccaauacaaaagaaggcucaaacauaugccuaacaagaacagauagaggaugguauugcgacaacgcaggcucaguuuccuuuuucccccaagcagaaaccugcaaaguacaaucaaaucguguuuuuugcgacaccaugaacucacucacauuaccaucagaaguaaaccuaugcaacauagacauauucaacccaaaauacgacugcaaaaucaugacaucaaaaacagacguauccucuucaguaauuacuagcuuaggagcaauagucucuuguuauggaaaaacaaaaugcacagccaguaacaaaaaccgcggaauaauaaaaaccuucucaaacgguugcgauuacgucucuaacaaaggagucgacacaguaucaguaggcaauacauuauacuacguuaacaaacaagaaggaaaaucuuuauacgucaaaggagaacccauuauaaacuuuuacgacccauuagucuucccuuccgacgaauuugacgccagcauuucacaaguaaacgaaaaaauaaaccaaucacucgcauuuauaagaaaaucugacgaauuacuccacaacguaaacguaggaaaauccacaacaaacauaaugauaacaaccauaaucaucgucauaauagucauacuucuccuauuaauugcaguaggcuuauuccuauacuguaaagcacgauaaggacuagugaagggaacacccaaauuuaauucagccuuaagcacaauuaauuaagagugaaacguaauuguacaagcaguuggucacccaccauagggcaugaucaacaccgcaaccuuuccuuuuucccccagugauucugaaaaaccccucuucccuucagcuugcuuagauguuccaaauuuaguaagcuuaaggcggccuacagaagaaaaagaaaaaaaaggccacaaaaguucccucucacuuucaguaaauaaaauaaaagcagcaacagaaauaaagaaauaaaugaaauucaaaaugaaauaaauauuguguugugcagcauuaaaaaaucaauaaaaauuaaaaaugagcaagaucuaaaaaaaaaaaaaaaaaaaaaaaaaaaaaaaaaaaaaaaaaaaaaaaaaaaaaaaaaaaaaaaaugcaucccccccccccccccccccccccccccccccaaaggcucuuuucagagccaccagaauu

SEQ ID NO: 13113 - RNA, 2253 nt, Artificial Sequence
  mRNA product Design g-3 comprising derived and/or modified sequence from HRSV(Memphis-37)__AIY60640.1__F-del_DSCav1 (opt11)
gggagaguccgcucagccagguugcagaagcggcuuagcguguguccuaaucuucucucugcguguagguaggccugugccgcaaacaagcuuaccauggaacuaccaauccuaaaaacuaacgcaaucaccacaauccucgccgccgucacccuuugcuuugcguccucccaaaacauuacugaagaguucuaccaauccacgugcuccgccgucuccaaagguuaccuauccgcccuuaggaccggcugguacaccagcgucaucaccaucgaacuuuccaacaucaaagaaaacaaauguaacggcaccgacgcaaaagucaaacuuauuaaacaggaacucgacaaauauaagaaugccgucaccgaauuacaacuccucaugcaauccacccccgccgccaacaaccgagcaaggcgcgaacucccucgauucaugaauuacacccucaacaauaccaaaaacaacaacgucacccuauccaagaaacgcaaaagacgcuucuugggcuuccuccucggcgugggcuccgcaauagccuccgguauugccgugugcaaagucuuacaccucgaaggcgaggucaacaaaaucaaaaacgcccuccucuccaccaacaaagccgucgucagccuauccaacggcguuuccguccucaccuucaaaguacucgaccucaaaaacuacaucgacaaacaacuccuacccauacuaaacaaacaauccugcuccauuuccaacaucgaaaccguaaucgaguuccaacagaaaaacaaucgccuccuagaaaucacacgugaauuuucaguuaacgccggaguaacaacuccuguaucuaccuacaugcucaccaauuccgaacuccucagccucauaaacgacaugccaauaacaaacgaccaaaagaaacucaugucuaacaacguacaaaucgucagacaacaaaguuacucaaucauguguaucaucaaagaggaaguccuagcauacgugguccaacucccccucuacggaguaaucgacaccccaugcuggaaacuacacaccagcccccucuguaccacaaacacgaaagaagguuccaacaucugccugacccgaaccgaccgcggcugguacugcgauaacgcuggcuccgucucauucuucccccaagcagaaaccugcaaaguacaauccaaccgaguauucugcgacaccaugaacucacucacccuccccagcgaaguaaaccucugcaacaucgacauauucaacccaaaauacgacugcaaaauuaugaccucuaaaacagacguauccuccucuguaaucacaucccucggggccaucgucuccugcuacggcaaaaccaaaugcaccgccuccaacaaaaaccgcggaaucauaaaaaccuucuccaacggaugcgacuacgucucaaauaaaggcgucgacaccgucuccgucggcaacacgcuauacuacgucaacaaacaagaaggcaaaucacucuacgucaaaggugagcccaucaucaauuucuacgauccccucgucuucccaagcgacgaguucgacgccagcauaucccaaguaaacgagaaaaucaaccaaagccuggccuucauccgcaaauccgacgaacuacuacacaacguaaacguaggcaaguccacuaccaacauaaugaucaccacaaucaucauagucauaaucguuauacuacuccugcucaucgccguaggccucuuccucuauugcaaagcccgauagggacuagugaagggaacacccaaauuuaauucagccuuaagcacaauuaauuaagagugaaacguaauuguacaagcaguuggucacccaccauagggcaugaucaacaccgcaaccuuuccuuuuucccccagugauucugaaaaaccccucuucccuucagcuugcuuagauguuccaaauuuaguaagcuuaaggcggccuacagaagaaaaagaaaaaaaaggccacaaaaguucccucucacuuucaguaaauaaaauaaaagcagcaacagaaauaaagaaauaaaugaaauucaaaaugaaauaaauauuguguugugcagcauuaaaaaaucaauaaaaauuaaaaaugagcaagaucuaaaaaaaaaaaaaaaaaaaaaaaaaaaaaaaaaaaaaaaaaaaaaaaaaaaaaaaaaaaaaaaaugcaucccccccccccccccccccccccccccccccaaaggcucuuuucagagccaccagaauu

SEQ ID NO: 13114 - RNA, 2048 nt, Artificial Sequence
  mRNA product Design g-4 comprising derived and/or modified sequence from HRSV(Memphis-37)__AIY60640.1__F-del_DSCav1 (opt1)
gggagacuccugucgggcggaaguaggaggaguagaguuuaaaaacaguacucuuuuuccgguucgggacguaguugaagcaacgacaagccggauaaccgcucuugagacaggaagcuuaccauggagcugcccauccucaagaccaacgccaucaccacgauccuggccgcggugacccugugcuucgccagcucccagaacaucaccgaggaguucuaccagagcacgugcuccgccgucagcaagggcuaccucuccgcccugcgcaccgggugguacaccagcgugaucaccaucgagcuguccaacaucaaggagaacaagugcaacggcaccgacgccaaggugaagcucaucaagcaggagcuggacaaguacaagaacgcggucacggagcugcagcuccugaugcagagcaccccggccgccaacaaccgggcccgccgggagcugccccgcuucaugaacuacacccucaacaacaccaagaacaacaacgugacgcuguccaagaagcggaagcgccgguuccugggguuccuccugggcguggggagcgcgaucgccuccggcaucgccgucugcaaggugcugcaccucgagggcgaggugaacaagaucaagaacgcccugcuguccaccaacaaggccgucgugagccucuccaacggggugagcguccugaccuucaaggugcuggaccucaagaacuacaucgacaagcagcugcugcccauccugaacaagcagagcugcuccaucagcaacaucgagaccgucaucgaguuccagcagaagaacaaccgccuccuggagaucacgcgggaguucagcgugaacgcgggcgugaccacccccgucuccaccuacaugcugacgaacagcgagcuccugucccugaucaacgacaugccgaucaccaacgaccagaagaagcucaugagcaacaacgugcagaucgugcgccagcaguccuacagcaucaugugcaucaucaaggaggagguccuggccuacguggugcagcugccccucuacggggucaucgacacccccugcuggaagcugcacaccagcccccugugcacgaccaacaccaaggagggcuccaacaucugccucacccggacggaccgcgggugguacugcgacaacgccggcagcguguccuucuucccgcaggccgagaccugcaagguccagagcaaccggguguucugcgacaccaugaacucccugacccugcccagcgaggugaaccucugcaacaucgacaucuucaaccccaaguacgacugcaagaucaugacguccaagaccgacgucagcuccagcgugaucaccucccugggcgccaucgugagcugcuacgggaagaccaagugcacggcgagcaacaagaaccgcggcaucaucaagaccuucuccaacgggugcgacuacgucagcaacaagggcguggacaccguguccgucggcaacacccuguacuacgugaacaagcaggagggcaagagccucuacgugaagggggagcccaucaucaacuucuacgacccgcuggucuuccccuccgacgaguucgacgccagcaucucccaggugaacgagaagaucaaccagagccuggccuucauccggaaguccgacgagcuccugcacaacgugaacgucggcaagagcaccacgaacaucaugaucaccaccaucaucaucgugaucaucgugauccugcugcuccugaucgccgucgggcuguuccucuacugcaaggcccgcugaggacuaguaauaaggaaacuguaugaaugucugugggcaggaagugaagagauccuucuguaaagguuuuuggaauuaugucugcugaauaauaaacuuuuuugaaauaauaaaucugguagaaaaaugagaucuaaaaaaaaaaaaaaaaaaaaaaaaaaaaaaaaaaaaaaaaaaaaaaaaaaaaaaaaaaaaaaaaugcaucccccccccccccccccccccccccccccccaaaggcucuuuucagagccaccagaauu

SEQ ID NO: 13115 - RNA, 2048 nt, Artificial Sequence
  mRNA product Design g-4 comprising derived and/or modified sequence from HRSV(Memphis-37)__AIY60640.1__F-del_DSCav1 (opt1)
gggagacuccugucgggcggaaguaggaggaguagaguuuaaaaacaguacucuuuuuccgguucgggacguaguugaagcaacgacaagccggauaaccgcucuugagacaggaagcuuaccauggagcugcccauccucaagaccaacgccaucaccacgauccuggccgcggugacccugugcuucgccagcucccagaacaucaccgaggaguucuaccagagcacgugcuccgccgucagcaagggcuaccucuccgcccugcgcaccgggugguacaccagcgugaucaccaucgagcuguccaacaucaaggagaacaagugcaacggcaccgacgccaaggugaagcucaucaagcaggagcuggacaaguacaagaacgcggucacggagcugcagcuccugaugcagagcaccccggccgccaacaaccgggcccgccgggagcugccccgcuucaugaacuacacccucaacaacaccaagaacaacaacgugacgcuguccaagaagcggaagcgccgguuccugggguuccuccugggcguggggagcgcgaucgccuccggcaucgccgucugcaaggugcugcaccucgagggcgaggugaacaagaucaagaacgcccugcugagcaccaacaaggccgucgugucccucagcaacgggguguccguccugaccuucaaggugcuggaccucaagaacuacaucgacaagcagcugcugcccauccucaacaagcagagcugcuccaucagcaacaucgagaccgugaucgaguuccagcagaagaacaaccgccugcuggagaucacgcgggaguucuccgucaacgcgggcgugaccacccccgugagcaccuacaugcucacgaacagcgagcugcugucccucaucaacgacaugccgaucaccaacgaccagaagaagcugaugagcaacaacguccagaucgugcgccagcaguccuacagcaucaugugcaucaucaaggaggaggugcuggccuacgucgugcagcucccccuguacggggugaucgacacccccugcuggaagcugcacaccagcccccucugcacgaccaacaccaaggagggcagcaacaucugccugacccggacggaccgcgggugguacugcgacaacgccggcuccgucagcuucuucccgcaggccgagaccugcaaggugcaguccaaccgggucuucugcgacaccaugaacagccugacccuccccuccgaggugaaccugugcaacaucgacaucuucaaccccaaguacgacugcaagaucaugacgagcaagaccgacguguccagcuccgucaucaccagccugggcgccaucguguccugcuacgggaagaccaagugcacggcgagcaacaagaaccgcggcaucaucaagaccuucuccaacgggugcgacuacgugagcaacaagggcgucgacaccgugagcgugggcaacacccucuacuacgucaacaagcaggaggggaagucccuguacgugaagggcgagcccaucaucaacuucuacgacccgcugguguuccccagcgacgaguucgacgccuccaucagccaggucaacgagaagaucaaccagucccucgccuucauccggaaguccgacgagcugcugcacaacgugaacguggggaaguccaccacgaacaucaugaucaccaccaucaucaucgucaucaucgugauccugcuccugcugaucgccgugggccucuuccuguacugcaaggcccgcugaggacuaguaauaaggaaacuguaugaaugucugugggcaggaagugaagagauccuucuguaaagguuuuuggaauuaugucugcugaauaauaaacuuuuuugaaauaauaaaucugguagaaaaaugagaucuaaaaaaaaaaaaaaaaaaaaaaaaaaaaaaaaaaaaaaaaaaaaaaaaaaaaaaaaaaaaaaaaugcaucccccccccccccccccccccccccccccccaaaggcucuuuucagagccaccagaauu

SEQ ID NO: 13116 - RNA, 2048 nt, Artificial Sequence
  mRNA product Design g-4 comprising derived and/or modified sequence from HRSV(Memphis-37)__AIY60640.1__F-del_DSCav1 (opt2)
gggagacuccugucgggcggaaguaggaggaguagaguuuaaaaacaguacucuuuuuccgguucgggacguaguugaagcaacgacaagccggauaaccgcucuugagacaggaagcuuaccauggagcuccccauccucaagaccaacgccaucaccaccauccucgccgccgucacccucugcuucgccuccucccagaacaucaccgaggaguucuaccaguccaccugcuccgccgucuccaagggcuaccucuccgcccuccgcaccggcugguacaccuccgucaucaccaucgagcucuccaacaucaaggagaacaagugcaacggcaccgacgccaaggucaagcucaucaagcaggagcucgacaaguacaagaacgccgucaccgagcuccagcuccucaugcaguccacccccgccgccaacaaccgcgcccgccgcgagcucccccgcuucaugaacuacacccucaacaacaccaagaacaacaacgucacccucuccaagaagcgcaagcgccgcuuccucggcuuccuccucggcgucggcuccgccaucgccuccggcaucgccgucugcaagguccuccaccucgagggcgaggucaacaagaucaagaacgcccuccucuccaccaacaaggccgucgucucccucuccaacggcgucuccguccucaccuucaagguccucgaccucaagaacuacaucgacaagcagcuccuccccauccucaacaagcaguccugcuccaucuccaacaucgagaccgucaucgaguuccagcagaagaacaaccgccuccucgagaucacccgcgaguucuccgucaacgccggcgucaccacccccgucuccaccuacaugcucaccaacuccgagcuccucucccucaucaacgacaugcccaucaccaacgaccagaagaagcucauguccaacaacguccagaucguccgccagcaguccuacuccaucaugugcaucaucaaggaggagguccucgccuacgucguccagcucccccucuacggcgucaucgacacccccugcuggaagcuccacaccuccccccucugcaccaccaacaccaaggagggcuccaacaucugccucacccgcaccgaccgcggcugguacugcgacaacgccggcuccgucuccuucuucccccaggccgagaccugcaagguccaguccaaccgcgucuucugcgacaccaugaacucccucacccuccccuccgaggucaaccucugcaacaucgacaucuucaaccccaaguacgacugcaagaucaugaccuccaagaccgacgucuccuccuccgucaucaccucccucggcgccaucgucuccugcuacggcaagaccaagugcaccgccuccaacaagaaccgcggcaucaucaagaccuucuccaacggcugcgacuacgucuccaacaagggcgucgacaccgucuccgucggcaacacccucuacuacgucaacaagcaggagggcaagucccucuacgucaagggcgagcccaucaucaacuucuacgacccccucgucuuccccuccgacgaguucgacgccuccaucucccaggucaacgagaagaucaaccagucccucgccuucauccgcaaguccgacgagcuccuccacaacgucaacgucggcaaguccaccaccaacaucaugaucaccaccaucaucaucgucaucaucgucauccuccuccuccucaucgccgucggccucuuccucuacugcaaggcccgcugaggacuaguaauaaggaaacuguaugaaugucugugggcaggaagugaagagauccuucuguaaagguuuuuggaauuaugucugcugaauaauaaacuuuuuugaaauaauaaaucugguagaaaaaugagaucuaaaaaaaaaaaaaaaaaaaaaaaaaaaaaaaaaaaaaaaaaaaaaaaaaaaaaaaaaaaaaaaaugcaucccccccccccccccccccccccccccccccaaaggcucuuuucagagccaccagaauu

SEQ ID NO: 13117 - RNA, 2048 nt, Artificial Sequence
  mRNA product Design g-4 comprising derived and/or modified sequence from HRSV(Memphis-37)__AIY60640.1__F-del_DSCav1 (opt3)
gggagacuccugucgggcggaaguaggaggaguagaguuuaaaaacaguacucuuuuuccgguucgggacguaguugaagcaacgacaagccggauaaccgcucuugagacaggaagcuuaccauggagcugcccauccucaagaccaacgccauuacaacuauacuugcugcagugacgcugugcuucgccagcucccagaauaucaccgaagaguuuuaccaaucuacauguucagcggucaguaaaggcuauuugagcgcuuuaagaacugggugguacaccuccguuauuacaaucgaacugucuaacauuaaggagaauaaaugcaacggaaccgacgccaaggugaaacuaaucaagcaggaacucgauaaguauaaaaaugcaguaacugagcugcagcuucugaugcagucgaccccugccgcuaacaauagggcacggcgcgaguugccacgauucaugaacuacacacucaauaacacgaagaauaacaaugugacucugagcaaaaagcguaaaagaagguuucuggguuuccucuuaggcgucgggucagccauagcuaguggaaucgccguguguaagguucugcaccuugaaggcgaggugaacaagauuaaaaaugcguugcuguccaccaacaaggcagucgugucucuaagcaacgguguauccguucucacauuuaaagugcuggaccuuaagaauuauaucgauaaacaacuguugccgauucucaacaagcagucaugcaguaucagcaauauagaaacugucauugaguuccagcagaaaaacaaucggcuguuagagaucacccgcgaauuuucugugaacgccggggugacaacccccgucuccacguacaugcugacuaauucagagcuccuuagccugauuaacgacaugccuaucacaaaugaucaaaagaaguugaugaguaacaauguucagaucgugagacagcagucuuauuccauuauguguauaaucaaagaagagguacuagcuuacgugguccaacugccacucuacggagugauugacacccccugcuggaagcugcauacuagcccucuuuguacaaccaacacgaaagaaggcucgaauaucugccugaccaggacagaucggggcugguauugugacaacgccgggucuguuuccuucuuuccacaggcagagacuugcaaggugcagucaaaucgcgucuucugugauaccaugaacaguuugacacuccccagcgaggugaaccugugcaauauagacauuuuuaacccuaaauacgauugcaagaucaugacuuccaagaccgacguaucuagcucaguuaucacaaguuuaggagcuauuguguccuguuaugguaaaaccaagugcacugccagcaauaaaaaccgaggcaucauuaagacguucucuaaugggugugauuacgucucaaacaaaggaguggacacagucagugugggcaauacccuguauuacguuaacaagcaagaagguaagagccuauaugugaaaggggagccaauaaucaauuuuuacgacccgcucguauuccccuccgaugaguucgacgcgucuauuucgcaggucaacgaaaagaucaaucagagccuggccuuuaucagaaaauccgaugaacuuuugcacaacgugaauguuggaaagucaacuaccaacauuaugauaacaaccaucauuaucgugauuaucgucauacugcuccugcuuaucgcagugggccuguucuuguacugcaaagcuaggugaggacuaguaauaaggaaacuguaugaaugucugugggcaggaagugaagagauccuucuguaaagguuuuuggaauuaugucugcugaauaauaaacuuuuuugaaauaauaaaucugguagaaaaaugagaucuaaaaaaaaaaaaaaaaaaaaaaaaaaaaaaaaaaaaaaaaaaaaaaaaaaaaaaaaaaaaaaaaugcaucccccccccccccccccccccccccccccccaaaggcucuuuucagagccaccagaauu

SEQ ID NO: 13118 - RNA, 2048 nt, Artificial Sequence
  mRNA product Design g-4 comprising derived and/or modified sequence from HRSV(Memphis-37)__AIY60640.1__F-del_DSCav1 (opt4)
gggagacuccugucgggcggaaguaggaggaguagaguuuaaaaacaguacucuuuuuccgguucgggacguaguugaagcaacgacaagccggauaaccgcucuugagacaggaagcuuaccauggagcugcccauccugaagaccaacgccaucaccaccauccuggccgccgugacccugugcuucgccagcagccagaacaucaccgaggaguucuaccagagcaccugcagcgccgugagcaagggcuaccugagcgcccugagaaccggcugguacaccagcgugaucaccaucgagcugagcaacaucaaggagaacaagugcaacggcaccgacgccaaggugaagcugaucaagcaggagcuggacaaguacaagaacgccgugaccgagcugcagcugcugaugcagagcacccccgccgccaacaacagagccagaagagagcugcccagauucaugaacuacacccugaacaacaccaagaacaacaacgugacccugagcaagaagagaaagagaagauuccugggcuuccugcugggcgugggcagcgccaucgccagcggcaucgccgugugcaaggugcugcaccuggagggcgaggugaacaagaucaagaacgcccugcugagcaccaacaaggccguggugagccugagcaacggcgugagcgugcugaccuucaaggugcuggaccugaagaacuacaucgacaagcagcugcugcccauccugaacaagcagagcugcagcaucagcaacaucgagaccgugaucgaguuccagcagaagaacaacagacugcuggagaucaccagagaguucagcgugaacgccggcgugaccacccccgugagcaccuacaugcugaccaacagcgagcugcugagccugaucaacgacaugcccaucaccaacgaccagaagaagcugaugagcaacaacgugcagaucgugagacagcagagcuacagcaucaugugcaucaucaaggaggaggugcuggccuacguggugcagcugccccuguacggcgugaucgacacccccugcuggaagcugcacaccagcccccugugcaccaccaacaccaaggagggcagcaacaucugccugaccagaaccgacagaggcugguacugcgacaacgccggcagcgugagcuucuucccccaggccgagaccugcaaggugcagagcaacagaguguucugcgacaccaugaacagccugacccugcccagcgaggugaaccugugcaacaucgacaucuucaaccccaaguacgacugcaagaucaugaccagcaagaccgacgugagcagcagcgugaucaccagccugggcgccaucgugagcugcuacggcaagaccaagugcaccgccagcaacaagaacagaggcaucaucaagaccuucagcaacggcugcgacuacgugagcaacaagggcguggacaccgugagcgugggcaacacccuguacuacgugaacaagcaggagggcaagagccuguacgugaagggcgagcccaucaucaacuucuacgacccccugguguuccccagcgacgaguucgacgccagcaucagccaggugaacgagaagaucaaccagagccuggccuucaucagaaagagcgacgagcugcugcacaacgugaacgugggcaagagcaccaccaacaucaugaucaccaccaucaucaucgugaucaucgugauccugcugcugcugaucgccgugggccuguuccuguacugcaaggccagaugaggacuaguaauaaggaaacuguaugaaugucugugggcaggaagugaagagauccuucuguaaagguuuuuggaauuaugucugcugaauaauaaacuuuuuugaaauaauaaaucugguagaaaaaugagaucuaaaaaaaaaaaaaaaaaaaaaaaaaaaaaaaaaaaaaaaaaaaaaaaaaaaaaaaaaaaaaaaaugcaucccccccccccccccccccccccccccccccaaaggcucuuuucagagccaccagaauu

SEQ ID NO: 13119 - RNA, 2048 nt, Artificial Sequence
  mRNA product Design g-4 comprising derived and/or modified sequence from HRSV(Memphis-37)__AIY60640.1__F-del_DSCav1 (opt5)
gggagacuccugucgggcggaaguaggaggaguagaguuuaaaaacaguacucuuuuuccgguucgggacguaguugaagcaacgacaagccggauaaccgcucuugagacaggaagcuuaccauggagcugcccauccucaagaccaacgccauuacaacgauccuggcugccgugacccuuugcuucgcgagcucccagaauauuacagaagaguuuuaccaaucuaccuguagcgcugucuccaaaggcuaucugucugcccucagaacagggugguacaccagcguuaucacaauugaacuguccaacaucaaggagaauaaaugcaacggaaccgacgccaaggugaaacuuaucaagcaggaacuggauaaguauaaaaaugcugugacggagcuccagcugcugaugcagucuaccccugccgcuaacaaucgggcccgcagagagcucccgcgguucaugaacuacacacugaauaacaccaagaauaacaaugucacacuuagcaaaaagcgcaaaagacgguuucugggcuuccuccugggggugggauccgcgauugccagcggcaucgcuguuuguaaggugcuucaccuggaaggggaggucaacaagauuaaaaaugcccuccugucuaccaacaaggcugugguuucccugagcaacggagugucuguccucacguuuaaagugcuggaccuuaagaauuauaucgauaaacaacugcuccccauucugaacaagcaguccugcagcaucucuaauauugaaacagugaucgaguuccagcagaaaaacaaucgccuucuggagaucaccagagaauuuuccgucaacgccggcguuacaaccccugugagcaccuacaugcucacaaauuccgagcugcugucucucauuaacgacaugcccaucacgaaugaucaaaagaagcugaugagcaacaaugugcagauuguccggcagcaguccuauagcaucauguguauuaucaaagaagaggugcuugcguacguugugcaacugccucucuacggcgucaucgacacccccugcuggaagcugcauacaucuccucuuuguaccacaaacaccaaagaaggguccaauauuugccugacgcgcacagauagaggaugguauugugacaacgccggcagcgugucuuucuuuccgcaggcugagaccugcaagguucagagcaaucggguguucugugauaccaugaacucccucacacugcccucugaggucaaccugugcaauaucgacauuuuuaacccuaaauacgauugcaagaucaugaccagcaagacagacguguccagcucugucauuacgucccucggggccaucgugagcuguuauggaaaaaccaagugcacagcuucuaauaaaaaccgcggcaucauuaagaccuucuccaaugggugugauuacguuagcaacaaaggaguggacacagucuccgugggcaauacccuguauuacguuaacaagcaagaaggcaagucucuuuaugugaaaggggagcccaucauuaauuuuuacgacccucuggucuuccccagcgaugaguucgacgccuccaucucucaggugaacgaaaagauuaaucagagccucgccuuuaucagaaaauccgaugaacugcugcacaacgugaauguuggaaagagcacgaccaacauuaugaucacaaccaucauuaucgucauuaucgugauucuucuccugcugaucgcugugggccucuuccuguacugcaaagcgcggugaggacuaguaauaaggaaacuguaugaaugucugugggcaggaagugaagagauccuucuguaaagguuuuuggaauuaugucugcugaauaauaaacuuuuuugaaauaauaaaucugguagaaaaaugagaucuaaaaaaaaaaaaaaaaaaaaaaaaaaaaaaaaaaaaaaaaaaaaaaaaaaaaaaaaaaaaaaaaugcaucccccccccccccccccccccccccccccccaaaggcucuuuucagagccaccagaauu

SEQ ID NO: 13120 - RNA, 2048 nt, Artificial Sequence
  mRNA product Design g-4 comprising derived and/or modified sequence from HRSV(Memphis-37)__AIY60640.1__F-del_DSCav1 (opt6)
gggagacuccugucgggcggaaguaggaggaguagaguuuaaaaacaguacucuuuuuccgguucgggacguaguugaagcaacgacaagccggauaaccgcucuugagacaggaagcuuaccauggaauuaccaauccuuaaaacaaacgcaauaacaaccauccucgcagcaguaacucucugcuucgcuucaucucaaaacaucacagaagaauuuuaccaaagcacaugcucagcuguauccaaagguuaucuaucagccuugagaaccggaugguacacaucaguaauaacaauugaacuaucaaacauuaaagaaaacaaaugcaacggcaccgacgcaaaaguaaaacuaaucaaacaagaacuagacaaauauaaaaaugcaguaacagaauuacaauuauuaaugcaauccacaccagcugcaaacaaccgagcccgaagagaacuaccaagauucaugaacuacacacuaaacaacaccaaaaauaacaacgucacccuaucuaaaaaacguaaaagaagauucuuaggauuccucuuaggagucggauccgcaauagcaagcggcauagccguauguaaaguccuacacuuagaaggugaagugaauaaaauaaaaaacgcccuauuaagcacuaacaaagcaguagucucccuaucaaacggaguuucaguacucacauucaaaguacucgaccucaaaaacuacaucgacaaacaacuuuuaccaauucuaaacaaacaaucaugcuccauaucuaauaucgaaaccgucaucgaauuucaacaaaaaaacaauagacuacuagaaauaacuagagaauuuucaguaaacgccggcguuacgacaccagucucuacauacauguuaaccaauucagaacucuuaucauuaaucaacgacaugccaauaacaaacgaccaaaaaaaacuaauguccaauaacguacaaauagucagacaacaaucauacucaauuaugugcauaauaaaagaagaaguacuagcuuacguaguacaacucccccuauacggcguaauagacacuccauguuggaaauuacacacaucaccauuauguaccaccaauacaaaagaaggcucaaacauaugccuaacaagaacagauagaggaugguauugcgacaacgcaggcucaguuuccuuuuucccccaagcagaaaccugcaaaguacaaucaaaucguguuuuuugcgacaccaugaacucacucacauuaccaucagaaguaaaccuaugcaacauagacauauucaacccaaaauacgacugcaaaaucaugacaucaaaaacagacguauccucuucaguaauuacuagcuuaggagcaauagucucuuguuauggaaaaacaaaaugcacagccaguaacaaaaaccgcggaauaauaaaaaccuucucaaacgguugcgauuacgucucuaacaaaggagucgacacaguaucaguaggcaauacauuauacuacguuaacaaacaagaaggaaaaucuuuauacgucaaaggagaacccauuauaaacuuuuacgacccauuagucuucccuuccgacgaauuugacgccagcauuucacaaguaaacgaaaaaauaaaccaaucacucgcauuuauaagaaaaucugacgaauuacuccacaacguaaacguaggaaaauccacaacaaacauaaugauaacaaccauaaucaucgucauaauagucauacuucuccuauuaauugcaguaggcuuauuccuauacuguaaagcacgauaaggacuaguaauaaggaaacuguaugaaugucugugggcaggaagugaagagauccuucuguaaagguuuuuggaauuaugucugcugaauaauaaacuuuuuugaaauaauaaaucugguagaaaaaugagaucuaaaaaaaaaaaaaaaaaaaaaaaaaaaaaaaaaaaaaaaaaaaaaaaaaaaaaaaaaaaaaaaaugcaucccccccccccccccccccccccccccccccaaaggcucuuuucagagccaccagaauu

SEQ ID NO: 13121 - RNA, 2048 nt, Artificial Sequence
  mRNA product Design g-4 comprising derived and/or modified sequence from HRSV(Memphis-37)__AIY60640.1__F-del_DSCav1 (opt11)
gggagacuccugucgggcggaaguaggaggaguagaguuuaaaaacaguacucuuuuuccgguucgggacguaguugaagcaacgacaagccggauaaccgcucuugagacaggaagcuuaccauggaacuaccaauccuaaaaacuaacgcaaucaccacaauccucgccgccgucacccuuugcuuugcguccucccaaaacauuacugaagaguucuaccaauccacgugcuccgccgucuccaaagguuaccuauccgcccuuaggaccggcugguacaccagcgucaucaccaucgaacuuuccaacaucaaagaaaacaaauguaacggcaccgacgcaaaagucaaacuuauuaaacaggaacucgacaaauauaagaaugccgucaccgaauuacaacuccucaugcaauccacccccgccgccaacaaccgagcaaggcgcgaacucccucgauucaugaauuacacccucaacaauaccaaaaacaacaacgucacccuauccaagaaacgcaaaagacgcuucuugggcuuccuccucggcgugggcuccgcaauagccuccgguauugccgugugcaaagucuuacaccucgaaggcgaggucaacaaaaucaaaaacgcccuccucuccaccaacaaagccgucgucagccuauccaacggcguuuccguccucaccuucaaaguacucgaccucaaaaacuacaucgacaaacaacuccuacccauacuaaacaaacaauccugcuccauuuccaacaucgaaaccguaaucgaguuccaacagaaaaacaaucgccuccuagaaaucacacgugaauuuucaguuaacgccggaguaacaacuccuguaucuaccuacaugcucaccaauuccgaacuccucagccucauaaacgacaugccaauaacaaacgaccaaaagaaacucaugucuaacaacguacaaaucgucagacaacaaaguuacucaaucauguguaucaucaaagaggaaguccuagcauacgugguccaacucccccucuacggaguaaucgacaccccaugcuggaaacuacacaccagcccccucuguaccacaaacacgaaagaagguuccaacaucugccugacccgaaccgaccgcggcugguacugcgauaacgcuggcuccgucucauucuucccccaagcagaaaccugcaaaguacaauccaaccgaguauucugcgacaccaugaacucacucacccuccccagcgaaguaaaccucugcaacaucgacauauucaacccaaaauacgacugcaaaauuaugaccucuaaaacagacguauccuccucuguaaucacaucccucggggccaucgucuccugcuacggcaaaaccaaaugcaccgccuccaacaaaaaccgcggaaucauaaaaaccuucuccaacggaugcgacuacgucucaaauaaaggcgucgacaccgucuccgucggcaacacgcuauacuacgucaacaaacaagaaggcaaaucacucuacgucaaaggugagcccaucaucaauuucuacgauccccucgucuucccaagcgacgaguucgacgccagcauaucccaaguaaacgagaaaaucaaccaaagccuggccuucauccgcaaauccgacgaacuacuacacaacguaaacguaggcaaguccacuaccaacauaaugaucaccacaaucaucauagucauaaucguuauacuacuccugcucaucgccguaggccucuuccucuauugcaaagcccgauagggacuaguaauaaggaaacuguaugaaugucugugggcaggaagugaagagauccuucuguaaagguuuuuggaauuaugucugcugaauaauaaacuuuuuugaaauaauaaaucugguagaaaaaugagaucuaaaaaaaaaaaaaaaaaaaaaaaaaaaaaaaaaaaaaaaaaaaaaaaaaaaaaaaaaaaaaaaaugcaucccccccccccccccccccccccccccccccaaaggcucuuuucagagccaccagaauu

SEQ ID NO: 13122 - RNA, 2024 nt, Artificial Sequence
  mRNA product Design g-5 comprising derived and/or modified sequence from HRSV(Memphis-37)__AIY60640.1__F-del_DSCav1 (opt1)
gggagacccgugacccggaaguuguacggcuacgcgacuuucccucccacaaacccucgcgcccuuccuuuccuacuugggcccggcagaaagcuuaccauggagcugcccauccucaagaccaacgccaucaccacgauccuggccgcggugacccugugcuucgccagcucccagaacaucaccgaggaguucuaccagagcacgugcuccgccgucagcaagggcuaccucuccgcccugcgcaccgggugguacaccagcgugaucaccaucgagcuguccaacaucaaggagaacaagugcaacggcaccgacgccaaggugaagcucaucaagcaggagcuggacaaguacaagaacgcggucacggagcugcagcuccugaugcagagcaccccggccgccaacaaccgggcccgccgggagcugccccgcuucaugaacuacacccucaacaacaccaagaacaacaacgugacgcuguccaagaagcggaagcgccgguuccugggguuccuccugggcguggggagcgcgaucgccuccggcaucgccgucugcaaggugcugcaccucgagggcgaggugaacaagaucaagaacgcccugcuguccaccaacaaggccgucgugagccucuccaacggggugagcguccugaccuucaaggugcuggaccucaagaacuacaucgacaagcagcugcugcccauccugaacaagcagagcugcuccaucagcaacaucgagaccgucaucgaguuccagcagaagaacaaccgccuccuggagaucacgcgggaguucagcgugaacgcgggcgugaccacccccgucuccaccuacaugcugacgaacagcgagcuccugucccugaucaacgacaugccgaucaccaacgaccagaagaagcucaugagcaacaacgugcagaucgugcgccagcaguccuacagcaucaugugcaucaucaaggaggagguccuggccuacguggugcagcugccccucuacggggucaucgacacccccugcuggaagcugcacaccagcccccugugcacgaccaacaccaaggagggcuccaacaucugccucacccggacggaccgcgggugguacugcgacaacgccggcagcguguccuucuucccgcaggccgagaccugcaagguccagagcaaccggguguucugcgacaccaugaacucccugacccugcccagcgaggugaaccucugcaacaucgacaucuucaaccccaaguacgacugcaagaucaugacguccaagaccgacgucagcuccagcgugaucaccucccugggcgccaucgugagcugcuacgggaagaccaagugcacggcgagcaacaagaaccgcggcaucaucaagaccuucuccaacgggugcgacuacgucagcaacaagggcguggacaccguguccgucggcaacacccuguacuacgugaacaagcaggagggcaagagccucuacgugaagggggagcccaucaucaacuucuacgacccgcuggucuuccccuccgacgaguucgacgccagcaucucccaggugaacgagaagaucaaccagagccuggccuucauccggaaguccgacgagcuccugcacaacgugaacgucggcaagagcaccacgaacaucaugaucaccaccaucaucaucgugaucaucgugauccugcugcuccugaucgccgucgggcuguuccucuacugcaaggcccgcugaggacuaguaauaaggaaacuguaugaaugucugugggcaggaagugaagagauccuucuguaaagguuuuuggaauuaugucugcugaauaauaaacuuuuuugaaauaauaaaucugguagaaaaaugagaucuaaaaaaaaaaaaaaaaaaaaaaaaaaaaaaaaaaaaaaaaaaaaaaaaaaaaaaaaaaaaaaaaugcaucccccccccccccccccccccccccccccccaaaggcucuuuucagagccaccagaauu

SEQ ID NO: 13123 - RNA, 2024 nt, Artificial Sequence
  mRNA product Design g-5 comprising derived and/or modified sequence from HRSV(Memphis-37)__AIY60640.1__F-del_DSCav1 (opt1)
gggagacccgugacccggaaguuguacggcuacgcgacuuucccucccacaaacccucgcgcccuuccuuuccuacuugggcccggcagaaagcuuaccauggagcugcccauccucaagaccaacgccaucaccacgauccuggccgcggugacccugugcuucgccagcucccagaacaucaccgaggaguucuaccagagcacgugcuccgccgucagcaagggcuaccucuccgcccugcgcaccgggugguacaccagcgugaucaccaucgagcuguccaacaucaaggagaacaagugcaacggcaccgacgccaaggugaagcucaucaagcaggagcuggacaaguacaagaacgcggucacggagcugcagcuccugaugcagagcaccccggccgccaacaaccgggcccgccgggagcugccccgcuucaugaacuacacccucaacaacaccaagaacaacaacgugacgcuguccaagaagcggaagcgccgguuccugggguuccuccugggcguggggagcgcgaucgccuccggcaucgccgucugcaaggugcugcaccucgagggcgaggugaacaagaucaagaacgcccugcugagcaccaacaaggccgucgugucccucagcaacgggguguccguccugaccuucaaggugcuggaccucaagaacuacaucgacaagcagcugcugcccauccucaacaagcagagcugcuccaucagcaacaucgagaccgugaucgaguuccagcagaagaacaaccgccugcuggagaucacgcgggaguucuccgucaacgcgggcgugaccacccccgugagcaccuacaugcucacgaacagcgagcugcugucccucaucaacgacaugccgaucaccaacgaccagaagaagcugaugagcaacaacguccagaucgugcgccagcaguccuacagcaucaugugcaucaucaaggaggaggugcuggccuacgucgugcagcucccccuguacggggugaucgacacccccugcuggaagcugcacaccagcccccucugcacgaccaacaccaaggagggcagcaacaucugccugacccggacggaccgcgggugguacugcgacaacgccggcuccgucagcuucuucccgcaggccgagaccugcaaggugcaguccaaccgggucuucugcgacaccaugaacagccugacccuccccuccgaggugaaccugugcaacaucgacaucuucaaccccaaguacgacugcaagaucaugacgagcaagaccgacguguccagcuccgucaucaccagccugggcgccaucguguccugcuacgggaagaccaagugcacggcgagcaacaagaaccgcggcaucaucaagaccuucuccaacgggugcgacuacgugagcaacaagggcgucgacaccgugagcgugggcaacacccucuacuacgucaacaagcaggaggggaagucccuguacgugaagggcgagcccaucaucaacuucuacgacccgcugguguuccccagcgacgaguucgacgccuccaucagccaggucaacgagaagaucaaccagucccucgccuucauccggaaguccgacgagcugcugcacaacgugaacguggggaaguccaccacgaacaucaugaucaccaccaucaucaucgucaucaucgugauccugcuccugcugaucgccgugggccucuuccuguacugcaaggcccgcugaggacuaguaauaaggaaacuguaugaaugucugugggcaggaagugaagagauccuucuguaaagguuuuuggaauuaugucugcugaauaauaaacuuuuuugaaauaauaaaucugguagaaaaaugagaucuaaaaaaaaaaaaaaaaaaaaaaaaaaaaaaaaaaaaaaaaaaaaaaaaaaaaaaaaaaaaaaaaugcaucccccccccccccccccccccccccccccccaaaggcucuuuucagagccaccagaauu

SEQ ID NO: 13124 - RNA, 2024 nt, Artificial Sequence
  mRNA product Design g-5 comprising derived and/or modified sequence from HRSV(Memphis-37)__AIY60640.1__F-del_DSCav1 (opt2)
gggagacccgugacccggaaguuguacggcuacgcgacuuucccucccacaaacccucgcgcccuuccuuuccuacuugggcccggcagaaagcuuaccauggagcuccccauccucaagaccaacgccaucaccaccauccucgccgccgucacccucugcuucgccuccucccagaacaucaccgaggaguucuaccaguccaccugcuccgccgucuccaagggcuaccucuccgcccuccgcaccggcugguacaccuccgucaucaccaucgagcucuccaacaucaaggagaacaagugcaacggcaccgacgccaaggucaagcucaucaagcaggagcucgacaaguacaagaacgccgucaccgagcuccagcuccucaugcaguccacccccgccgccaacaaccgcgcccgccgcgagcucccccgcuucaugaacuacacccucaacaacaccaagaacaacaacgucacccucuccaagaagcgcaagcgccgcuuccucggcuuccuccucggcgucggcuccgccaucgccuccggcaucgccgucugcaagguccuccaccucgagggcgaggucaacaagaucaagaacgcccuccucuccaccaacaaggccgucgucucccucuccaacggcgucuccguccucaccuucaagguccucgaccucaagaacuacaucgacaagcagcuccuccccauccucaacaagcaguccugcuccaucuccaacaucgagaccgucaucgaguuccagcagaagaacaaccgccuccucgagaucacccgcgaguucuccgucaacgccggcgucaccacccccgucuccaccuacaugcucaccaacuccgagcuccucucccucaucaacgacaugcccaucaccaacgaccagaagaagcucauguccaacaacguccagaucguccgccagcaguccuacuccaucaugugcaucaucaaggaggagguccucgccuacgucguccagcucccccucuacggcgucaucgacacccccugcuggaagcuccacaccuccccccucugcaccaccaacaccaaggagggcuccaacaucugccucacccgcaccgaccgcggcugguacugcgacaacgccggcuccgucuccuucuucccccaggccgagaccugcaagguccaguccaaccgcgucuucugcgacaccaugaacucccucacccuccccuccgaggucaaccucugcaacaucgacaucuucaaccccaaguacgacugcaagaucaugaccuccaagaccgacgucuccuccuccgucaucaccucccucggcgccaucgucuccugcuacggcaagaccaagugcaccgccuccaacaagaaccgcggcaucaucaagaccuucuccaacggcugcgacuacgucuccaacaagggcgucgacaccgucuccgucggcaacacccucuacuacgucaacaagcaggagggcaagucccucuacgucaagggcgagcccaucaucaacuucuacgacccccucgucuuccccuccgacgaguucgacgccuccaucucccaggucaacgagaagaucaaccagucccucgccuucauccgcaaguccgacgagcuccuccacaacgucaacgucggcaaguccaccaccaacaucaugaucaccaccaucaucaucgucaucaucgucauccuccuccuccucaucgccgucggccucuuccucuacugcaaggcccgcugaggacuaguaauaaggaaacuguaugaaugucugugggcaggaagugaagagauccuucuguaaagguuuuuggaauuaugucugcugaauaauaaacuuuuuugaaauaauaaaucugguagaaaaaugagaucuaaaaaaaaaaaaaaaaaaaaaaaaaaaaaaaaaaaaaaaaaaaaaaaaaaaaaaaaaaaaaaaaugcaucccccccccccccccccccccccccccccccaaaggcucuuuucagagccaccagaauu

SEQ ID NO: 13125 - RNA, 2024 nt, Artificial Sequence
  mRNA product Design g-5 comprising derived and/or modified sequence from HRSV(Memphis-37)__AIY60640.1__F-del_DSCav1 (opt3)
gggagacccgugacccggaaguuguacggcuacgcgacuuucccucccacaaacccucgcgcccuuccuuuccuacuugggcccggcagaaagcuuaccauggagcugcccauccucaagaccaacgccauuacaacuauacuugcugcagugacgcugugcuucgccagcucccagaauaucaccgaagaguuuuaccaaucuacauguucagcggucaguaaaggcuauuugagcgcuuuaagaacugggugguacaccuccguuauuacaaucgaacugucuaacauuaaggagaauaaaugcaacggaaccgacgccaaggugaaacuaaucaagcaggaacucgauaaguauaaaaaugcaguaacugagcugcagcuucugaugcagucgaccccugccgcuaacaauagggcacggcgcgaguugccacgauucaugaacuacacacucaauaacacgaagaauaacaaugugacucugagcaaaaagcguaaaagaagguuucuggguuuccucuuaggcgucgggucagccauagcuaguggaaucgccguguguaagguucugcaccuugaaggcgaggugaacaagauuaaaaaugcguugcuguccaccaacaaggcagucgugucucuaagcaacgguguauccguucucacauuuaaagugcuggaccuuaagaauuauaucgauaaacaacuguugccgauucucaacaagcagucaugcaguaucagcaauauagaaacugucauugaguuccagcagaaaaacaaucggcuguuagagaucacccgcgaauuuucugugaacgccggggugacaacccccgucuccacguacaugcugacuaauucagagcuccuuagccugauuaacgacaugccuaucacaaaugaucaaaagaaguugaugaguaacaauguucagaucgugagacagcagucuuauuccauuauguguauaaucaaagaagagguacuagcuuacgugguccaacugccacucuacggagugauugacacccccugcuggaagcugcauacuagcccucuuuguacaaccaacacgaaagaaggcucgaauaucugccugaccaggacagaucggggcugguauugugacaacgccgggucuguuuccuucuuuccacaggcagagacuugcaaggugcagucaaaucgcgucuucugugauaccaugaacaguuugacacuccccagcgaggugaaccugugcaauauagacauuuuuaacccuaaauacgauugcaagaucaugacuuccaagaccgacguaucuagcucaguuaucacaaguuuaggagcuauuguguccuguuaugguaaaaccaagugcacugccagcaauaaaaaccgaggcaucauuaagacguucucuaaugggugugauuacgucucaaacaaaggaguggacacagucagugugggcaauacccuguauuacguuaacaagcaagaagguaagagccuauaugugaaaggggagccaauaaucaauuuuuacgacccgcucguauuccccuccgaugaguucgacgcgucuauuucgcaggucaacgaaaagaucaaucagagccuggccuuuaucagaaaauccgaugaacuuuugcacaacgugaauguuggaaagucaacuaccaacauuaugauaacaaccaucauuaucgugauuaucgucauacugcuccugcuuaucgcagugggccuguucuuguacugcaaagcuaggugaggacuaguaauaaggaaacuguaugaaugucugugggcaggaagugaagagauccuucuguaaagguuuuuggaauuaugucugcugaauaauaaacuuuuuugaaauaauaaaucugguagaaaaaugagaucuaaaaaaaaaaaaaaaaaaaaaaaaaaaaaaaaaaaaaaaaaaaaaaaaaaaaaaaaaaaaaaaaugcaucccccccccccccccccccccccccccccccaaaggcucuuuucagagccaccagaauu

SEQ ID NO: 13126 - RNA, 2024 nt, Artificial Sequence
  mRNA product Design g-5 comprising derived and/or modified sequence from HRSV(Memphis-37)__AIY60640.1__F-del_DSCav1 (opt4)
gggagacccgugacccggaaguuguacggcuacgcgacuuucccucccacaaacccucgcgcccuuccuuuccuacuugggcccggcagaaagcuuaccauggagcugcccauccugaagaccaacgccaucaccaccauccuggccgccgugacccugugcuucgccagcagccagaacaucaccgaggaguucuaccagagcaccugcagcgccgugagcaagggcuaccugagcgcccugagaaccggcugguacaccagcgugaucaccaucgagcugagcaacaucaaggagaacaagugcaacggcaccgacgccaaggugaagcugaucaagcaggagcuggacaaguacaagaacgccgugaccgagcugcagcugcugaugcagagcacccccgccgccaacaacagagccagaagagagcugcccagauucaugaacuacacccugaacaacaccaagaacaacaacgugacccugagcaagaagagaaagagaagauuccugggcuuccugcugggcgugggcagcgccaucgccagcggcaucgccgugugcaaggugcugcaccuggagggcgaggugaacaagaucaagaacgcccugcugagcaccaacaaggccguggugagccugagcaacggcgugagcgugcugaccuucaaggugcuggaccugaagaacuacaucgacaagcagcugcugcccauccugaacaagcagagcugcagcaucagcaacaucgagaccgugaucgaguuccagcagaagaacaacagacugcuggagaucaccagagaguucagcgugaacgccggcgugaccacccccgugagcaccuacaugcugaccaacagcgagcugcugagccugaucaacgacaugcccaucaccaacgaccagaagaagcugaugagcaacaacgugcagaucgugagacagcagagcuacagcaucaugugcaucaucaaggaggaggugcuggccuacguggugcagcugccccuguacggcgugaucgacacccccugcuggaagcugcacaccagcccccugugcaccaccaacaccaaggagggcagcaacaucugccugaccagaaccgacagaggcugguacugcgacaacgccggcagcgugagcuucuucccccaggccgagaccugcaaggugcagagcaacagaguguucugcgacaccaugaacagccugacccugcccagcgaggugaaccugugcaacaucgacaucuucaaccccaaguacgacugcaagaucaugaccagcaagaccgacgugagcagcagcgugaucaccagccugggcgccaucgugagcugcuacggcaagaccaagugcaccgccagcaacaagaacagaggcaucaucaagaccuucagcaacggcugcgacuacgugagcaacaagggcguggacaccgugagcgugggcaacacccuguacuacgugaacaagcaggagggcaagagccuguacgugaagggcgagcccaucaucaacuucuacgacccccugguguuccccagcgacgaguucgacgccagcaucagccaggugaacgagaagaucaaccagagccuggccuucaucagaaagagcgacgagcugcugcacaacgugaacgugggcaagagcaccaccaacaucaugaucaccaccaucaucaucgugaucaucgugauccugcugcugcugaucgccgugggccuguuccuguacugcaaggccagaugaggacuaguaauaaggaaacuguaugaaugucugugggcaggaagugaagagauccuucuguaaagguuuuuggaauuaugucugcugaauaauaaacuuuuuugaaauaauaaaucugguagaaaaaugagaucuaaaaaaaaaaaaaaaaaaaaaaaaaaaaaaaaaaaaaaaaaaaaaaaaaaaaaaaaaaaaaaaaugcaucccccccccccccccccccccccccccccccaaaggcucuuuucagagccaccagaauu

SEQ ID NO: 13127 - RNA, 2024 nt, Artificial Sequence
  mRNA product Design g-5 comprising derived and/or modified sequence from HRSV(Memphis-37)__AIY60640.1__F-del_DSCav1 (opt5)
gggagacccgugacccggaaguuguacggcuacgcgacuuucccucccacaaacccucgcgcccuuccuuuccuacuugggcccggcagaaagcuuaccauggagcugcccauccucaagaccaacgccauuacaacgauccuggcugccgugacccuuugcuucgcgagcucccagaauauuacagaagaguuuuaccaaucuaccuguagcgcugucuccaaaggcuaucugucugcccucagaacagggugguacaccagcguuaucacaauugaacuguccaacaucaaggagaauaaaugcaacggaaccgacgccaaggugaaacuuaucaagcaggaacuggauaaguauaaaaaugcugugacggagcuccagcugcugaugcagucuaccccugccgcuaacaaucgggcccgcagagagcucccgcgguucaugaacuacacacugaauaacaccaagaauaacaaugucacacuuagcaaaaagcgcaaaagacgguuucugggcuuccuccugggggugggauccgcgauugccagcggcaucgcuguuuguaaggugcuucaccuggaaggggaggucaacaagauuaaaaaugcccuccugucuaccaacaaggcugugguuucccugagcaacggagugucuguccucacguuuaaagugcuggaccuuaagaauuauaucgauaaacaacugcuccccauucugaacaagcaguccugcagcaucucuaauauugaaacagugaucgaguuccagcagaaaaacaaucgccuucuggagaucaccagagaauuuuccgucaacgccggcguuacaaccccugugagcaccuacaugcucacaaauuccgagcugcugucucucauuaacgacaugcccaucacgaaugaucaaaagaagcugaugagcaacaaugugcagauuguccggcagcaguccuauagcaucauguguauuaucaaagaagaggugcuugcguacguugugcaacugccucucuacggcgucaucgacacccccugcuggaagcugcauacaucuccucuuuguaccacaaacaccaaagaaggguccaauauuugccugacgcgcacagauagaggaugguauugugacaacgccggcagcgugucuuucuuuccgcaggcugagaccugcaagguucagagcaaucggguguucugugauaccaugaacucccucacacugcccucugaggucaaccugugcaauaucgacauuuuuaacccuaaauacgauugcaagaucaugaccagcaagacagacguguccagcucugucauuacgucccucggggccaucgugagcuguuauggaaaaaccaagugcacagcuucuaauaaaaaccgcggcaucauuaagaccuucuccaaugggugugauuacguuagcaacaaaggaguggacacagucuccgugggcaauacccuguauuacguuaacaagcaagaaggcaagucucuuuaugugaaaggggagcccaucauuaauuuuuacgacccucuggucuuccccagcgaugaguucgacgccuccaucucucaggugaacgaaaagauuaaucagagccucgccuuuaucagaaaauccgaugaacugcugcacaacgugaauguuggaaagagcacgaccaacauuaugaucacaaccaucauuaucgucauuaucgugauucuucuccugcugaucgcugugggccucuuccuguacugcaaagcgcggugaggacuaguaauaaggaaacuguaugaaugucugugggcaggaagugaagagauccuucuguaaagguuuuuggaauuaugucugcugaauaauaaacuuuuuugaaauaauaaaucugguagaaaaaugagaucuaaaaaaaaaaaaaaaaaaaaaaaaaaaaaaaaaaaaaaaaaaaaaaaaaaaaaaaaaaaaaaaaugcaucccccccccccccccccccccccccccccccaaaggcucuuuucagagccaccagaauu

SEQ ID NO: 13128 - RNA, 2024 nt, Artificial Sequence
  mRNA product Design g-5 comprising derived and/or modified sequence from HRSV(Memphis-37)__AIY60640.1__F-del_DSCav1 (opt6)
gggagacccgugacccggaaguuguacggcuacgcgacuuucccucccacaaacccucgcgcccuuccuuuccuacuugggcccggcagaaagcuuaccauggaauuaccaauccuuaaaacaaacgcaauaacaaccauccucgcagcaguaacucucugcuucgcuucaucucaaaacaucacagaagaauuuuaccaaagcacaugcucagcuguauccaaagguuaucuaucagccuugagaaccggaugguacacaucaguaauaacaauugaacuaucaaacauuaaagaaaacaaaugcaacggcaccgacgcaaaaguaaaacuaaucaaacaagaacuagacaaauauaaaaaugcaguaacagaauuacaauuauuaaugcaauccacaccagcugcaaacaaccgagcccgaagagaacuaccaagauucaugaacuacacacuaaacaacaccaaaaauaacaacgucacccuaucuaaaaaacguaaaagaagauucuuaggauuccucuuaggagucggauccgcaauagcaagcggcauagccguauguaaaguccuacacuuagaaggugaagugaauaaaauaaaaaacgcccuauuaagcacuaacaaagcaguagucucccuaucaaacggaguuucaguacucacauucaaaguacucgaccucaaaaacuacaucgacaaacaacuuuuaccaauucuaaacaaacaaucaugcuccauaucuaauaucgaaaccgucaucgaauuucaacaaaaaaacaauagacuacuagaaauaacuagagaauuuucaguaaacgccggcguuacgacaccagucucuacauacauguuaaccaauucagaacucuuaucauuaaucaacgacaugccaauaacaaacgaccaaaaaaaacuaauguccaauaacguacaaauagucagacaacaaucauacucaauuaugugcauaauaaaagaagaaguacuagcuuacguaguacaacucccccuauacggcguaauagacacuccauguuggaaauuacacacaucaccauuauguaccaccaauacaaaagaaggcucaaacauaugccuaacaagaacagauagaggaugguauugcgacaacgcaggcucaguuuccuuuuucccccaagcagaaaccugcaaaguacaaucaaaucguguuuuuugcgacaccaugaacucacucacauuaccaucagaaguaaaccuaugcaacauagacauauucaacccaaaauacgacugcaaaaucaugacaucaaaaacagacguauccucuucaguaauuacuagcuuaggagcaauagucucuuguuauggaaaaacaaaaugcacagccaguaacaaaaaccgcggaauaauaaaaaccuucucaaacgguugcgauuacgucucuaacaaaggagucgacacaguaucaguaggcaauacauuauacuacguuaacaaacaagaaggaaaaucuuuauacgucaaaggagaacccauuauaaacuuuuacgacccauuagucuucccuuccgacgaauuugacgccagcauuucacaaguaaacgaaaaaauaaaccaaucacucgcauuuauaagaaaaucugacgaauuacuccacaacguaaacguaggaaaauccacaacaaacauaaugauaacaaccauaaucaucgucauaauagucauacuucuccuauuaauugcaguaggcuuauuccuauacuguaaagcacgauaaggacuaguaauaaggaaacuguaugaaugucugugggcaggaagugaagagauccuucuguaaagguuuuuggaauuaugucugcugaauaauaaacuuuuuugaaauaauaaaucugguagaaaaaugagaucuaaaaaaaaaaaaaaaaaaaaaaaaaaaaaaaaaaaaaaaaaaaaaaaaaaaaaaaaaaaaaaaaugcaucccccccccccccccccccccccccccccccaaaggcucuuuucagagccaccagaauu

SEQ ID NO: 13129 - RNA, 2024 nt, Artificial Sequence
  mRNA product Design g-5 comprising derived and/or modified sequence from HRSV(Memphis-37)__AIY60640.1__F-del_DSCav1 (opt11)
gggagacccgugacccggaaguuguacggcuacgcgacuuucccucccacaaacccucgcgcccuuccuuuccuacuugggcccggcagaaagcuuaccauggaacuaccaauccuaaaaacuaacgcaaucaccacaauccucgccgccgucacccuuugcuuugcguccucccaaaacauuacugaagaguucuaccaauccacgugcuccgccgucuccaaagguuaccuauccgcccuuaggaccggcugguacaccagcgucaucaccaucgaacuuuccaacaucaaagaaaacaaauguaacggcaccgacgcaaaagucaaacuuauuaaacaggaacucgacaaauauaagaaugccgucaccgaauuacaacuccucaugcaauccacccccgccgccaacaaccgagcaaggcgcgaacucccucgauucaugaauuacacccucaacaauaccaaaaacaacaacgucacccuauccaagaaacgcaaaagacgcuucuugggcuuccuccucggcgugggcuccgcaauagccuccgguauugccgugugcaaagucuuacaccucgaaggcgaggucaacaaaaucaaaaacgcccuccucuccaccaacaaagccgucgucagccuauccaacggcguuuccguccucaccuucaaaguacucgaccucaaaaacuacaucgacaaacaacuccuacccauacuaaacaaacaauccugcuccauuuccaacaucgaaaccguaaucgaguuccaacagaaaaacaaucgccuccuagaaaucacacgugaauuuucaguuaacgccggaguaacaacuccuguaucuaccuacaugcucaccaauuccgaacuccucagccucauaaacgacaugccaauaacaaacgaccaaaagaaacucaugucuaacaacguacaaaucgucagacaacaaaguuacucaaucauguguaucaucaaagaggaaguccuagcauacgugguccaacucccccucuacggaguaaucgacaccccaugcuggaaacuacacaccagcccccucuguaccacaaacacgaaagaagguuccaacaucugccugacccgaaccgaccgcggcugguacugcgauaacgcuggcuccgucucauucuucccccaagcagaaaccugcaaaguacaauccaaccgaguauucugcgacaccaugaacucacucacccuccccagcgaaguaaaccucugcaacaucgacauauucaacccaaaauacgacugcaaaauuaugaccucuaaaacagacguauccuccucuguaaucacaucccucggggccaucgucuccugcuacggcaaaaccaaaugcaccgccuccaacaaaaaccgcggaaucauaaaaaccuucuccaacggaugcgacuacgucucaaauaaaggcgucgacaccgucuccgucggcaacacgcuauacuacgucaacaaacaagaaggcaaaucacucuacgucaaaggugagcccaucaucaauuucuacgauccccucgucuucccaagcgacgaguucgacgccagcauaucccaaguaaacgagaaaaucaaccaaagccuggccuucauccgcaaauccgacgaacuacuacacaacguaaacguaggcaaguccacuaccaacauaaugaucaccacaaucaucauagucauaaucguuauacuacuccugcucaucgccguaggccucuuccucuauugcaaagcccgauagggacuaguaauaaggaaacuguaugaaugucugugggcaggaagugaagagauccuucuguaaagguuuuuggaauuaugucugcugaauaauaaacuuuuuugaaauaauaaaucugguagaaaaaugagaucuaaaaaaaaaaaaaaaaaaaaaaaaaaaaaaaaaaaaaaaaaaaaaaaaaaaaaaaaaaaaaaaaugcaucccccccccccccccccccccccccccccccaaaggcucuuuucagagccaccagaauu

SEQ ID NO: 13130 - RNA, 2040 nt, Artificial Sequence
  mRNA product Design h-1 comprising derived and/or modified sequence from HRSV(Memphis-37)__AIY60640.1__F-del_DSCav1 (opt1)
gggagacccgugacccggaaguuguacggcuacgcgacuuucccucccacaaacccucgcgcccuuccuuuccuacuugggcccggcagaaagcuuaccauggagcugcccauccucaagaccaacgccaucaccacgauccuggccgcggugacccugugcuucgccagcucccagaacaucaccgaggaguucuaccagagcacgugcuccgccgucagcaagggcuaccucuccgcccugcgcaccgggugguacaccagcgugaucaccaucgagcuguccaacaucaaggagaacaagugcaacggcaccgacgccaaggugaagcucaucaagcaggagcuggacaaguacaagaacgcggucacggagcugcagcuccugaugcagagcaccccggccgccaacaaccgggcccgccgggagcugccccgcuucaugaacuacacccucaacaacaccaagaacaacaacgugacgcuguccaagaagcggaagcgccgguuccugggguuccuccugggcguggggagcgcgaucgccuccggcaucgccgucugcaaggugcugcaccucgagggcgaggugaacaagaucaagaacgcccugcuguccaccaacaaggccgucgugagccucuccaacggggugagcguccugaccuucaaggugcuggaccucaagaacuacaucgacaagcagcugcugcccauccugaacaagcagagcugcuccaucagcaacaucgagaccgucaucgaguuccagcagaagaacaaccgccuccuggagaucacgcgggaguucagcgugaacgcgggcgugaccacccccgucuccaccuacaugcugacgaacagcgagcuccugucccugaucaacgacaugccgaucaccaacgaccagaagaagcucaugagcaacaacgugcagaucgugcgccagcaguccuacagcaucaugugcaucaucaaggaggagguccuggccuacguggugcagcugccccucuacggggucaucgacacccccugcuggaagcugcacaccagcccccugugcacgaccaacaccaaggagggcuccaacaucugccucacccggacggaccgcgggugguacugcgacaacgccggcagcguguccuucuucccgcaggccgagaccugcaagguccagagcaaccggguguucugcgacaccaugaacucccugacccugcccagcgaggugaaccucugcaacaucgacaucuucaaccccaaguacgacugcaagaucaugacguccaagaccgacgucagcuccagcgugaucaccucccugggcgccaucgugagcugcuacgggaagaccaagugcacggcgagcaacaagaaccgcggcaucaucaagaccuucuccaacgggugcgacuacgucagcaacaagggcguggacaccguguccgucggcaacacccuguacuacgugaacaagcaggagggcaagagccucuacgugaagggggagcccaucaucaacuucuacgacccgcuggucuuccccuccgacgaguucgacgccagcaucucccaggugaacgagaagaucaaccagagccuggccuucauccggaaguccgacgagcuccugcacaacgugaacgucggcaagagcaccacgaacaucaugaucaccaccaucaucaucgugaucaucgugauccugcugcuccugaucgccgucgggcuguuccucuacugcaaggcccgcugaggacuaguacuggcugcaucucccuuuccucuguccuccauccuucucccaggauggugaagggggaccugguacccagugauccccaccccaggauccuaaaucaugacuuaccugcuaauaaaaacucauuggaaaagugagaagaucuaaaaaaaaaaaaaaaaaaaaaaaaaaaaaaaaaaaaaaaaaaaaaaaaaaaaaaaaaaaaaaaaugcaucccccccccccccccccccccccccccccccaaaggcucuuuucagagccaccagaauu

SEQ ID NO: 13131 - RNA, 2040 nt, Artificial Sequence
  mRNA product Design h-1 comprising derived and/or modified sequence from HRSV(Memphis-37)__AIY60640.1__F-del_DSCav1 (opt1)
gggagacccgugacccggaaguuguacggcuacgcgacuuucccucccacaaacccucgcgcccuuccuuuccuacuugggcccggcagaaagcuuaccauggagcugcccauccucaagaccaacgccaucaccacgauccuggccgcggugacccugugcuucgccagcucccagaacaucaccgaggaguucuaccagagcacgugcuccgccgucagcaagggcuaccucuccgcccugcgcaccgggugguacaccagcgugaucaccaucgagcuguccaacaucaaggagaacaagugcaacggcaccgacgccaaggugaagcucaucaagcaggagcuggacaaguacaagaacgcggucacggagcugcagcuccugaugcagagcaccccggccgccaacaaccgggcccgccgggagcugccccgcuucaugaacuacacccucaacaacaccaagaacaacaacgugacgcuguccaagaagcggaagcgccgguuccugggguuccuccugggcguggggagcgcgaucgccuccggcaucgccgucugcaaggugcugcaccucgagggcgaggugaacaagaucaagaacgcccugcugagcaccaacaaggccgucgugucccucagcaacgggguguccguccugaccuucaaggugcuggaccucaagaacuacaucgacaagcagcugcugcccauccucaacaagcagagcugcuccaucagcaacaucgagaccgugaucgaguuccagcagaagaacaaccgccugcuggagaucacgcgggaguucuccgucaacgcgggcgugaccacccccgugagcaccuacaugcucacgaacagcgagcugcugucccucaucaacgacaugccgaucaccaacgaccagaagaagcugaugagcaacaacguccagaucgugcgccagcaguccuacagcaucaugugcaucaucaaggaggaggugcuggccuacgucgugcagcucccccuguacggggugaucgacacccccugcuggaagcugcacaccagcccccucugcacgaccaacaccaaggagggcagcaacaucugccugacccggacggaccgcgggugguacugcgacaacgccggcuccgucagcuucuucccgcaggccgagaccugcaaggugcaguccaaccgggucuucugcgacaccaugaacagccugacccuccccuccgaggugaaccugugcaacaucgacaucuucaaccccaaguacgacugcaagaucaugacgagcaagaccgacguguccagcuccgucaucaccagccugggcgccaucguguccugcuacgggaagaccaagugcacggcgagcaacaagaaccgcggcaucaucaagaccuucuccaacgggugcgacuacgugagcaacaagggcgucgacaccgugagcgugggcaacacccucuacuacgucaacaagcaggaggggaagucccuguacgugaagggcgagcccaucaucaacuucuacgacccgcugguguuccccagcgacgaguucgacgccuccaucagccaggucaacgagaagaucaaccagucccucgccuucauccggaaguccgacgagcugcugcacaacgugaacguggggaaguccaccacgaacaucaugaucaccaccaucaucaucgucaucaucgugauccugcuccugcugaucgccgugggccucuuccuguacugcaaggcccgcugaggacuaguacuggcugcaucucccuuuccucuguccuccauccuucucccaggauggugaagggggaccugguacccagugauccccaccccaggauccuaaaucaugacuuaccugcuaauaaaaacucauuggaaaagugagaagaucuaaaaaaaaaaaaaaaaaaaaaaaaaaaaaaaaaaaaaaaaaaaaaaaaaaaaaaaaaaaaaaaaugcaucccccccccccccccccccccccccccccccaaaggcucuuuucagagccaccagaauu

SEQ ID NO: 13132 - RNA, 2040 nt, Artificial Sequence
  mRNA product Design h-1 comprising derived and/or modified sequence from HRSV(Memphis-37)__AIY60640.1__F-del_DSCav1 (opt2)
gggagacccgugacccggaaguuguacggcuacgcgacuuucccucccacaaacccucgcgcccuuccuuuccuacuugggcccggcagaaagcuuaccauggagcuccccauccucaagaccaacgccaucaccaccauccucgccgccgucacccucugcuucgccuccucccagaacaucaccgaggaguucuaccaguccaccugcuccgccgucuccaagggcuaccucuccgcccuccgcaccggcugguacaccuccgucaucaccaucgagcucuccaacaucaaggagaacaagugcaacggcaccgacgccaaggucaagcucaucaagcaggagcucgacaaguacaagaacgccgucaccgagcuccagcuccucaugcaguccacccccgccgccaacaaccgcgcccgccgcgagcucccccgcuucaugaacuacacccucaacaacaccaagaacaacaacgucacccucuccaagaagcgcaagcgccgcuuccucggcuuccuccucggcgucggcuccgccaucgccuccggcaucgccgucugcaagguccuccaccucgagggcgaggucaacaagaucaagaacgcccuccucuccaccaacaaggccgucgucucccucuccaacggcgucuccguccucaccuucaagguccucgaccucaagaacuacaucgacaagcagcuccuccccauccucaacaagcaguccugcuccaucuccaacaucgagaccgucaucgaguuccagcagaagaacaaccgccuccucgagaucacccgcgaguucuccgucaacgccggcgucaccacccccgucuccaccuacaugcucaccaacuccgagcuccucucccucaucaacgacaugcccaucaccaacgaccagaagaagcucauguccaacaacguccagaucguccgccagcaguccuacuccaucaugugcaucaucaaggaggagguccucgccuacgucguccagcucccccucuacggcgucaucgacacccccugcuggaagcuccacaccuccccccucugcaccaccaacaccaaggagggcuccaacaucugccucacccgcaccgaccgcggcugguacugcgacaacgccggcuccgucuccuucuucccccaggccgagaccugcaagguccaguccaaccgcgucuucugcgacaccaugaacucccucacccuccccuccgaggucaaccucugcaacaucgacaucuucaaccccaaguacgacugcaagaucaugaccuccaagaccgacgucuccuccuccgucaucaccucccucggcgccaucgucuccugcuacggcaagaccaagugcaccgccuccaacaagaaccgcggcaucaucaagaccuucuccaacggcugcgacuacgucuccaacaagggcgucgacaccgucuccgucggcaacacccucuacuacgucaacaagcaggagggcaagucccucuacgucaagggcgagcccaucaucaacuucuacgacccccucgucuuccccuccgacgaguucgacgccuccaucucccaggucaacgagaagaucaaccagucccucgccuucauccgcaaguccgacgagcuccuccacaacgucaacgucggcaaguccaccaccaacaucaugaucaccaccaucaucaucgucaucaucgucauccuccuccuccucaucgccgucggccucuuccucuacugcaaggcccgcugaggacuaguacuggcugcaucucccuuuccucuguccuccauccuucucccaggauggugaagggggaccugguacccagugauccccaccccaggauccuaaaucaugacuuaccugcuaauaaaaacucauuggaaaagugagaagaucuaaaaaaaaaaaaaaaaaaaaaaaaaaaaaaaaaaaaaaaaaaaaaaaaaaaaaaaaaaaaaaaaugcaucccccccccccccccccccccccccccccccaaaggcucuuuucagagccaccagaauu

SEQ ID NO: 13133 - RNA, 2040 nt, Artificial Sequence
  mRNA product Design h-1 comprising derived and/or modified sequence from HRSV(Memphis-37)__AIY60640.1__F-del_DSCav1 (opt3)
gggagacccgugacccggaaguuguacggcuacgcgacuuucccucccacaaacccucgcgcccuuccuuuccuacuugggcccggcagaaagcuuaccauggagcugcccauccucaagaccaacgccauuacaacuauacuugcugcagugacgcugugcuucgccagcucccagaauaucaccgaagaguuuuaccaaucuacauguucagcggucaguaaaggcuauuugagcgcuuuaagaacugggugguacaccuccguuauuacaaucgaacugucuaacauuaaggagaauaaaugcaacggaaccgacgccaaggugaaacuaaucaagcaggaacucgauaaguauaaaaaugcaguaacugagcugcagcuucugaugcagucgaccccugccgcuaacaauagggcacggcgcgaguugccacgauucaugaacuacacacucaauaacacgaagaauaacaaugugacucugagcaaaaagcguaaaagaagguuucuggguuuccucuuaggcgucgggucagccauagcuaguggaaucgccguguguaagguucugcaccuugaaggcgaggugaacaagauuaaaaaugcguugcuguccaccaacaaggcagucgugucucuaagcaacgguguauccguucucacauuuaaagugcuggaccuuaagaauuauaucgauaaacaacuguugccgauucucaacaagcagucaugcaguaucagcaauauagaaacugucauugaguuccagcagaaaaacaaucggcuguuagagaucacccgcgaauuuucugugaacgccggggugacaacccccgucuccacguacaugcugacuaauucagagcuccuuagccugauuaacgacaugccuaucacaaaugaucaaaagaaguugaugaguaacaauguucagaucgugagacagcagucuuauuccauuauguguauaaucaaagaagagguacuagcuuacgugguccaacugccacucuacggagugauugacacccccugcuggaagcugcauacuagcccucuuuguacaaccaacacgaaagaaggcucgaauaucugccugaccaggacagaucggggcugguauugugacaacgccgggucuguuuccuucuuuccacaggcagagacuugcaaggugcagucaaaucgcgucuucugugauaccaugaacaguuugacacuccccagcgaggugaaccugugcaauauagacauuuuuaacccuaaauacgauugcaagaucaugacuuccaagaccgacguaucuagcucaguuaucacaaguuuaggagcuauuguguccuguuaugguaaaaccaagugcacugccagcaauaaaaaccgaggcaucauuaagacguucucuaaugggugugauuacgucucaaacaaaggaguggacacagucagugugggcaauacccuguauuacguuaacaagcaagaagguaagagccuauaugugaaaggggagccaauaaucaauuuuuacgacccgcucguauuccccuccgaugaguucgacgcgucuauuucgcaggucaacgaaaagaucaaucagagccuggccuuuaucagaaaauccgaugaacuuuugcacaacgugaauguuggaaagucaacuaccaacauuaugauaacaaccaucauuaucgugauuaucgucauacugcuccugcuuaucgcagugggccuguucuuguacugcaaagcuaggugaggacuaguacuggcugcaucucccuuuccucuguccuccauccuucucccaggauggugaagggggaccugguacccagugauccccaccccaggauccuaaaucaugacuuaccugcuaauaaaaacucauuggaaaagugagaagaucuaaaaaaaaaaaaaaaaaaaaaaaaaaaaaaaaaaaaaaaaaaaaaaaaaaaaaaaaaaaaaaaaugcaucccccccccccccccccccccccccccccccaaaggcucuuuucagagccaccagaauu

SEQ ID NO: 13134 - RNA, 2040 nt, Artificial Sequence
  mRNA product Design h-1 comprising derived and/or modified sequence from HRSV(Memphis-37)__AIY60640.1__F-del_DSCav1 (opt4)
gggagacccgugacccggaaguuguacggcuacgcgacuuucccucccacaaacccucgcgcccuuccuuuccuacuugggcccggcagaaagcuuaccauggagcugcccauccugaagaccaacgccaucaccaccauccuggccgccgugacccugugcuucgccagcagccagaacaucaccgaggaguucuaccagagcaccugcagcgccgugagcaagggcuaccugagcgcccugagaaccggcugguacaccagcgugaucaccaucgagcugagcaacaucaaggagaacaagugcaacggcaccgacgccaaggugaagcugaucaagcaggagcuggacaaguacaagaacgccgugaccgagcugcagcugcugaugcagagcacccccgccgccaacaacagagccagaagagagcugcccagauucaugaacuacacccugaacaacaccaagaacaacaacgugacccugagcaagaagagaaagagaagauuccugggcuuccugcugggcgugggcagcgccaucgccagcggcaucgccgugugcaaggugcugcaccuggagggcgaggugaacaagaucaagaacgcccugcugagcaccaacaaggccguggugagccugagcaacggcgugagcgugcugaccuucaaggugcuggaccugaagaacuacaucgacaagcagcugcugcccauccugaacaagcagagcugcagcaucagcaacaucgagaccgugaucgaguuccagcagaagaacaacagacugcuggagaucaccagagaguucagcgugaacgccggcgugaccacccccgugagcaccuacaugcugaccaacagcgagcugcugagccugaucaacgacaugcccaucaccaacgaccagaagaagcugaugagcaacaacgugcagaucgugagacagcagagcuacagcaucaugugcaucaucaaggaggaggugcuggccuacguggugcagcugccccuguacggcgugaucgacacccccugcuggaagcugcacaccagcccccugugcaccaccaacaccaaggagggcagcaacaucugccugaccagaaccgacagaggcugguacugcgacaacgccggcagcgugagcuucuucccccaggccgagaccugcaaggugcagagcaacagaguguucugcgacaccaugaacagccugacccugcccagcgaggugaaccugugcaacaucgacaucuucaaccccaaguacgacugcaagaucaugaccagcaagaccgacgugagcagcagcgugaucaccagccugggcgccaucgugagcugcuacggcaagaccaagugcaccgccagcaacaagaacagaggcaucaucaagaccuucagcaacggcugcgacuacgugagcaacaagggcguggacaccgugagcgugggcaacacccuguacuacgugaacaagcaggagggcaagagccuguacgugaagggcgagcccaucaucaacuucuacgacccccugguguuccccagcgacgaguucgacgccagcaucagccaggugaacgagaagaucaaccagagccuggccuucaucagaaagagcgacgagcugcugcacaacgugaacgugggcaagagcaccaccaacaucaugaucaccaccaucaucaucgugaucaucgugauccugcugcugcugaucgccgugggccuguuccuguacugcaaggccagaugaggacuaguacuggcugcaucucccuuuccucuguccuccauccuucucccaggauggugaagggggaccugguacccagugauccccaccccaggauccuaaaucaugacuuaccugcuaauaaaaacucauuggaaaagugagaagaucuaaaaaaaaaaaaaaaaaaaaaaaaaaaaaaaaaaaaaaaaaaaaaaaaaaaaaaaaaaaaaaaaugcaucccccccccccccccccccccccccccccccaaaggcucuuuucagagccaccagaauu

SEQ ID NO: 13135 - RNA, 2040 nt, Artificial Sequence
  mRNA product Design h-1 comprising derived and/or modified sequence from HRSV(Memphis-37)__AIY60640.1__F-del_DSCav1 (opt5)
gggagacccgugacccggaaguuguacggcuacgcgacuuucccucccacaaacccucgcgcccuuccuuuccuacuugggcccggcagaaagcuuaccauggagcugcccauccucaagaccaacgccauuacaacgauccuggcugccgugacccuuugcuucgcgagcucccagaauauuacagaagaguuuuaccaaucuaccuguagcgcugucuccaaaggcuaucugucugcccucagaacagggugguacaccagcguuaucacaauugaacuguccaacaucaaggagaauaaaugcaacggaaccgacgccaaggugaaacuuaucaagcaggaacuggauaaguauaaaaaugcugugacggagcuccagcugcugaugcagucuaccccugccgcuaacaaucgggcccgcagagagcucccgcgguucaugaacuacacacugaauaacaccaagaauaacaaugucacacuuagcaaaaagcgcaaaagacgguuucugggcuuccuccugggggugggauccgcgauugccagcggcaucgcuguuuguaaggugcuucaccuggaaggggaggucaacaagauuaaaaaugcccuccugucuaccaacaaggcugugguuucccugagcaacggagugucuguccucacguuuaaagugcuggaccuuaagaauuauaucgauaaacaacugcuccccauucugaacaagcaguccugcagcaucucuaauauugaaacagugaucgaguuccagcagaaaaacaaucgccuucuggagaucaccagagaauuuuccgucaacgccggcguuacaaccccugugagcaccuacaugcucacaaauuccgagcugcugucucucauuaacgacaugcccaucacgaaugaucaaaagaagcugaugagcaacaaugugcagauuguccggcagcaguccuauagcaucauguguauuaucaaagaagaggugcuugcguacguugugcaacugccucucuacggcgucaucgacacccccugcuggaagcugcauacaucuccucuuuguaccacaaacaccaaagaaggguccaauauuugccugacgcgcacagauagaggaugguauugugacaacgccggcagcgugucuuucuuuccgcaggcugagaccugcaagguucagagcaaucggguguucugugauaccaugaacucccucacacugcccucugaggucaaccugugcaauaucgacauuuuuaacccuaaauacgauugcaagaucaugaccagcaagacagacguguccagcucugucauuacgucccucggggccaucgugagcuguuauggaaaaaccaagugcacagcuucuaauaaaaaccgcggcaucauuaagaccuucuccaaugggugugauuacguuagcaacaaaggaguggacacagucuccgugggcaauacccuguauuacguuaacaagcaagaaggcaagucucuuuaugugaaaggggagcccaucauuaauuuuuacgacccucuggucuuccccagcgaugaguucgacgccuccaucucucaggugaacgaaaagauuaaucagagccucgccuuuaucagaaaauccgaugaacugcugcacaacgugaauguuggaaagagcacgaccaacauuaugaucacaaccaucauuaucgucauuaucgugauucuucuccugcugaucgcugugggccucuuccuguacugcaaagcgcggugaggacuaguacuggcugcaucucccuuuccucuguccuccauccuucucccaggauggugaagggggaccugguacccagugauccccaccccaggauccuaaaucaugacuuaccugcuaauaaaaacucauuggaaaagugagaagaucuaaaaaaaaaaaaaaaaaaaaaaaaaaaaaaaaaaaaaaaaaaaaaaaaaaaaaaaaaaaaaaaaugcaucccccccccccccccccccccccccccccccaaaggcucuuuucagagccaccagaauu

SEQ ID NO: 13136 - RNA, 2040 nt, Artificial Sequence
  mRNA product Design h-1 comprising derived and/or modified sequence from HRSV(Memphis-37)__AIY60640.1__F-del_DSCav1 (opt6)
gggagacccgugacccggaaguuguacggcuacgcgacuuucccucccacaaacccucgcgcccuuccuuuccuacuugggcccggcagaaagcuuaccauggaauuaccaauccuuaaaacaaacgcaauaacaaccauccucgcagcaguaacucucugcuucgcuucaucucaaaacaucacagaagaauuuuaccaaagcacaugcucagcuguauccaaagguuaucuaucagccuugagaaccggaugguacacaucaguaauaacaauugaacuaucaaacauuaaagaaaacaaaugcaacggcaccgacgcaaaaguaaaacuaaucaaacaagaacuagacaaauauaaaaaugcaguaacagaauuacaauuauuaaugcaauccacaccagcugcaaacaaccgagcccgaagagaacuaccaagauucaugaacuacacacuaaacaacaccaaaaauaacaacgucacccuaucuaaaaaacguaaaagaagauucuuaggauuccucuuaggagucggauccgcaauagcaagcggcauagccguauguaaaguccuacacuuagaaggugaagugaauaaaauaaaaaacgcccuauuaagcacuaacaaagcaguagucucccuaucaaacggaguuucaguacucacauucaaaguacucgaccucaaaaacuacaucgacaaacaacuuuuaccaauucuaaacaaacaaucaugcuccauaucuaauaucgaaaccgucaucgaauuucaacaaaaaaacaauagacuacuagaaauaacuagagaauuuucaguaaacgccggcguuacgacaccagucucuacauacauguuaaccaauucagaacucuuaucauuaaucaacgacaugccaauaacaaacgaccaaaaaaaacuaauguccaauaacguacaaauagucagacaacaaucauacucaauuaugugcauaauaaaagaagaaguacuagcuuacguaguacaacucccccuauacggcguaauagacacuccauguuggaaauuacacacaucaccauuauguaccaccaauacaaaagaaggcucaaacauaugccuaacaagaacagauagaggaugguauugcgacaacgcaggcucaguuuccuuuuucccccaagcagaaaccugcaaaguacaaucaaaucguguuuuuugcgacaccaugaacucacucacauuaccaucagaaguaaaccuaugcaacauagacauauucaacccaaaauacgacugcaaaaucaugacaucaaaaacagacguauccucuucaguaauuacuagcuuaggagcaauagucucuuguuauggaaaaacaaaaugcacagccaguaacaaaaaccgcggaauaauaaaaaccuucucaaacgguugcgauuacgucucuaacaaaggagucgacacaguaucaguaggcaauacauuauacuacguuaacaaacaagaaggaaaaucuuuauacgucaaaggagaacccauuauaaacuuuuacgacccauuagucuucccuuccgacgaauuugacgccagcauuucacaaguaaacgaaaaaauaaaccaaucacucgcauuuauaagaaaaucugacgaauuacuccacaacguaaacguaggaaaauccacaacaaacauaaugauaacaaccauaaucaucgucauaauagucauacuucuccuauuaauugcaguaggcuuauuccuauacuguaaagcacgauaaggacuaguacuggcugcaucucccuuuccucuguccuccauccuucucccaggauggugaagggggaccugguacccagugauccccaccccaggauccuaaaucaugacuuaccugcuaauaaaaacucauuggaaaagugagaagaucuaaaaaaaaaaaaaaaaaaaaaaaaaaaaaaaaaaaaaaaaaaaaaaaaaaaaaaaaaaaaaaaaugcaucccccccccccccccccccccccccccccccaaaggcucuuuucagagccaccagaauu

SEQ ID NO: 13137 - RNA, 2040 nt, Artificial Sequence
  mRNA product Design h-1 comprising derived and/or modified sequence from HRSV(Memphis-37)__AIY60640.1__F-del_DSCav1 (opt11)
gggagacccgugacccggaaguuguacggcuacgcgacuuucccucccacaaacccucgcgcccuuccuuuccuacuugggcccggcagaaagcuuaccauggaacuaccaauccuaaaaacuaacgcaaucaccacaauccucgccgccgucacccuuugcuuugcguccucccaaaacauuacugaagaguucuaccaauccacgugcuccgccgucuccaaagguuaccuauccgcccuuaggaccggcugguacaccagcgucaucaccaucgaacuuuccaacaucaaagaaaacaaauguaacggcaccgacgcaaaagucaaacuuauuaaacaggaacucgacaaauauaagaaugccgucaccgaauuacaacuccucaugcaauccacccccgccgccaacaaccgagcaaggcgcgaacucccucgauucaugaauuacacccucaacaauaccaaaaacaacaacgucacccuauccaagaaacgcaaaagacgcuucuugggcuuccuccucggcgugggcuccgcaauagccuccgguauugccgugugcaaagucuuacaccucgaaggcgaggucaacaaaaucaaaaacgcccuccucuccaccaacaaagccgucgucagccuauccaacggcguuuccguccucaccuucaaaguacucgaccucaaaaacuacaucgacaaacaacuccuacccauacuaaacaaacaauccugcuccauuuccaacaucgaaaccguaaucgaguuccaacagaaaaacaaucgccuccuagaaaucacacgugaauuuucaguuaacgccggaguaacaacuccuguaucuaccuacaugcucaccaauuccgaacuccucagccucauaaacgacaugccaauaacaaacgaccaaaagaaacucaugucuaacaacguacaaaucgucagacaacaaaguuacucaaucauguguaucaucaaagaggaaguccuagcauacgugguccaacucccccucuacggaguaaucgacaccccaugcuggaaacuacacaccagcccccucuguaccacaaacacgaaagaagguuccaacaucugccugacccgaaccgaccgcggcugguacugcgauaacgcuggcuccgucucauucuucccccaagcagaaaccugcaaaguacaauccaaccgaguauucugcgacaccaugaacucacucacccuccccagcgaaguaaaccucugcaacaucgacauauucaacccaaaauacgacugcaaaauuaugaccucuaaaacagacguauccuccucuguaaucacaucccucggggccaucgucuccugcuacggcaaaaccaaaugcaccgccuccaacaaaaaccgcggaaucauaaaaaccuucuccaacggaugcgacuacgucucaaauaaaggcgucgacaccgucuccgucggcaacacgcuauacuacgucaacaaacaagaaggcaaaucacucuacgucaaaggugagcccaucaucaauuucuacgauccccucgucuucccaagcgacgaguucgacgccagcauaucccaaguaaacgagaaaaucaaccaaagccuggccuucauccgcaaauccgacgaacuacuacacaacguaaacguaggcaaguccacuaccaacauaaugaucaccacaaucaucauagucauaaucguuauacuacuccugcucaucgccguaggccucuuccucuauugcaaagcccgauagggacuaguacuggcugcaucucccuuuccucuguccuccauccuucucccaggauggugaagggggaccugguacccagugauccccaccccaggauccuaaaucaugacuuaccugcuaauaaaaacucauuggaaaagugagaagaucuaaaaaaaaaaaaaaaaaaaaaaaaaaaaaaaaaaaaaaaaaaaaaaaaaaaaaaaaaaaaaaaaugcaucccccccccccccccccccccccccccccccaaaggcucuuuucagagccaccagaauu

SEQ ID NO: 13138 - RNA, 2256 nt, Artificial Sequence
  mRNA product Design h-2 comprising derived and/or modified sequence from HRSV(Memphis-37)__AIY60640.1__F-del_DSCav1 (opt1)
gggagacccgugacccggaaguuguacggcuacgcgacuuucccucccacaaacccucgcgcccuuccuuuccuacuugggcccggcagaaagcuuaccauggagcugcccauccucaagaccaacgccaucaccacgauccuggccgcggugacccugugcuucgccagcucccagaacaucaccgaggaguucuaccagagcacgugcuccgccgucagcaagggcuaccucuccgcccugcgcaccgggugguacaccagcgugaucaccaucgagcuguccaacaucaaggagaacaagugcaacggcaccgacgccaaggugaagcucaucaagcaggagcuggacaaguacaagaacgcggucacggagcugcagcuccugaugcagagcaccccggccgccaacaaccgggcccgccgggagcugccccgcuucaugaacuacacccucaacaacaccaagaacaacaacgugacgcuguccaagaagcggaagcgccgguuccugggguuccuccugggcguggggagcgcgaucgccuccggcaucgccgucugcaaggugcugcaccucgagggcgaggugaacaagaucaagaacgcccugcuguccaccaacaaggccgucgugagccucuccaacggggugagcguccugaccuucaaggugcuggaccucaagaacuacaucgacaagcagcugcugcccauccugaacaagcagagcugcuccaucagcaacaucgagaccgucaucgaguuccagcagaagaacaaccgccuccuggagaucacgcgggaguucagcgugaacgcgggcgugaccacccccgucuccaccuacaugcugacgaacagcgagcuccugucccugaucaacgacaugccgaucaccaacgaccagaagaagcucaugagcaacaacgugcagaucgugcgccagcaguccuacagcaucaugugcaucaucaaggaggagguccuggccuacguggugcagcugccccucuacggggucaucgacacccccugcuggaagcugcacaccagcccccugugcacgaccaacaccaaggagggcuccaacaucugccucacccggacggaccgcgggugguacugcgacaacgccggcagcguguccuucuucccgcaggccgagaccugcaagguccagagcaaccggguguucugcgacaccaugaacucccugacccugcccagcgaggugaaccucugcaacaucgacaucuucaaccccaaguacgacugcaagaucaugacguccaagaccgacgucagcuccagcgugaucaccucccugggcgccaucgugagcugcuacgggaagaccaagugcacggcgagcaacaagaaccgcggcaucaucaagaccuucuccaacgggugcgacuacgucagcaacaagggcguggacaccguguccgucggcaacacccuguacuacgugaacaagcaggagggcaagagccucuacgugaagggggagcccaucaucaacuucuacgacccgcuggucuuccccuccgacgaguucgacgccagcaucucccaggugaacgagaagaucaaccagagccuggccuucauccggaaguccgacgagcuccugcacaacgugaacgucggcaagagcaccacgaacaucaugaucaccaccaucaucaucgugaucaucgugauccugcugcuccugaucgccgucgggcuguuccucuacugcaaggcccgcugaggacuagugaagggaacacccaaauuuaauucagccuuaagcacaauuaauuaagagugaaacguaauuguacaagcaguuggucacccaccauagggcaugaucaacaccgcaaccuuuccuuuuucccccagugauucugaaaaaccccucuucccuucagcuugcuuagauguuccaaauuuaguaagcuuaaggcggccuacagaagaaaaagaaaaaaaaggccacaaaaguucccucucacuuucaguaaauaaaauaaaagcagcaacagaaauaaagaaauaaaugaaauucaaaaugaaauaaauauuguguugugcagcauuaaaaaaucaauaaaaauuaaaaaugagcaagaucuaaaaaaaaaaaaaaaaaaaaaaaaaaaaaaaaaaaaaaaaaaaaaaaaaaaaaaaaaaaaaaaaugcaucccccccccccccccccccccccccccccccaaaggcucuuuucagagccaccagaauu

SEQ ID NO: 13139 - RNA, 2256 nt, Artificial Sequence
  mRNA product Design h-2 comprising derived and/or modified sequence from HRSV(Memphis-37)__AIY60640.1__F-del_DSCav1 (opt1)
gggagacccgugacccggaaguuguacggcuacgcgacuuucccucccacaaacccucgcgcccuuccuuuccuacuugggcccggcagaaagcuuaccauggagcugcccauccucaagaccaacgccaucaccacgauccuggccgcggugacccugugcuucgccagcucccagaacaucaccgaggaguucuaccagagcacgugcuccgccgucagcaagggcuaccucuccgcccugcgcaccgggugguacaccagcgugaucaccaucgagcuguccaacaucaaggagaacaagugcaacggcaccgacgccaaggugaagcucaucaagcaggagcuggacaaguacaagaacgcggucacggagcugcagcuccugaugcagagcaccccggccgccaacaaccgggcccgccgggagcugccccgcuucaugaacuacacccucaacaacaccaagaacaacaacgugacgcuguccaagaagcggaagcgccgguuccugggguuccuccugggcguggggagcgcgaucgccuccggcaucgccgucugcaaggugcugcaccucgagggcgaggugaacaagaucaagaacgcccugcugagcaccaacaaggccgucgugucccucagcaacgggguguccguccugaccuucaaggugcuggaccucaagaacuacaucgacaagcagcugcugcccauccucaacaagcagagcugcuccaucagcaacaucgagaccgugaucgaguuccagcagaagaacaaccgccugcuggagaucacgcgggaguucuccgucaacgcgggcgugaccacccccgugagcaccuacaugcucacgaacagcgagcugcugucccucaucaacgacaugccgaucaccaacgaccagaagaagcugaugagcaacaacguccagaucgugcgccagcaguccuacagcaucaugugcaucaucaaggaggaggugcuggccuacgucgugcagcucccccuguacggggugaucgacacccccugcuggaagcugcacaccagcccccucugcacgaccaacaccaaggagggcagcaacaucugccugacccggacggaccgcgggugguacugcgacaacgccggcuccgucagcuucuucccgcaggccgagaccugcaaggugcaguccaaccgggucuucugcgacaccaugaacagccugacccuccccuccgaggugaaccugugcaacaucgacaucuucaaccccaaguacgacugcaagaucaugacgagcaagaccgacguguccagcuccgucaucaccagccugggcgccaucguguccugcuacgggaagaccaagugcacggcgagcaacaagaaccgcggcaucaucaagaccuucuccaacgggugcgacuacgugagcaacaagggcgucgacaccgugagcgugggcaacacccucuacuacgucaacaagcaggaggggaagucccuguacgugaagggcgagcccaucaucaacuucuacgacccgcugguguuccccagcgacgaguucgacgccuccaucagccaggucaacgagaagaucaaccagucccucgccuucauccggaaguccgacgagcugcugcacaacgugaacguggggaaguccaccacgaacaucaugaucaccaccaucaucaucgucaucaucgugauccugcuccugcugaucgccgugggccucuuccuguacugcaaggcccgcugaggacuagugaagggaacacccaaauuuaauucagccuuaagcacaauuaauuaagagugaaacguaauuguacaagcaguuggucacccaccauagggcaugaucaacaccgcaaccuuuccuuuuucccccagugauucugaaaaaccccucuucccuucagcuugcuuagauguuccaaauuuaguaagcuuaaggcggccuacagaagaaaaagaaaaaaaaggccacaaaaguucccucucacuuucaguaaauaaaauaaaagcagcaacagaaauaaagaaauaaaugaaauucaaaaugaaauaaauauuguguugugcagcauuaaaaaaucaauaaaaauuaaaaaugagcaagaucuaaaaaaaaaaaaaaaaaaaaaaaaaaaaaaaaaaaaaaaaaaaaaaaaaaaaaaaaaaaaaaaaugcaucccccccccccccccccccccccccccccccaaaggcucuuuucagagccaccagaauu

SEQ ID NO: 13140 - RNA, 2256 nt, Artificial Sequence
  mRNA product Design h-2 comprising derived and/or modified sequence from HRSV(Memphis-37)__AIY60640.1__F-del_DSCav1 (opt2)
gggagacccgugacccggaaguuguacggcuacgcgacuuucccucccacaaacccucgcgcccuuccuuuccuacuugggcccggcagaaagcuuaccauggagcuccccauccucaagaccaacgccaucaccaccauccucgccgccgucacccucugcuucgccuccucccagaacaucaccgaggaguucuaccaguccaccugcuccgccgucuccaagggcuaccucuccgcccuccgcaccggcugguacaccuccgucaucaccaucgagcucuccaacaucaaggagaacaagugcaacggcaccgacgccaaggucaagcucaucaagcaggagcucgacaaguacaagaacgccgucaccgagcuccagcuccucaugcaguccacccccgccgccaacaaccgcgcccgccgcgagcucccccgcuucaugaacuacacccucaacaacaccaagaacaacaacgucacccucuccaagaagcgcaagcgccgcuuccucggcuuccuccucggcgucggcuccgccaucgccuccggcaucgccgucugcaagguccuccaccucgagggcgaggucaacaagaucaagaacgcccuccucuccaccaacaaggccgucgucucccucuccaacggcgucuccguccucaccuucaagguccucgaccucaagaacuacaucgacaagcagcuccuccccauccucaacaagcaguccugcuccaucuccaacaucgagaccgucaucgaguuccagcagaagaacaaccgccuccucgagaucacccgcgaguucuccgucaacgccggcgucaccacccccgucuccaccuacaugcucaccaacuccgagcuccucucccucaucaacgacaugcccaucaccaacgaccagaagaagcucauguccaacaacguccagaucguccgccagcaguccuacuccaucaugugcaucaucaaggaggagguccucgccuacgucguccagcucccccucuacggcgucaucgacacccccugcuggaagcuccacaccuccccccucugcaccaccaacaccaaggagggcuccaacaucugccucacccgcaccgaccgcggcugguacugcgacaacgccggcuccgucuccuucuucccccaggccgagaccugcaagguccaguccaaccgcgucuucugcgacaccaugaacucccucacccuccccuccgaggucaaccucugcaacaucgacaucuucaaccccaaguacgacugcaagaucaugaccuccaagaccgacgucuccuccuccgucaucaccucccucggcgccaucgucuccugcuacggcaagaccaagugcaccgccuccaacaagaaccgcggcaucaucaagaccuucuccaacggcugcgacuacgucuccaacaagggcgucgacaccgucuccgucggcaacacccucuacuacgucaacaagcaggagggcaagucccucuacgucaagggcgagcccaucaucaacuucuacgacccccucgucuuccccuccgacgaguucgacgccuccaucucccaggucaacgagaagaucaaccagucccucgccuucauccgcaaguccgacgagcuccuccacaacgucaacgucggcaaguccaccaccaacaucaugaucaccaccaucaucaucgucaucaucgucauccuccuccuccucaucgccgucggccucuuccucuacugcaaggcccgcugaggacuagugaagggaacacccaaauuuaauucagccuuaagcacaauuaauuaagagugaaacguaauuguacaagcaguuggucacccaccauagggcaugaucaacaccgcaaccuuuccuuuuucccccagugauucugaaaaaccccucuucccuucagcuugcuuagauguuccaaauuuaguaagcuuaaggcggccuacagaagaaaaagaaaaaaaaggccacaaaaguucccucucacuuucaguaaauaaaauaaaagcagcaacagaaauaaagaaauaaaugaaauucaaaaugaaauaaauauuguguugugcagcauuaaaaaaucaauaaaaauuaaaaaugagcaagaucuaaaaaaaaaaaaaaaaaaaaaaaaaaaaaaaaaaaaaaaaaaaaaaaaaaaaaaaaaaaaaaaaugcaucccccccccccccccccccccccccccccccaaaggcucuuuucagagccaccagaauu

SEQ ID NO: 13141 - RNA, 2256 nt, Artificial Sequence
  mRNA product Design h-2 comprising derived and/or modified sequence from HRSV(Memphis-37)__AIY60640.1__F-del_DSCav1 (opt3)
gggagacccgugacccggaaguuguacggcuacgcgacuuucccucccacaaacccucgcgcccuuccuuuccuacuugggcccggcagaaagcuuaccauggagcugcccauccucaagaccaacgccauuacaacuauacuugcugcagugacgcugugcuucgccagcucccagaauaucaccgaagaguuuuaccaaucuacauguucagcggucaguaaaggcuauuugagcgcuuuaagaacugggugguacaccuccguuauuacaaucgaacugucuaacauuaaggagaauaaaugcaacggaaccgacgccaaggugaaacuaaucaagcaggaacucgauaaguauaaaaaugcaguaacugagcugcagcuucugaugcagucgaccccugccgcuaacaauagggcacggcgcgaguugccacgauucaugaacuacacacucaauaacacgaagaauaacaaugugacucugagcaaaaagcguaaaagaagguuucuggguuuccucuuaggcgucgggucagccauagcuaguggaaucgccguguguaagguucugcaccuugaaggcgaggugaacaagauuaaaaaugcguugcuguccaccaacaaggcagucgugucucuaagcaacgguguauccguucucacauuuaaagugcuggaccuuaagaauuauaucgauaaacaacuguugccgauucucaacaagcagucaugcaguaucagcaauauagaaacugucauugaguuccagcagaaaaacaaucggcuguuagagaucacccgcgaauuuucugugaacgccggggugacaacccccgucuccacguacaugcugacuaauucagagcuccuuagccugauuaacgacaugccuaucacaaaugaucaaaagaaguugaugaguaacaauguucagaucgugagacagcagucuuauuccauuauguguauaaucaaagaagagguacuagcuuacgugguccaacugccacucuacggagugauugacacccccugcuggaagcugcauacuagcccucuuuguacaaccaacacgaaagaaggcucgaauaucugccugaccaggacagaucggggcugguauugugacaacgccgggucuguuuccuucuuuccacaggcagagacuugcaaggugcagucaaaucgcgucuucugugauaccaugaacaguuugacacuccccagcgaggugaaccugugcaauauagacauuuuuaacccuaaauacgauugcaagaucaugacuuccaagaccgacguaucuagcucaguuaucacaaguuuaggagcuauuguguccuguuaugguaaaaccaagugcacugccagcaauaaaaaccgaggcaucauuaagacguucucuaaugggugugauuacgucucaaacaaaggaguggacacagucagugugggcaauacccuguauuacguuaacaagcaagaagguaagagccuauaugugaaaggggagccaauaaucaauuuuuacgacccgcucguauuccccuccgaugaguucgacgcgucuauuucgcaggucaacgaaaagaucaaucagagccuggccuuuaucagaaaauccgaugaacuuuugcacaacgugaauguuggaaagucaacuaccaacauuaugauaacaaccaucauuaucgugauuaucgucauacugcuccugcuuaucgcagugggccuguucuuguacugcaaagcuaggugaggacuagugaagggaacacccaaauuuaauucagccuuaagcacaauuaauuaagagugaaacguaauuguacaagcaguuggucacccaccauagggcaugaucaacaccgcaaccuuuccuuuuucccccagugauucugaaaaaccccucuucccuucagcuugcuuagauguuccaaauuuaguaagcuuaaggcggccuacagaagaaaaagaaaaaaaaggccacaaaaguucccucucacuuucaguaaauaaaauaaaagcagcaacagaaauaaagaaauaaaugaaauucaaaaugaaauaaauauuguguugugcagcauuaaaaaaucaauaaaaauuaaaaaugagcaagaucuaaaaaaaaaaaaaaaaaaaaaaaaaaaaaaaaaaaaaaaaaaaaaaaaaaaaaaaaaaaaaaaaugcaucccccccccccccccccccccccccccccccaaaggcucuuuucagagccaccagaauu

SEQ ID NO: 13142 - RNA, 2256 nt, Artificial Sequence
  mRNA product Design h-2 comprising derived and/or modified sequence from HRSV(Memphis-37)__AIY60640.1__F-del_DSCav1 (opt4)
gggagacccgugacccggaaguuguacggcuacgcgacuuucccucccacaaacccucgcgcccuuccuuuccuacuugggcccggcagaaagcuuaccauggagcugcccauccugaagaccaacgccaucaccaccauccuggccgccgugacccugugcuucgccagcagccagaacaucaccgaggaguucuaccagagcaccugcagcgccgugagcaagggcuaccugagcgcccugagaaccggcugguacaccagcgugaucaccaucgagcugagcaacaucaaggagaacaagugcaacggcaccgacgccaaggugaagcugaucaagcaggagcuggacaaguacaagaacgccgugaccgagcugcagcugcugaugcagagcacccccgccgccaacaacagagccagaagagagcugcccagauucaugaacuacacccugaacaacaccaagaacaacaacgugacccugagcaagaagagaaagagaagauuccugggcuuccugcugggcgugggcagcgccaucgccagcggcaucgccgugugcaaggugcugcaccuggagggcgaggugaacaagaucaagaacgcccugcugagcaccaacaaggccguggugagccugagcaacggcgugagcgugcugaccuucaaggugcuggaccugaagaacuacaucgacaagcagcugcugcccauccugaacaagcagagcugcagcaucagcaacaucgagaccgugaucgaguuccagcagaagaacaacagacugcuggagaucaccagagaguucagcgugaacgccggcgugaccacccccgugagcaccuacaugcugaccaacagcgagcugcugagccugaucaacgacaugcccaucaccaacgaccagaagaagcugaugagcaacaacgugcagaucgugagacagcagagcuacagcaucaugugcaucaucaaggaggaggugcuggccuacguggugcagcugccccuguacggcgugaucgacacccccugcuggaagcugcacaccagcccccugugcaccaccaacaccaaggagggcagcaacaucugccugaccagaaccgacagaggcugguacugcgacaacgccggcagcgugagcuucuucccccaggccgagaccugcaaggugcagagcaacagaguguucugcgacaccaugaacagccugacccugcccagcgaggugaaccugugcaacaucgacaucuucaaccccaaguacgacugcaagaucaugaccagcaagaccgacgugagcagcagcgugaucaccagccugggcgccaucgugagcugcuacggcaagaccaagugcaccgccagcaacaagaacagaggcaucaucaagaccuucagcaacggcugcgacuacgugagcaacaagggcguggacaccgugagcgugggcaacacccuguacuacgugaacaagcaggagggcaagagccuguacgugaagggcgagcccaucaucaacuucuacgacccccugguguuccccagcgacgaguucgacgccagcaucagccaggugaacgagaagaucaaccagagccuggccuucaucagaaagagcgacgagcugcugcacaacgugaacgugggcaagagcaccaccaacaucaugaucaccaccaucaucaucgugaucaucgugauccugcugcugcugaucgccgugggccuguuccuguacugcaaggccagaugaggacuagugaagggaacacccaaauuuaauucagccuuaagcacaauuaauuaagagugaaacguaauuguacaagcaguuggucacccaccauagggcaugaucaacaccgcaaccuuuccuuuuucccccagugauucugaaaaaccccucuucccuucagcuugcuuagauguuccaaauuuaguaagcuuaaggcggccuacagaagaaaaagaaaaaaaaggccacaaaaguucccucucacuuucaguaaauaaaauaaaagcagcaacagaaauaaagaaauaaaugaaauucaaaaugaaauaaauauuguguugugcagcauuaaaaaaucaauaaaaauuaaaaaugagcaagaucuaaaaaaaaaaaaaaaaaaaaaaaaaaaaaaaaaaaaaaaaaaaaaaaaaaaaaaaaaaaaaaaaugcaucccccccccccccccccccccccccccccccaaaggcucuuuucagagccaccagaauu

SEQ ID NO: 13143 - RNA, 2256 nt, Artificial Sequence
  mRNA product Design h-2 comprising derived and/or modified sequence from HRSV(Memphis-37)__AIY60640.1__F-del_DSCav1 (opt5)
gggagacccgugacccggaaguuguacggcuacgcgacuuucccucccacaaacccucgcgcccuuccuuuccuacuugggcccggcagaaagcuuaccauggagcugcccauccucaagaccaacgccauuacaacgauccuggcugccgugacccuuugcuucgcgagcucccagaauauuacagaagaguuuuaccaaucuaccuguagcgcugucuccaaaggcuaucugucugcccucagaacagggugguacaccagcguuaucacaauugaacuguccaacaucaaggagaauaaaugcaacggaaccgacgccaaggugaaacuuaucaagcaggaacuggauaaguauaaaaaugcugugacggagcuccagcugcugaugcagucuaccccugccgcuaacaaucgggcccgcagagagcucccgcgguucaugaacuacacacugaauaacaccaagaauaacaaugucacacuuagcaaaaagcgcaaaagacgguuucugggcuuccuccugggggugggauccgcgauugccagcggcaucgcuguuuguaaggugcuucaccuggaaggggaggucaacaagauuaaaaaugcccuccugucuaccaacaaggcugugguuucccugagcaacggagugucuguccucacguuuaaagugcuggaccuuaagaauuauaucgauaaacaacugcuccccauucugaacaagcaguccugcagcaucucuaauauugaaacagugaucgaguuccagcagaaaaacaaucgccuucuggagaucaccagagaauuuuccgucaacgccggcguuacaaccccugugagcaccuacaugcucacaaauuccgagcugcugucucucauuaacgacaugcccaucacgaaugaucaaaagaagcugaugagcaacaaugugcagauuguccggcagcaguccuauagcaucauguguauuaucaaagaagaggugcuugcguacguugugcaacugccucucuacggcgucaucgacacccccugcuggaagcugcauacaucuccucuuuguaccacaaacaccaaagaaggguccaauauuugccugacgcgcacagauagaggaugguauugugacaacgccggcagcgugucuuucuuuccgcaggcugagaccugcaagguucagagcaaucggguguucugugauaccaugaacucccucacacugcccucugaggucaaccugugcaauaucgacauuuuuaacccuaaauacgauugcaagaucaugaccagcaagacagacguguccagcucugucauuacgucccucggggccaucgugagcuguuauggaaaaaccaagugcacagcuucuaauaaaaaccgcggcaucauuaagaccuucuccaaugggugugauuacguuagcaacaaaggaguggacacagucuccgugggcaauacccuguauuacguuaacaagcaagaaggcaagucucuuuaugugaaaggggagcccaucauuaauuuuuacgacccucuggucuuccccagcgaugaguucgacgccuccaucucucaggugaacgaaaagauuaaucagagccucgccuuuaucagaaaauccgaugaacugcugcacaacgugaauguuggaaagagcacgaccaacauuaugaucacaaccaucauuaucgucauuaucgugauucuucuccugcugaucgcugugggccucuuccuguacugcaaagcgcggugaggacuagugaagggaacacccaaauuuaauucagccuuaagcacaauuaauuaagagugaaacguaauuguacaagcaguuggucacccaccauagggcaugaucaacaccgcaaccuuuccuuuuucccccagugauucugaaaaaccccucuucccuucagcuugcuuagauguuccaaauuuaguaagcuuaaggcggccuacagaagaaaaagaaaaaaaaggccacaaaaguucccucucacuuucaguaaauaaaauaaaagcagcaacagaaauaaagaaauaaaugaaauucaaaaugaaauaaauauuguguugugcagcauuaaaaaaucaauaaaaauuaaaaaugagcaagaucuaaaaaaaaaaaaaaaaaaaaaaaaaaaaaaaaaaaaaaaaaaaaaaaaaaaaaaaaaaaaaaaaugcaucccccccccccccccccccccccccccccccaaaggcucuuuucagagccaccagaauu

SEQ ID NO: 13144 - RNA, 2256 nt, Artificial Sequence
  mRNA product Design h-2 comprising derived and/or modified sequence from HRSV(Memphis-37)__AIY60640.1__F-del_DSCav1 (opt6)
gggagacccgugacccggaaguuguacggcuacgcgacuuucccucccacaaacccucgcgcccuuccuuuccuacuugggcccggcagaaagcuuaccauggaauuaccaauccuuaaaacaaacgcaauaacaaccauccucgcagcaguaacucucugcuucgcuucaucucaaaacaucacagaagaauuuuaccaaagcacaugcucagcuguauccaaagguuaucuaucagccuugagaaccggaugguacacaucaguaauaacaauugaacuaucaaacauuaaagaaaacaaaugcaacggcaccgacgcaaaaguaaaacuaaucaaacaagaacuagacaaauauaaaaaugcaguaacagaauuacaauuauuaaugcaauccacaccagcugcaaacaaccgagcccgaagagaacuaccaagauucaugaacuacacacuaaacaacaccaaaaauaacaacgucacccuaucuaaaaaacguaaaagaagauucuuaggauuccucuuaggagucggauccgcaauagcaagcggcauagccguauguaaaguccuacacuuagaaggugaagugaauaaaauaaaaaacgcccuauuaagcacuaacaaagcaguagucucccuaucaaacggaguuucaguacucacauucaaaguacucgaccucaaaaacuacaucgacaaacaacuuuuaccaauucuaaacaaacaaucaugcuccauaucuaauaucgaaaccgucaucgaauuucaacaaaaaaacaauagacuacuagaaauaacuagagaauuuucaguaaacgccggcguuacgacaccagucucuacauacauguuaaccaauucagaacucuuaucauuaaucaacgacaugccaauaacaaacgaccaaaaaaaacuaauguccaauaacguacaaauagucagacaacaaucauacucaauuaugugcauaauaaaagaagaaguacuagcuuacguaguacaacucccccuauacggcguaauagacacuccauguuggaaauuacacacaucaccauuauguaccaccaauacaaaagaaggcucaaacauaugccuaacaagaacagauagaggaugguauugcgacaacgcaggcucaguuuccuuuuucccccaagcagaaaccugcaaaguacaaucaaaucguguuuuuugcgacaccaugaacucacucacauuaccaucagaaguaaaccuaugcaacauagacauauucaacccaaaauacgacugcaaaaucaugacaucaaaaacagacguauccucuucaguaauuacuagcuuaggagcaauagucucuuguuauggaaaaacaaaaugcacagccaguaacaaaaaccgcggaauaauaaaaaccuucucaaacgguugcgauuacgucucuaacaaaggagucgacacaguaucaguaggcaauacauuauacuacguuaacaaacaagaaggaaaaucuuuauacgucaaaggagaacccauuauaaacuuuuacgacccauuagucuucccuuccgacgaauuugacgccagcauuucacaaguaaacgaaaaaauaaaccaaucacucgcauuuauaagaaaaucugacgaauuacuccacaacguaaacguaggaaaauccacaacaaacauaaugauaacaaccauaaucaucgucauaauagucauacuucuccuauuaauugcaguaggcuuauuccuauacuguaaagcacgauaaggacuagugaagggaacacccaaauuuaauucagccuuaagcacaauuaauuaagagugaaacguaauuguacaagcaguuggucacccaccauagggcaugaucaacaccgcaaccuuuccuuuuucccccagugauucugaaaaaccccucuucccuucagcuugcuuagauguuccaaauuuaguaagcuuaaggcggccuacagaagaaaaagaaaaaaaaggccacaaaaguucccucucacuuucaguaaauaaaauaaaagcagcaacagaaauaaagaaauaaaugaaauucaaaaugaaauaaauauuguguugugcagcauuaaaaaaucaauaaaaauuaaaaaugagcaagaucuaaaaaaaaaaaaaaaaaaaaaaaaaaaaaaaaaaaaaaaaaaaaaaaaaaaaaaaaaaaaaaaaugcaucccccccccccccccccccccccccccccccaaaggcucuuuucagagccaccagaauu

SEQ ID NO: 13145 - RNA, 2256 nt, Artificial Sequence
  mRNA product Design h-2 comprising derived and/or modified sequence from HRSV(Memphis-37)__AIY60640.1__F-del_DSCav1 (opt11)
gggagacccgugacccggaaguuguacggcuacgcgacuuucccucccacaaacccucgcgcccuuccuuuccuacuugggcccggcagaaagcuuaccauggaacuaccaauccuaaaaacuaacgcaaucaccacaauccucgccgccgucacccuuugcuuugcguccucccaaaacauuacugaagaguucuaccaauccacgugcuccgccgucuccaaagguuaccuauccgcccuuaggaccggcugguacaccagcgucaucaccaucgaacuuuccaacaucaaagaaaacaaauguaacggcaccgacgcaaaagucaaacuuauuaaacaggaacucgacaaauauaagaaugccgucaccgaauuacaacuccucaugcaauccacccccgccgccaacaaccgagcaaggcgcgaacucccucgauucaugaauuacacccucaacaauaccaaaaacaacaacgucacccuauccaagaaacgcaaaagacgcuucuugggcuuccuccucggcgugggcuccgcaauagccuccgguauugccgugugcaaagucuuacaccucgaaggcgaggucaacaaaaucaaaaacgcccuccucuccaccaacaaagccgucgucagccuauccaacggcguuuccguccucaccuucaaaguacucgaccucaaaaacuacaucgacaaacaacuccuacccauacuaaacaaacaauccugcuccauuuccaacaucgaaaccguaaucgaguuccaacagaaaaacaaucgccuccuagaaaucacacgugaauuuucaguuaacgccggaguaacaacuccuguaucuaccuacaugcucaccaauuccgaacuccucagccucauaaacgacaugccaauaacaaacgaccaaaagaaacucaugucuaacaacguacaaaucgucagacaacaaaguuacucaaucauguguaucaucaaagaggaaguccuagcauacgugguccaacucccccucuacggaguaaucgacaccccaugcuggaaacuacacaccagcccccucuguaccacaaacacgaaagaagguuccaacaucugccugacccgaaccgaccgcggcugguacugcgauaacgcuggcuccgucucauucuucccccaagcagaaaccugcaaaguacaauccaaccgaguauucugcgacaccaugaacucacucacccuccccagcgaaguaaaccucugcaacaucgacauauucaacccaaaauacgacugcaaaauuaugaccucuaaaacagacguauccuccucuguaaucacaucccucggggccaucgucuccugcuacggcaaaaccaaaugcaccgccuccaacaaaaaccgcggaaucauaaaaaccuucuccaacggaugcgacuacgucucaaauaaaggcgucgacaccgucuccgucggcaacacgcuauacuacgucaacaaacaagaaggcaaaucacucuacgucaaaggugagcccaucaucaauuucuacgauccccucgucuucccaagcgacgaguucgacgccagcauaucccaaguaaacgagaaaaucaaccaaagccuggccuucauccgcaaauccgacgaacuacuacacaacguaaacguaggcaaguccacuaccaacauaaugaucaccacaaucaucauagucauaaucguuauacuacuccugcucaucgccguaggccucuuccucuauugcaaagcccgauagggacuagugaagggaacacccaaauuuaauucagccuuaagcacaauuaauuaagagugaaacguaauuguacaagcaguuggucacccaccauagggcaugaucaacaccgcaaccuuuccuuuuucccccagugauucugaaaaaccccucuucccuucagcuugcuuagauguuccaaauuuaguaagcuuaaggcggccuacagaagaaaaagaaaaaaaaggccacaaaaguucccucucacuuucaguaaauaaaauaaaagcagcaacagaaauaaagaaauaaaugaaauucaaaaugaaauaaauauuguguugugcagcauuaaaaaaucaauaaaaauuaaaaaugagcaagaucuaaaaaaaaaaaaaaaaaaaaaaaaaaaaaaaaaaaaaaaaaaaaaaaaaaaaaaaaaaaaaaaaugcaucccccccccccccccccccccccccccccccaaaggcucuuuucagagccaccagaauu

SEQ ID NO: 13146 - RNA, 2036 nt, Artificial Sequence
  mRNA product Design h-3 comprising derived and/or modified sequence from HRSV(Memphis-37)__AIY60640.1__F-del_DSCav1 (opt1)
gggagacccgugacccggaaguuguacggcuacgcgacuuucccucccacaaacccucgcgcccuuccuuuccuacuugggcccggcagaaagcuuaccauggagcugcccauccucaagaccaacgccaucaccacgauccuggccgcggugacccugugcuucgccagcucccagaacaucaccgaggaguucuaccagagcacgugcuccgccgucagcaagggcuaccucuccgcccugcgcaccgggugguacaccagcgugaucaccaucgagcuguccaacaucaaggagaacaagugcaacggcaccgacgccaaggugaagcucaucaagcaggagcuggacaaguacaagaacgcggucacggagcugcagcuccugaugcagagcaccccggccgccaacaaccgggcccgccgggagcugccccgcuucaugaacuacacccucaacaacaccaagaacaacaacgugacgcuguccaagaagcggaagcgccgguuccugggguuccuccugggcguggggagcgcgaucgccuccggcaucgccgucugcaaggugcugcaccucgagggcgaggugaacaagaucaagaacgcccugcuguccaccaacaaggccgucgugagccucuccaacggggugagcguccugaccuucaaggugcuggaccucaagaacuacaucgacaagcagcugcugcccauccugaacaagcagagcugcuccaucagcaacaucgagaccgucaucgaguuccagcagaagaacaaccgccuccuggagaucacgcgggaguucagcgugaacgcgggcgugaccacccccgucuccaccuacaugcugacgaacagcgagcuccugucccugaucaacgacaugccgaucaccaacgaccagaagaagcucaugagcaacaacgugcagaucgugcgccagcaguccuacagcaucaugugcaucaucaaggaggagguccuggccuacguggugcagcugccccucuacggggucaucgacacccccugcuggaagcugcacaccagcccccugugcacgaccaacaccaaggagggcuccaacaucugccucacccggacggaccgcgggugguacugcgacaacgccggcagcguguccuucuucccgcaggccgagaccugcaagguccagagcaaccggguguucugcgacaccaugaacucccugacccugcccagcgaggugaaccucugcaacaucgacaucuucaaccccaaguacgacugcaagaucaugacguccaagaccgacgucagcuccagcgugaucaccucccugggcgccaucgugagcugcuacgggaagaccaagugcacggcgagcaacaagaaccgcggcaucaucaagaccuucuccaacgggugcgacuacgucagcaacaagggcguggacaccguguccgucggcaacacccuguacuacgugaacaagcaggagggcaagagccucuacgugaagggggagcccaucaucaacuucuacgacccgcuggucuuccccuccgacgaguucgacgccagcaucucccaggugaacgagaagaucaaccagagccuggccuucauccggaaguccgacgagcuccugcacaacgugaacgucggcaagagcaccacgaacaucaugaucaccaccaucaucaucgugaucaucgugauccugcugcuccugaucgccgucgggcuguuccucuacugcaaggcccgcugaggacuaguggaagcauuuuccuggcugauuaaaagaaauuacucagcuauggucaucuguuccuguuagaaggcuaugcagcauauuauauacuaugcgcauguuaugaaaugcauaauaaaaaauuuuaaaaaaucuaaaagaucuaaaaaaaaaaaaaaaaaaaaaaaaaaaaaaaaaaaaaaaaaaaaaaaaaaaaaaaaaaaaaaaaugcaucccccccccccccccccccccccccccccccaaaggcucuuuucagagccaccagaauu

SEQ ID NO: 13147 - RNA, 2036 nt, Artificial Sequence
  mRNA product Design h-3 comprising derived and/or modified sequence from HRSV(Memphis-37)__AIY60640.1__F-del_DSCav1 (opt1)
gggagacccgugacccggaaguuguacggcuacgcgacuuucccucccacaaacccucgcgcccuuccuuuccuacuugggcccggcagaaagcuuaccauggagcugcccauccucaagaccaacgccaucaccacgauccuggccgcggugacccugugcuucgccagcucccagaacaucaccgaggaguucuaccagagcacgugcuccgccgucagcaagggcuaccucuccgcccugcgcaccgggugguacaccagcgugaucaccaucgagcuguccaacaucaaggagaacaagugcaacggcaccgacgccaaggugaagcucaucaagcaggagcuggacaaguacaagaacgcggucacggagcugcagcuccugaugcagagcaccccggccgccaacaaccgggcccgccgggagcugccccgcuucaugaacuacacccucaacaacaccaagaacaacaacgugacgcuguccaagaagcggaagcgccgguuccugggguuccuccugggcguggggagcgcgaucgccuccggcaucgccgucugcaaggugcugcaccucgagggcgaggugaacaagaucaagaacgcccugcugagcaccaacaaggccgucgugucccucagcaacgggguguccguccugaccuucaaggugcuggaccucaagaacuacaucgacaagcagcugcugcccauccucaacaagcagagcugcuccaucagcaacaucgagaccgugaucgaguuccagcagaagaacaaccgccugcuggagaucacgcgggaguucuccgucaacgcgggcgugaccacccccgugagcaccuacaugcucacgaacagcgagcugcugucccucaucaacgacaugccgaucaccaacgaccagaagaagcugaugagcaacaacguccagaucgugcgccagcaguccuacagcaucaugugcaucaucaaggaggaggugcuggccuacgucgugcagcucccccuguacggggugaucgacacccccugcuggaagcugcacaccagcccccucugcacgaccaacaccaaggagggcagcaacaucugccugacccggacggaccgcgggugguacugcgacaacgccggcuccgucagcuucuucccgcaggccgagaccugcaaggugcaguccaaccgggucuucugcgacaccaugaacagccugacccuccccuccgaggugaaccugugcaacaucgacaucuucaaccccaaguacgacugcaagaucaugacgagcaagaccgacguguccagcuccgucaucaccagccugggcgccaucguguccugcuacgggaagaccaagugcacggcgagcaacaagaaccgcggcaucaucaagaccuucuccaacgggugcgacuacgugagcaacaagggcgucgacaccgugagcgugggcaacacccucuacuacgucaacaagcaggaggggaagucccuguacgugaagggcgagcccaucaucaacuucuacgacccgcugguguuccccagcgacgaguucgacgccuccaucagccaggucaacgagaagaucaaccagucccucgccuucauccggaaguccgacgagcugcugcacaacgugaacguggggaaguccaccacgaacaucaugaucaccaccaucaucaucgucaucaucgugauccugcuccugcugaucgccgugggccucuuccuguacugcaaggcccgcugaggacuaguggaagcauuuuccuggcugauuaaaagaaauuacucagcuauggucaucuguuccuguuagaaggcuaugcagcauauuauauacuaugcgcauguuaugaaaugcauaauaaaaaauuuuaaaaaaucuaaaagaucuaaaaaaaaaaaaaaaaaaaaaaaaaaaaaaaaaaaaaaaaaaaaaaaaaaaaaaaaaaaaaaaaugcaucccccccccccccccccccccccccccccccaaaggcucuuuucagagccaccagaauu

SEQ ID NO: 13148 - RNA, 2036 nt, Artificial Sequence
  mRNA product Design h-3 comprising derived and/or modified sequence from HRSV(Memphis-37)__AIY60640.1__F-del_DSCav1 (opt2)
gggagacccgugacccggaaguuguacggcuacgcgacuuucccucccacaaacccucgcgcccuuccuuuccuacuugggcccggcagaaagcuuaccauggagcuccccauccucaagaccaacgccaucaccaccauccucgccgccgucacccucugcuucgccuccucccagaacaucaccgaggaguucuaccaguccaccugcuccgccgucuccaagggcuaccucuccgcccuccgcaccggcugguacaccuccgucaucaccaucgagcucuccaacaucaaggagaacaagugcaacggcaccgacgccaaggucaagcucaucaagcaggagcucgacaaguacaagaacgccgucaccgagcuccagcuccucaugcaguccacccccgccgccaacaaccgcgcccgccgcgagcucccccgcuucaugaacuacacccucaacaacaccaagaacaacaacgucacccucuccaagaagcgcaagcgccgcuuccucggcuuccuccucggcgucggcuccgccaucgccuccggcaucgccgucugcaagguccuccaccucgagggcgaggucaacaagaucaagaacgcccuccucuccaccaacaaggccgucgucucccucuccaacggcgucuccguccucaccuucaagguccucgaccucaagaacuacaucgacaagcagcuccuccccauccucaacaagcaguccugcuccaucuccaacaucgagaccgucaucgaguuccagcagaagaacaaccgccuccucgagaucacccgcgaguucuccgucaacgccggcgucaccacccccgucuccaccuacaugcucaccaacuccgagcuccucucccucaucaacgacaugcccaucaccaacgaccagaagaagcucauguccaacaacguccagaucguccgccagcaguccuacuccaucaugugcaucaucaaggaggagguccucgccuacgucguccagcucccccucuacggcgucaucgacacccccugcuggaagcuccacaccuccccccucugcaccaccaacaccaaggagggcuccaacaucugccucacccgcaccgaccgcggcugguacugcgacaacgccggcuccgucuccuucuucccccaggccgagaccugcaagguccaguccaaccgcgucuucugcgacaccaugaacucccucacccuccccuccgaggucaaccucugcaacaucgacaucuucaaccccaaguacgacugcaagaucaugaccuccaagaccgacgucuccuccuccgucaucaccucccucggcgccaucgucuccugcuacggcaagaccaagugcaccgccuccaacaagaaccgcggcaucaucaagaccuucuccaacggcugcgacuacgucuccaacaagggcgucgacaccgucuccgucggcaacacccucuacuacgucaacaagcaggagggcaagucccucuacgucaagggcgagcccaucaucaacuucuacgacccccucgucuuccccuccgacgaguucgacgccuccaucucccaggucaacgagaagaucaaccagucccucgccuucauccgcaaguccgacgagcuccuccacaacgucaacgucggcaaguccaccaccaacaucaugaucaccaccaucaucaucgucaucaucgucauccuccuccuccucaucgccgucggccucuuccucuacugcaaggcccgcugaggacuaguggaagcauuuuccuggcugauuaaaagaaauuacucagcuauggucaucuguuccuguuagaaggcuaugcagcauauuauauacuaugcgcauguuaugaaaugcauaauaaaaaauuuuaaaaaaucuaaaagaucuaaaaaaaaaaaaaaaaaaaaaaaaaaaaaaaaaaaaaaaaaaaaaaaaaaaaaaaaaaaaaaaaugcaucccccccccccccccccccccccccccccccaaaggcucuuuucagagccaccagaauu

SEQ ID NO: 13149 - RNA, 2036 nt, Artificial Sequence
  mRNA product Design h-3 comprising derived and/or modified sequence from HRSV(Memphis-37)__AIY60640.1__F-del_DSCav1 (opt3)
gggagacccgugacccggaaguuguacggcuacgcgacuuucccucccacaaacccucgcgcccuuccuuuccuacuugggcccggcagaaagcuuaccauggagcugcccauccucaagaccaacgccauuacaacuauacuugcugcagugacgcugugcuucgccagcucccagaauaucaccgaagaguuuuaccaaucuacauguucagcggucaguaaaggcuauuugagcgcuuuaagaacugggugguacaccuccguuauuacaaucgaacugucuaacauuaaggagaauaaaugcaacggaaccgacgccaaggugaaacuaaucaagcaggaacucgauaaguauaaaaaugcaguaacugagcugcagcuucugaugcagucgaccccugccgcuaacaauagggcacggcgcgaguugccacgauucaugaacuacacacucaauaacacgaagaauaacaaugugacucugagcaaaaagcguaaaagaagguuucuggguuuccucuuaggcgucgggucagccauagcuaguggaaucgccguguguaagguucugcaccuugaaggcgaggugaacaagauuaaaaaugcguugcuguccaccaacaaggcagucgugucucuaagcaacgguguauccguucucacauuuaaagugcuggaccuuaagaauuauaucgauaaacaacuguugccgauucucaacaagcagucaugcaguaucagcaauauagaaacugucauugaguuccagcagaaaaacaaucggcuguuagagaucacccgcgaauuuucugugaacgccggggugacaacccccgucuccacguacaugcugacuaauucagagcuccuuagccugauuaacgacaugccuaucacaaaugaucaaaagaaguugaugaguaacaauguucagaucgugagacagcagucuuauuccauuauguguauaaucaaagaagagguacuagcuuacgugguccaacugccacucuacggagugauugacacccccugcuggaagcugcauacuagcccucuuuguacaaccaacacgaaagaaggcucgaauaucugccugaccaggacagaucggggcugguauugugacaacgccgggucuguuuccuucuuuccacaggcagagacuugcaaggugcagucaaaucgcgucuucugugauaccaugaacaguuugacacuccccagcgaggugaaccugugcaauauagacauuuuuaacccuaaauacgauugcaagaucaugacuuccaagaccgacguaucuagcucaguuaucacaaguuuaggagcuauuguguccuguuaugguaaaaccaagugcacugccagcaauaaaaaccgaggcaucauuaagacguucucuaaugggugugauuacgucucaaacaaaggaguggacacagucagugugggcaauacccuguauuacguuaacaagcaagaagguaagagccuauaugugaaaggggagccaauaaucaauuuuuacgacccgcucguauuccccuccgaugaguucgacgcgucuauuucgcaggucaacgaaaagaucaaucagagccuggccuuuaucagaaaauccgaugaacuuuugcacaacgugaauguuggaaagucaacuaccaacauuaugauaacaaccaucauuaucgugauuaucgucauacugcuccugcuuaucgcagugggccuguucuuguacugcaaagcuaggugaggacuaguggaagcauuuuccuggcugauuaaaagaaauuacucagcuauggucaucuguuccuguuagaaggcuaugcagcauauuauauacuaugcgcauguuaugaaaugcauaauaaaaaauuuuaaaaaaucuaaaagaucuaaaaaaaaaaaaaaaaaaaaaaaaaaaaaaaaaaaaaaaaaaaaaaaaaaaaaaaaaaaaaaaaugcaucccccccccccccccccccccccccccccccaaaggcucuuuucagagccaccagaauu

SEQ ID NO: 13150 - RNA, 2036 nt, Artificial Sequence
  mRNA product Design h-3 comprising derived and/or modified sequence from HRSV(Memphis-37)__AIY60640.1__F-del_DSCav1 (opt4)
gggagacccgugacccggaaguuguacggcuacgcgacuuucccucccacaaacccucgcgcccuuccuuuccuacuugggcccggcagaaagcuuaccauggagcugcccauccugaagaccaacgccaucaccaccauccuggccgccgugacccugugcuucgccagcagccagaacaucaccgaggaguucuaccagagcaccugcagcgccgugagcaagggcuaccugagcgcccugagaaccggcugguacaccagcgugaucaccaucgagcugagcaacaucaaggagaacaagugcaacggcaccgacgccaaggugaagcugaucaagcaggagcuggacaaguacaagaacgccgugaccgagcugcagcugcugaugcagagcacccccgccgccaacaacagagccagaagagagcugcccagauucaugaacuacacccugaacaacaccaagaacaacaacgugacccugagcaagaagagaaagagaagauuccugggcuuccugcugggcgugggcagcgccaucgccagcggcaucgccgugugcaaggugcugcaccuggagggcgaggugaacaagaucaagaacgcccugcugagcaccaacaaggccguggugagccugagcaacggcgugagcgugcugaccuucaaggugcuggaccugaagaacuacaucgacaagcagcugcugcccauccugaacaagcagagcugcagcaucagcaacaucgagaccgugaucgaguuccagcagaagaacaacagacugcuggagaucaccagagaguucagcgugaacgccggcgugaccacccccgugagcaccuacaugcugaccaacagcgagcugcugagccugaucaacgacaugcccaucaccaacgaccagaagaagcugaugagcaacaacgugcagaucgugagacagcagagcuacagcaucaugugcaucaucaaggaggaggugcuggccuacguggugcagcugccccuguacggcgugaucgacacccccugcuggaagcugcacaccagcccccugugcaccaccaacaccaaggagggcagcaacaucugccugaccagaaccgacagaggcugguacugcgacaacgccggcagcgugagcuucuucccccaggccgagaccugcaaggugcagagcaacagaguguucugcgacaccaugaacagccugacccugcccagcgaggugaaccugugcaacaucgacaucuucaaccccaaguacgacugcaagaucaugaccagcaagaccgacgugagcagcagcgugaucaccagccugggcgccaucgugagcugcuacggcaagaccaagugcaccgccagcaacaagaacagaggcaucaucaagaccuucagcaacggcugcgacuacgugagcaacaagggcguggacaccgugagcgugggcaacacccuguacuacgugaacaagcaggagggcaagagccuguacgugaagggcgagcccaucaucaacuucuacgacccccugguguuccccagcgacgaguucgacgccagcaucagccaggugaacgagaagaucaaccagagccuggccuucaucagaaagagcgacgagcugcugcacaacgugaacgugggcaagagcaccaccaacaucaugaucaccaccaucaucaucgugaucaucgugauccugcugcugcugaucgccgugggccuguuccuguacugcaaggccagaugaggacuaguggaagcauuuuccuggcugauuaaaagaaauuacucagcuauggucaucuguuccuguuagaaggcuaugcagcauauuauauacuaugcgcauguuaugaaaugcauaauaaaaaauuuuaaaaaaucuaaaagaucuaaaaaaaaaaaaaaaaaaaaaaaaaaaaaaaaaaaaaaaaaaaaaaaaaaaaaaaaaaaaaaaaugcaucccccccccccccccccccccccccccccccaaaggcucuuuucagagccaccagaauu

SEQ ID NO: 13151 - RNA, 2036 nt, Artificial Sequence
  mRNA product Design h-3 comprising derived and/or modified sequence from HRSV(Memphis-37)__AIY60640.1__F-del_DSCav1 (opt5)
gggagacccgugacccggaaguuguacggcuacgcgacuuucccucccacaaacccucgcgcccuuccuuuccuacuugggcccggcagaaagcuuaccauggagcugcccauccucaagaccaacgccauuacaacgauccuggcugccgugacccuuugcuucgcgagcucccagaauauuacagaagaguuuuaccaaucuaccuguagcgcugucuccaaaggcuaucugucugcccucagaacagggugguacaccagcguuaucacaauugaacuguccaacaucaaggagaauaaaugcaacggaaccgacgccaaggugaaacuuaucaagcaggaacuggauaaguauaaaaaugcugugacggagcuccagcugcugaugcagucuaccccugccgcuaacaaucgggcccgcagagagcucccgcgguucaugaacuacacacugaauaacaccaagaauaacaaugucacacuuagcaaaaagcgcaaaagacgguuucugggcuuccuccugggggugggauccgcgauugccagcggcaucgcuguuuguaaggugcuucaccuggaaggggaggucaacaagauuaaaaaugcccuccugucuaccaacaaggcugugguuucccugagcaacggagugucuguccucacguuuaaagugcuggaccuuaagaauuauaucgauaaacaacugcuccccauucugaacaagcaguccugcagcaucucuaauauugaaacagugaucgaguuccagcagaaaaacaaucgccuucuggagaucaccagagaauuuuccgucaacgccggcguuacaaccccugugagcaccuacaugcucacaaauuccgagcugcugucucucauuaacgacaugcccaucacgaaugaucaaaagaagcugaugagcaacaaugugcagauuguccggcagcaguccuauagcaucauguguauuaucaaagaagaggugcuugcguacguugugcaacugccucucuacggcgucaucgacacccccugcuggaagcugcauacaucuccucuuuguaccacaaacaccaaagaaggguccaauauuugccugacgcgcacagauagaggaugguauugugacaacgccggcagcgugucuuucuuuccgcaggcugagaccugcaagguucagagcaaucggguguucugugauaccaugaacucccucacacugcccucugaggucaaccugugcaauaucgacauuuuuaacccuaaauacgauugcaagaucaugaccagcaagacagacguguccagcucugucauuacgucccucggggccaucgugagcuguuauggaaaaaccaagugcacagcuucuaauaaaaaccgcggcaucauuaagaccuucuccaaugggugugauuacguuagcaacaaaggaguggacacagucuccgugggcaauacccuguauuacguuaacaagcaagaaggcaagucucuuuaugugaaaggggagcccaucauuaauuuuuacgacccucuggucuuccccagcgaugaguucgacgccuccaucucucaggugaacgaaaagauuaaucagagccucgccuuuaucagaaaauccgaugaacugcugcacaacgugaauguuggaaagagcacgaccaacauuaugaucacaaccaucauuaucgucauuaucgugauucuucuccugcugaucgcugugggccucuuccuguacugcaaagcgcggugaggacuaguggaagcauuuuccuggcugauuaaaagaaauuacucagcuauggucaucuguuccuguuagaaggcuaugcagcauauuauauacuaugcgcauguuaugaaaugcauaauaaaaaauuuuaaaaaaucuaaaagaucuaaaaaaaaaaaaaaaaaaaaaaaaaaaaaaaaaaaaaaaaaaaaaaaaaaaaaaaaaaaaaaaaugcaucccccccccccccccccccccccccccccccaaaggcucuuuucagagccaccagaauu

SEQ ID NO: 13152 - RNA, 2036 nt, Artificial Sequence
  mRNA product Design h-3 comprising derived and/or modified sequence from HRSV(Memphis-37)__AIY60640.1__F-del_DSCav1 (opt6)
gggagacccgugacccggaaguuguacggcuacgcgacuuucccucccacaaacccucgcgcccuuccuuuccuacuugggcccggcagaaagcuuaccauggaauuaccaauccuuaaaacaaacgcaauaacaaccauccucgcagcaguaacucucugcuucgcuucaucucaaaacaucacagaagaauuuuaccaaagcacaugcucagcuguauccaaagguuaucuaucagccuugagaaccggaugguacacaucaguaauaacaauugaacuaucaaacauuaaagaaaacaaaugcaacggcaccgacgcaaaaguaaaacuaaucaaacaagaacuagacaaauauaaaaaugcaguaacagaauuacaauuauuaaugcaauccacaccagcugcaaacaaccgagcccgaagagaacuaccaagauucaugaacuacacacuaaacaacaccaaaaauaacaacgucacccuaucuaaaaaacguaaaagaagauucuuaggauuccucuuaggagucggauccgcaauagcaagcggcauagccguauguaaaguccuacacuuagaaggugaagugaauaaaauaaaaaacgcccuauuaagcacuaacaaagcaguagucucccuaucaaacggaguuucaguacucacauucaaaguacucgaccucaaaaacuacaucgacaaacaacuuuuaccaauucuaaacaaacaaucaugcuccauaucuaauaucgaaaccgucaucgaauuucaacaaaaaaacaauagacuacuagaaauaacuagagaauuuucaguaaacgccggcguuacgacaccagucucuacauacauguuaaccaauucagaacucuuaucauuaaucaacgacaugccaauaacaaacgaccaaaaaaaacuaauguccaauaacguacaaauagucagacaacaaucauacucaauuaugugcauaauaaaagaagaaguacuagcuuacguaguacaacucccccuauacggcguaauagacacuccauguuggaaauuacacacaucaccauuauguaccaccaauacaaaagaaggcucaaacauaugccuaacaagaacagauagaggaugguauugcgacaacgcaggcucaguuuccuuuuucccccaagcagaaaccugcaaaguacaaucaaaucguguuuuuugcgacaccaugaacucacucacauuaccaucagaaguaaaccuaugcaacauagacauauucaacccaaaauacgacugcaaaaucaugacaucaaaaacagacguauccucuucaguaauuacuagcuuaggagcaauagucucuuguuauggaaaaacaaaaugcacagccaguaacaaaaaccgcggaauaauaaaaaccuucucaaacgguugcgauuacgucucuaacaaaggagucgacacaguaucaguaggcaauacauuauacuacguuaacaaacaagaaggaaaaucuuuauacgucaaaggagaacccauuauaaacuuuuacgacccauuagucuucccuuccgacgaauuugacgccagcauuucacaaguaaacgaaaaaauaaaccaaucacucgcauuuauaagaaaaucugacgaauuacuccacaacguaaacguaggaaaauccacaacaaacauaaugauaacaaccauaaucaucgucauaauagucauacuucuccuauuaauugcaguaggcuuauuccuauacuguaaagcacgauaaggacuaguggaagcauuuuccuggcugauuaaaagaaauuacucagcuauggucaucuguuccuguuagaaggcuaugcagcauauuauauacuaugcgcauguuaugaaaugcauaauaaaaaauuuuaaaaaaucuaaaagaucuaaaaaaaaaaaaaaaaaaaaaaaaaaaaaaaaaaaaaaaaaaaaaaaaaaaaaaaaaaaaaaaaugcaucccccccccccccccccccccccccccccccaaaggcucuuuucagagccaccagaauu

SEQ ID NO: 13153 - RNA, 2036 nt, Artificial Sequence
  mRNA product Design h-3 comprising derived and/or modified sequence from HRSV(Memphis-37)__AIY60640.1__F-del_DSCav1 (opt11)
gggagacccgugacccggaaguuguacggcuacgcgacuuucccucccacaaacccucgcgcccuuccuuuccuacuugggcccggcagaaagcuuaccauggaacuaccaauccuaaaaacuaacgcaaucaccacaauccucgccgccgucacccuuugcuuugcguccucccaaaacauuacugaagaguucuaccaauccacgugcuccgccgucuccaaagguuaccuauccgcccuuaggaccggcugguacaccagcgucaucaccaucgaacuuuccaacaucaaagaaaacaaauguaacggcaccgacgcaaaagucaaacuuauuaaacaggaacucgacaaauauaagaaugccgucaccgaauuacaacuccucaugcaauccacccccgccgccaacaaccgagcaaggcgcgaacucccucgauucaugaauuacacccucaacaauaccaaaaacaacaacgucacccuauccaagaaacgcaaaagacgcuucuugggcuuccuccucggcgugggcuccgcaauagccuccgguauugccgugugcaaagucuuacaccucgaaggcgaggucaacaaaaucaaaaacgcccuccucuccaccaacaaagccgucgucagccuauccaacggcguuuccguccucaccuucaaaguacucgaccucaaaaacuacaucgacaaacaacuccuacccauacuaaacaaacaauccugcuccauuuccaacaucgaaaccguaaucgaguuccaacagaaaaacaaucgccuccuagaaaucacacgugaauuuucaguuaacgccggaguaacaacuccuguaucuaccuacaugcucaccaauuccgaacuccucagccucauaaacgacaugccaauaacaaacgaccaaaagaaacucaugucuaacaacguacaaaucgucagacaacaaaguuacucaaucauguguaucaucaaagaggaaguccuagcauacgugguccaacucccccucuacggaguaaucgacaccccaugcuggaaacuacacaccagcccccucuguaccacaaacacgaaagaagguuccaacaucugccugacccgaaccgaccgcggcugguacugcgauaacgcuggcuccgucucauucuucccccaagcagaaaccugcaaaguacaauccaaccgaguauucugcgacaccaugaacucacucacccuccccagcgaaguaaaccucugcaacaucgacauauucaacccaaaauacgacugcaaaauuaugaccucuaaaacagacguauccuccucuguaaucacaucccucggggccaucgucuccugcuacggcaaaaccaaaugcaccgccuccaacaaaaaccgcggaaucauaaaaaccuucuccaacggaugcgacuacgucucaaauaaaggcgucgacaccgucuccgucggcaacacgcuauacuacgucaacaaacaagaaggcaaaucacucuacgucaaaggugagcccaucaucaauuucuacgauccccucgucuucccaagcgacgaguucgacgccagcauaucccaaguaaacgagaaaaucaaccaaagccuggccuucauccgcaaauccgacgaacuacuacacaacguaaacguaggcaaguccacuaccaacauaaugaucaccacaaucaucauagucauaaucguuauacuacuccugcucaucgccguaggccucuuccucuauugcaaagcccgauagggacuaguggaagcauuuuccuggcugauuaaaagaaauuacucagcuauggucaucuguuccuguuagaaggcuaugcagcauauuauauacuaugcgcauguuaugaaaugcauaauaaaaaauuuuaaaaaaucuaaaagaucuaaaaaaaaaaaaaaaaaaaaaaaaaaaaaaaaaaaaaaaaaaaaaaaaaaaaaaaaaaaaaaaaugcaucccccccccccccccccccccccccccccccaaaggcucuuuucagagccaccagaauu

SEQ ID NO: 13154 - RNA, 2099 nt, Artificial Sequence
  mRNA product Design h-4 comprising derived and/or modified sequence from HRSV(Memphis-37)__AIY60640.1__F-del_DSCav1 (opt1)
gggagagggcgcuuggcuugcaaggacccugagcugcggcauugaagcacacccaacccaacucgacugaagucagccucacugaaccggaucugagaaucuucucucucugggcuugccagggcucuccgaaccuagcuagcauccucuucaauuccaacuagaaagcuuaccauggagcugcccauccucaagaccaacgccaucaccacgauccuggccgcggugacccugugcuucgccagcucccagaacaucaccgaggaguucuaccagagcacgugcuccgccgucagcaagggcuaccucuccgcccugcgcaccgggugguacaccagcgugaucaccaucgagcuguccaacaucaaggagaacaagugcaacggcaccgacgccaaggugaagcucaucaagcaggagcuggacaaguacaagaacgcggucacggagcugcagcuccugaugcagagcaccccggccgccaacaaccgggcccgccgggagcugccccgcuucaugaacuacacccucaacaacaccaagaacaacaacgugacgcuguccaagaagcggaagcgccgguuccugggguuccuccugggcguggggagcgcgaucgccuccggcaucgccgucugcaaggugcugcaccucgagggcgaggugaacaagaucaagaacgcccugcuguccaccaacaaggccgucgugagccucuccaacggggugagcguccugaccuucaaggugcuggaccucaagaacuacaucgacaagcagcugcugcccauccugaacaagcagagcugcuccaucagcaacaucgagaccgucaucgaguuccagcagaagaacaaccgccuccuggagaucacgcgggaguucagcgugaacgcgggcgugaccacccccgucuccaccuacaugcugacgaacagcgagcuccugucccugaucaacgacaugccgaucaccaacgaccagaagaagcucaugagcaacaacgugcagaucgugcgccagcaguccuacagcaucaugugcaucaucaaggaggagguccuggccuacguggugcagcugccccucuacggggucaucgacacccccugcuggaagcugcacaccagcccccugugcacgaccaacaccaaggagggcuccaacaucugccucacccggacggaccgcgggugguacugcgacaacgccggcagcguguccuucuucccgcaggccgagaccugcaagguccagagcaaccggguguucugcgacaccaugaacucccugacccugcccagcgaggugaaccucugcaacaucgacaucuucaaccccaaguacgacugcaagaucaugacguccaagaccgacgucagcuccagcgugaucaccucccugggcgccaucgugagcugcuacgggaagaccaagugcacggcgagcaacaagaaccgcggcaucaucaagaccuucuccaacgggugcgacuacgucagcaacaagggcguggacaccguguccgucggcaacacccuguacuacgugaacaagcaggagggcaagagccucuacgugaagggggagcccaucaucaacuucuacgacccgcuggucuuccccuccgacgaguucgacgccagcaucucccaggugaacgagaagaucaaccagagccuggccuucauccggaaguccgacgagcuccugcacaacgugaacgucggcaagagcaccacgaacaucaugaucaccaccaucaucaucgugaucaucgugauccugcugcuccugaucgccgucgggcuguuccucuacugcaaggcccgcugaggacuaguaauaaggaaacuguaugaaugucugugggcaggaagugaagagauccuucuguaaagguuuuuggaauuaugucugcugaauaauaaacuuuuuugaaauaauaaaucugguagaaaaaugagaucuaaaaaaaaaaaaaaaaaaaaaaaaaaaaaaaaaaaaaaaaaaaaaaaaaaaaaaaaaaaaaaaaugcaucccccccccccccccccccccccccccccccaaaggcucuuuucagagccaccagaauu

SEQ ID NO: 13155 - RNA, 2099 nt, Artificial Sequence
  mRNA product Design h-4 comprising derived and/or modified sequence from HRSV(Memphis-37)__AIY60640.1__F-del_DSCav1 (opt1)
gggagagggcgcuuggcuugcaaggacccugagcugcggcauugaagcacacccaacccaacucgacugaagucagccucacugaaccggaucugagaaucuucucucucugggcuugccagggcucuccgaaccuagcuagcauccucuucaauuccaacuagaaagcuuaccauggagcugcccauccucaagaccaacgccaucaccacgauccuggccgcggugacccugugcuucgccagcucccagaacaucaccgaggaguucuaccagagcacgugcuccgccgucagcaagggcuaccucuccgcccugcgcaccgggugguacaccagcgugaucaccaucgagcuguccaacaucaaggagaacaagugcaacggcaccgacgccaaggugaagcucaucaagcaggagcuggacaaguacaagaacgcggucacggagcugcagcuccugaugcagagcaccccggccgccaacaaccgggcccgccgggagcugccccgcuucaugaacuacacccucaacaacaccaagaacaacaacgugacgcuguccaagaagcggaagcgccgguuccugggguuccuccugggcguggggagcgcgaucgccuccggcaucgccgucugcaaggugcugcaccucgagggcgaggugaacaagaucaagaacgcccugcugagcaccaacaaggccgucgugucccucagcaacgggguguccguccugaccuucaaggugcuggaccucaagaacuacaucgacaagcagcugcugcccauccucaacaagcagagcugcuccaucagcaacaucgagaccgugaucgaguuccagcagaagaacaaccgccugcuggagaucacgcgggaguucuccgucaacgcgggcgugaccacccccgugagcaccuacaugcucacgaacagcgagcugcugucccucaucaacgacaugccgaucaccaacgaccagaagaagcugaugagcaacaacguccagaucgugcgccagcaguccuacagcaucaugugcaucaucaaggaggaggugcuggccuacgucgugcagcucccccuguacggggugaucgacacccccugcuggaagcugcacaccagcccccucugcacgaccaacaccaaggagggcagcaacaucugccugacccggacggaccgcgggugguacugcgacaacgccggcuccgucagcuucuucccgcaggccgagaccugcaaggugcaguccaaccgggucuucugcgacaccaugaacagccugacccuccccuccgaggugaaccugugcaacaucgacaucuucaaccccaaguacgacugcaagaucaugacgagcaagaccgacguguccagcuccgucaucaccagccugggcgccaucguguccugcuacgggaagaccaagugcacggcgagcaacaagaaccgcggcaucaucaagaccuucuccaacgggugcgacuacgugagcaacaagggcgucgacaccgugagcgugggcaacacccucuacuacgucaacaagcaggaggggaagucccuguacgugaagggcgagcccaucaucaacuucuacgacccgcugguguuccccagcgacgaguucgacgccuccaucagccaggucaacgagaagaucaaccagucccucgccuucauccggaaguccgacgagcugcugcacaacgugaacguggggaaguccaccacgaacaucaugaucaccaccaucaucaucgucaucaucgugauccugcuccugcugaucgccgugggccucuuccuguacugcaaggcccgcugaggacuaguaauaaggaaacuguaugaaugucugugggcaggaagugaagagauccuucuguaaagguuuuuggaauuaugucugcugaauaauaaacuuuuuugaaauaauaaaucugguagaaaaaugagaucuaaaaaaaaaaaaaaaaaaaaaaaaaaaaaaaaaaaaaaaaaaaaaaaaaaaaaaaaaaaaaaaaugcaucccccccccccccccccccccccccccccccaaaggcucuuuucagagccaccagaauu

SEQ ID NO: 13156 - RNA, 2099 nt, Artificial Sequence
  mRNA product Design h-4 comprising derived and/or modified sequence from HRSV(Memphis-37)__AIY60640.1__F-del_DSCav1 (opt2)
gggagagggcgcuuggcuugcaaggacccugagcugcggcauugaagcacacccaacccaacucgacugaagucagccucacugaaccggaucugagaaucuucucucucugggcuugccagggcucuccgaaccuagcuagcauccucuucaauuccaacuagaaagcuuaccauggagcuccccauccucaagaccaacgccaucaccaccauccucgccgccgucacccucugcuucgccuccucccagaacaucaccgaggaguucuaccaguccaccugcuccgccgucuccaagggcuaccucuccgcccuccgcaccggcugguacaccuccgucaucaccaucgagcucuccaacaucaaggagaacaagugcaacggcaccgacgccaaggucaagcucaucaagcaggagcucgacaaguacaagaacgccgucaccgagcuccagcuccucaugcaguccacccccgccgccaacaaccgcgcccgccgcgagcucccccgcuucaugaacuacacccucaacaacaccaagaacaacaacgucacccucuccaagaagcgcaagcgccgcuuccucggcuuccuccucggcgucggcuccgccaucgccuccggcaucgccgucugcaagguccuccaccucgagggcgaggucaacaagaucaagaacgcccuccucuccaccaacaaggccgucgucucccucuccaacggcgucuccguccucaccuucaagguccucgaccucaagaacuacaucgacaagcagcuccuccccauccucaacaagcaguccugcuccaucuccaacaucgagaccgucaucgaguuccagcagaagaacaaccgccuccucgagaucacccgcgaguucuccgucaacgccggcgucaccacccccgucuccaccuacaugcucaccaacuccgagcuccucucccucaucaacgacaugcccaucaccaacgaccagaagaagcucauguccaacaacguccagaucguccgccagcaguccuacuccaucaugugcaucaucaaggaggagguccucgccuacgucguccagcucccccucuacggcgucaucgacacccccugcuggaagcuccacaccuccccccucugcaccaccaacaccaaggagggcuccaacaucugccucacccgcaccgaccgcggcugguacugcgacaacgccggcuccgucuccuucuucccccaggccgagaccugcaagguccaguccaaccgcgucuucugcgacaccaugaacucccucacccuccccuccgaggucaaccucugcaacaucgacaucuucaaccccaaguacgacugcaagaucaugaccuccaagaccgacgucuccuccuccgucaucaccucccucggcgccaucgucuccugcuacggcaagaccaagugcaccgccuccaacaagaaccgcggcaucaucaagaccuucuccaacggcugcgacuacgucuccaacaagggcgucgacaccgucuccgucggcaacacccucuacuacgucaacaagcaggagggcaagucccucuacgucaagggcgagcccaucaucaacuucuacgacccccucgucuuccccuccgacgaguucgacgccuccaucucccaggucaacgagaagaucaaccagucccucgccuucauccgcaaguccgacgagcuccuccacaacgucaacgucggcaaguccaccaccaacaucaugaucaccaccaucaucaucgucaucaucgucauccuccuccuccucaucgccgucggccucuuccucuacugcaaggcccgcugaggacuaguaauaaggaaacuguaugaaugucugugggcaggaagugaagagauccuucuguaaagguuuuuggaauuaugucugcugaauaauaaacuuuuuugaaauaauaaaucugguagaaaaaugagaucuaaaaaaaaaaaaaaaaaaaaaaaaaaaaaaaaaaaaaaaaaaaaaaaaaaaaaaaaaaaaaaaaugcaucccccccccccccccccccccccccccccccaaaggcucuuuucagagccaccagaauu

SEQ ID NO: 13157 - RNA, 2099 nt, Artificial Sequence
  mRNA product Design h-4 comprising derived and/or modified sequence from HRSV(Memphis-37)__AIY60640.1__F-del_DSCav1 (opt3)
gggagagggcgcuuggcuugcaaggacccugagcugcggcauugaagcacacccaacccaacucgacugaagucagccucacugaaccggaucugagaaucuucucucucugggcuugccagggcucuccgaaccuagcuagcauccucuucaauuccaacuagaaagcuuaccauggagcugcccauccucaagaccaacgccauuacaacuauacuugcugcagugacgcugugcuucgccagcucccagaauaucaccgaagaguuuuaccaaucuacauguucagcggucaguaaaggcuauuugagcgcuuuaagaacugggugguacaccuccguuauuacaaucgaacugucuaacauuaaggagaauaaaugcaacggaaccgacgccaaggugaaacuaaucaagcaggaacucgauaaguauaaaaaugcaguaacugagcugcagcuucugaugcagucgaccccugccgcuaacaauagggcacggcgcgaguugccacgauucaugaacuacacacucaauaacacgaagaauaacaaugugacucugagcaaaaagcguaaaagaagguuucuggguuuccucuuaggcgucgggucagccauagcuaguggaaucgccguguguaagguucugcaccuugaaggcgaggugaacaagauuaaaaaugcguugcuguccaccaacaaggcagucgugucucuaagcaacgguguauccguucucacauuuaaagugcuggaccuuaagaauuauaucgauaaacaacuguugccgauucucaacaagcagucaugcaguaucagcaauauagaaacugucauugaguuccagcagaaaaacaaucggcuguuagagaucacccgcgaauuuucugugaacgccggggugacaacccccgucuccacguacaugcugacuaauucagagcuccuuagccugauuaacgacaugccuaucacaaaugaucaaaagaaguugaugaguaacaauguucagaucgugagacagcagucuuauuccauuauguguauaaucaaagaagagguacuagcuuacgugguccaacugccacucuacggagugauugacacccccugcuggaagcugcauacuagcccucuuuguacaaccaacacgaaagaaggcucgaauaucugccugaccaggacagaucggggcugguauugugacaacgccgggucuguuuccuucuuuccacaggcagagacuugcaaggugcagucaaaucgcgucuucugugauaccaugaacaguuugacacuccccagcgaggugaaccugugcaauauagacauuuuuaacccuaaauacgauugcaagaucaugacuuccaagaccgacguaucuagcucaguuaucacaaguuuaggagcuauuguguccuguuaugguaaaaccaagugcacugccagcaauaaaaaccgaggcaucauuaagacguucucuaaugggugugauuacgucucaaacaaaggaguggacacagucagugugggcaauacccuguauuacguuaacaagcaagaagguaagagccuauaugugaaaggggagccaauaaucaauuuuuacgacccgcucguauuccccuccgaugaguucgacgcgucuauuucgcaggucaacgaaaagaucaaucagagccuggccuuuaucagaaaauccgaugaacuuuugcacaacgugaauguuggaaagucaacuaccaacauuaugauaacaaccaucauuaucgugauuaucgucauacugcuccugcuuaucgcagugggccuguucuuguacugcaaagcuaggugaggacuaguaauaaggaaacuguaugaaugucugugggcaggaagugaagagauccuucuguaaagguuuuuggaauuaugucugcugaauaauaaacuuuuuugaaauaauaaaucugguagaaaaaugagaucuaaaaaaaaaaaaaaaaaaaaaaaaaaaaaaaaaaaaaaaaaaaaaaaaaaaaaaaaaaaaaaaaugcaucccccccccccccccccccccccccccccccaaaggcucuuuucagagccaccagaauu

SEQ ID NO: 13158 - RNA, 2099 nt, Artificial Sequence
  mRNA product Design h-4 comprising derived and/or modified sequence from HRSV(Memphis-37)__AIY60640.1__F-del_DSCav1 (opt4)
gggagagggcgcuuggcuugcaaggacccugagcugcggcauugaagcacacccaacccaacucgacugaagucagccucacugaaccggaucugagaaucuucucucucugggcuugccagggcucuccgaaccuagcuagcauccucuucaauuccaacuagaaagcuuaccauggagcugcccauccugaagaccaacgccaucaccaccauccuggccgccgugacccugugcuucgccagcagccagaacaucaccgaggaguucuaccagagcaccugcagcgccgugagcaagggcuaccugagcgcccugagaaccggcugguacaccagcgugaucaccaucgagcugagcaacaucaaggagaacaagugcaacggcaccgacgccaaggugaagcugaucaagcaggagcuggacaaguacaagaacgccgugaccgagcugcagcugcugaugcagagcacccccgccgccaacaacagagccagaagagagcugcccagauucaugaacuacacccugaacaacaccaagaacaacaacgugacccugagcaagaagagaaagagaagauuccugggcuuccugcugggcgugggcagcgccaucgccagcggcaucgccgugugcaaggugcugcaccuggagggcgaggugaacaagaucaagaacgcccugcugagcaccaacaaggccguggugagccugagcaacggcgugagcgugcugaccuucaaggugcuggaccugaagaacuacaucgacaagcagcugcugcccauccugaacaagcagagcugcagcaucagcaacaucgagaccgugaucgaguuccagcagaagaacaacagacugcuggagaucaccagagaguucagcgugaacgccggcgugaccacccccgugagcaccuacaugcugaccaacagcgagcugcugagccugaucaacgacaugcccaucaccaacgaccagaagaagcugaugagcaacaacgugcagaucgugagacagcagagcuacagcaucaugugcaucaucaaggaggaggugcuggccuacguggugcagcugccccuguacggcgugaucgacacccccugcuggaagcugcacaccagcccccugugcaccaccaacaccaaggagggcagcaacaucugccugaccagaaccgacagaggcugguacugcgacaacgccggcagcgugagcuucuucccccaggccgagaccugcaaggugcagagcaacagaguguucugcgacaccaugaacagccugacccugcccagcgaggugaaccugugcaacaucgacaucuucaaccccaaguacgacugcaagaucaugaccagcaagaccgacgugagcagcagcgugaucaccagccugggcgccaucgugagcugcuacggcaagaccaagugcaccgccagcaacaagaacagaggcaucaucaagaccuucagcaacggcugcgacuacgugagcaacaagggcguggacaccgugagcgugggcaacacccuguacuacgugaacaagcaggagggcaagagccuguacgugaagggcgagcccaucaucaacuucuacgacccccugguguuccccagcgacgaguucgacgccagcaucagccaggugaacgagaagaucaaccagagccuggccuucaucagaaagagcgacgagcugcugcacaacgugaacgugggcaagagcaccaccaacaucaugaucaccaccaucaucaucgugaucaucgugauccugcugcugcugaucgccgugggccuguuccuguacugcaaggccagaugaggacuaguaauaaggaaacuguaugaaugucugugggcaggaagugaagagauccuucuguaaagguuuuuggaauuaugucugcugaauaauaaacuuuuuugaaauaauaaaucugguagaaaaaugagaucuaaaaaaaaaaaaaaaaaaaaaaaaaaaaaaaaaaaaaaaaaaaaaaaaaaaaaaaaaaaaaaaaugcaucccccccccccccccccccccccccccccccaaaggcucuuuucagagccaccagaauu

SEQ ID NO: 13159 - RNA, 2099 nt, Artificial Sequence
  mRNA product Design h-4 comprising derived and/or modified sequence from HRSV(Memphis-37)__AIY60640.1__F-del_DSCav1 (opt5)
gggagagggcgcuuggcuugcaaggacccugagcugcggcauugaagcacacccaacccaacucgacugaagucagccucacugaaccggaucugagaaucuucucucucugggcuugccagggcucuccgaaccuagcuagcauccucuucaauuccaacuagaaagcuuaccauggagcugcccauccucaagaccaacgccauuacaacgauccuggcugccgugacccuuugcuucgcgagcucccagaauauuacagaagaguuuuaccaaucuaccuguagcgcugucuccaaaggcuaucugucugcccucagaacagggugguacaccagcguuaucacaauugaacuguccaacaucaaggagaauaaaugcaacggaaccgacgccaaggugaaacuuaucaagcaggaacuggauaaguauaaaaaugcugugacggagcuccagcugcugaugcagucuaccccugccgcuaacaaucgggcccgcagagagcucccgcgguucaugaacuacacacugaauaacaccaagaauaacaaugucacacuuagcaaaaagcgcaaaagacgguuucugggcuuccuccugggggugggauccgcgauugccagcggcaucgcuguuuguaaggugcuucaccuggaaggggaggucaacaagauuaaaaaugcccuccugucuaccaacaaggcugugguuucccugagcaacggagugucuguccucacguuuaaagugcuggaccuuaagaauuauaucgauaaacaacugcuccccauucugaacaagcaguccugcagcaucucuaauauugaaacagugaucgaguuccagcagaaaaacaaucgccuucuggagaucaccagagaauuuuccgucaacgccggcguuacaaccccugugagcaccuacaugcucacaaauuccgagcugcugucucucauuaacgacaugcccaucacgaaugaucaaaagaagcugaugagcaacaaugugcagauuguccggcagcaguccuauagcaucauguguauuaucaaagaagaggugcuugcguacguugugcaacugccucucuacggcgucaucgacacccccugcuggaagcugcauacaucuccucuuuguaccacaaacaccaaagaaggguccaauauuugccugacgcgcacagauagaggaugguauugugacaacgccggcagcgugucuuucuuuccgcaggcugagaccugcaagguucagagcaaucggguguucugugauaccaugaacucccucacacugcccucugaggucaaccugugcaauaucgacauuuuuaacccuaaauacgauugcaagaucaugaccagcaagacagacguguccagcucugucauuacgucccucggggccaucgugagcuguuauggaaaaaccaagugcacagcuucuaauaaaaaccgcggcaucauuaagaccuucuccaaugggugugauuacguuagcaacaaaggaguggacacagucuccgugggcaauacccuguauuacguuaacaagcaagaaggcaagucucuuuaugugaaaggggagcccaucauuaauuuuuacgacccucuggucuuccccagcgaugaguucgacgccuccaucucucaggugaacgaaaagauuaaucagagccucgccuuuaucagaaaauccgaugaacugcugcacaacgugaauguuggaaagagcacgaccaacauuaugaucacaaccaucauuaucgucauuaucgugauucuucuccugcugaucgcugugggccucuuccuguacugcaaagcgcggugaggacuaguaauaaggaaacuguaugaaugucugugggcaggaagugaagagauccuucuguaaagguuuuuggaauuaugucugcugaauaauaaacuuuuuugaaauaauaaaucugguagaaaaaugagaucuaaaaaaaaaaaaaaaaaaaaaaaaaaaaaaaaaaaaaaaaaaaaaaaaaaaaaaaaaaaaaaaaugcaucccccccccccccccccccccccccccccccaaaggcucuuuucagagccaccagaauu

SEQ ID NO: 13160 - RNA, 2099 nt, Artificial Sequence
  mRNA product Design h-4 comprising derived and/or modified sequence from HRSV(Memphis-37)__AIY60640.1__F-del_DSCav1 (opt6)
gggagagggcgcuuggcuugcaaggacccugagcugcggcauugaagcacacccaacccaacucgacugaagucagccucacugaaccggaucugagaaucuucucucucugggcuugccagggcucuccgaaccuagcuagcauccucuucaauuccaacuagaaagcuuaccauggaauuaccaauccuuaaaacaaacgcaauaacaaccauccucgcagcaguaacucucugcuucgcuucaucucaaaacaucacagaagaauuuuaccaaagcacaugcucagcuguauccaaagguuaucuaucagccuugagaaccggaugguacacaucaguaauaacaauugaacuaucaaacauuaaagaaaacaaaugcaacggcaccgacgcaaaaguaaaacuaaucaaacaagaacuagacaaauauaaaaaugcaguaacagaauuacaauuauuaaugcaauccacaccagcugcaaacaaccgagcccgaagagaacuaccaagauucaugaacuacacacuaaacaacaccaaaaauaacaacgucacccuaucuaaaaaacguaaaagaagauucuuaggauuccucuuaggagucggauccgcaauagcaagcggcauagccguauguaaaguccuacacuuagaaggugaagugaauaaaauaaaaaacgcccuauuaagcacuaacaaagcaguagucucccuaucaaacggaguuucaguacucacauucaaaguacucgaccucaaaaacuacaucgacaaacaacuuuuaccaauucuaaacaaacaaucaugcuccauaucuaauaucgaaaccgucaucgaauuucaacaaaaaaacaauagacuacuagaaauaacuagagaauuuucaguaaacgccggcguuacgacaccagucucuacauacauguuaaccaauucagaacucuuaucauuaaucaacgacaugccaauaacaaacgaccaaaaaaaacuaauguccaauaacguacaaauagucagacaacaaucauacucaauuaugugcauaauaaaagaagaaguacuagcuuacguaguacaacucccccuauacggcguaauagacacuccauguuggaaauuacacacaucaccauuauguaccaccaauacaaaagaaggcucaaacauaugccuaacaagaacagauagaggaugguauugcgacaacgcaggcucaguuuccuuuuucccccaagcagaaaccugcaaaguacaaucaaaucguguuuuuugcgacaccaugaacucacucacauuaccaucagaaguaaaccuaugcaacauagacauauucaacccaaaauacgacugcaaaaucaugacaucaaaaacagacguauccucuucaguaauuacuagcuuaggagcaauagucucuuguuauggaaaaacaaaaugcacagccaguaacaaaaaccgcggaauaauaaaaaccuucucaaacgguugcgauuacgucucuaacaaaggagucgacacaguaucaguaggcaauacauuauacuacguuaacaaacaagaaggaaaaucuuuauacgucaaaggagaacccauuauaaacuuuuacgacccauuagucuucccuuccgacgaauuugacgccagcauuucacaaguaaacgaaaaaauaaaccaaucacucgcauuuauaagaaaaucugacgaauuacuccacaacguaaacguaggaaaauccacaacaaacauaaugauaacaaccauaaucaucgucauaauagucauacuucuccuauuaauugcaguaggcuuauuccuauacuguaaagcacgauaaggacuaguaauaaggaaacuguaugaaugucugugggcaggaagugaagagauccuucuguaaagguuuuuggaauuaugucugcugaauaauaaacuuuuuugaaauaauaaaucugguagaaaaaugagaucuaaaaaaaaaaaaaaaaaaaaaaaaaaaaaaaaaaaaaaaaaaaaaaaaaaaaaaaaaaaaaaaaugcaucccccccccccccccccccccccccccccccaaaggcucuuuucagagccaccagaauu

SEQ ID NO: 13161 - RNA, 2099 nt, Artificial Sequence
  mRNA product Design h-4 comprising derived and/or modified sequence from HRSV(Memphis-37)__AIY60640.1__F-del_DSCav1 (opt11)
gggagagggcgcuuggcuugcaaggacccugagcugcggcauugaagcacacccaacccaacucgacugaagucagccucacugaaccggaucugagaaucuucucucucugggcuugccagggcucuccgaaccuagcuagcauccucuucaauuccaacuagaaagcuuaccauggaacuaccaauccuaaaaacuaacgcaaucaccacaauccucgccgccgucacccuuugcuuugcguccucccaaaacauuacugaagaguucuaccaauccacgugcuccgccgucuccaaagguuaccuauccgcccuuaggaccggcugguacaccagcgucaucaccaucgaacuuuccaacaucaaagaaaacaaauguaacggcaccgacgcaaaagucaaacuuauuaaacaggaacucgacaaauauaagaaugccgucaccgaauuacaacuccucaugcaauccacccccgccgccaacaaccgagcaaggcgcgaacucccucgauucaugaauuacacccucaacaauaccaaaaacaacaacgucacccuauccaagaaacgcaaaagacgcuucuugggcuuccuccucggcgugggcuccgcaauagccuccgguauugccgugugcaaagucuuacaccucgaaggcgaggucaacaaaaucaaaaacgcccuccucuccaccaacaaagccgucgucagccuauccaacggcguuuccguccucaccuucaaaguacucgaccucaaaaacuacaucgacaaacaacuccuacccauacuaaacaaacaauccugcuccauuuccaacaucgaaaccguaaucgaguuccaacagaaaaacaaucgccuccuagaaaucacacgugaauuuucaguuaacgccggaguaacaacuccuguaucuaccuacaugcucaccaauuccgaacuccucagccucauaaacgacaugccaauaacaaacgaccaaaagaaacucaugucuaacaacguacaaaucgucagacaacaaaguuacucaaucauguguaucaucaaagaggaaguccuagcauacgugguccaacucccccucuacggaguaaucgacaccccaugcuggaaacuacacaccagcccccucuguaccacaaacacgaaagaagguuccaacaucugccugacccgaaccgaccgcggcugguacugcgauaacgcuggcuccgucucauucuucccccaagcagaaaccugcaaaguacaauccaaccgaguauucugcgacaccaugaacucacucacccuccccagcgaaguaaaccucugcaacaucgacauauucaacccaaaauacgacugcaaaauuaugaccucuaaaacagacguauccuccucuguaaucacaucccucggggccaucgucuccugcuacggcaaaaccaaaugcaccgccuccaacaaaaaccgcggaaucauaaaaaccuucuccaacggaugcgacuacgucucaaauaaaggcgucgacaccgucuccgucggcaacacgcuauacuacgucaacaaacaagaaggcaaaucacucuacgucaaaggugagcccaucaucaauuucuacgauccccucgucuucccaagcgacgaguucgacgccagcauaucccaaguaaacgagaaaaucaaccaaagccuggccuucauccgcaaauccgacgaacuacuacacaacguaaacguaggcaaguccacuaccaacauaaugaucaccacaaucaucauagucauaaucguuauacuacuccugcucaucgccguaggccucuuccucuauugcaaagcccgauagggacuaguaauaaggaaacuguaugaaugucugugggcaggaagugaagagauccuucuguaaagguuuuuggaauuaugucugcugaauaauaaacuuuuuugaaauaauaaaucugguagaaaaaugagaucuaaaaaaaaaaaaaaaaaaaaaaaaaaaaaaaaaaaaaaaaaaaaaaaaaaaaaaaaaaaaaaaaugcaucccccccccccccccccccccccccccccccaaaggcucuuuucagagccaccagaauu

SEQ ID NO: 13162 - RNA, 2115 nt, Artificial Sequence
  mRNA product Design h-5 comprising derived and/or modified sequence from HRSV(Memphis-37)__AIY60640.1__F-del_DSCav1 (opt1)
gggagagggcgcuuggcuugcaaggacccugagcugcggcauugaagcacacccaacccaacucgacugaagucagccucacugaaccggaucugagaaucuucucucucugggcuugccagggcucuccgaaccuagcuagcauccucuucaauuccaacuagaaagcuuaccauggagcugcccauccucaagaccaacgccaucaccacgauccuggccgcggugacccugugcuucgccagcucccagaacaucaccgaggaguucuaccagagcacgugcuccgccgucagcaagggcuaccucuccgcccugcgcaccgggugguacaccagcgugaucaccaucgagcuguccaacaucaaggagaacaagugcaacggcaccgacgccaaggugaagcucaucaagcaggagcuggacaaguacaagaacgcggucacggagcugcagcuccugaugcagagcaccccggccgccaacaaccgggcccgccgggagcugccccgcuucaugaacuacacccucaacaacaccaagaacaacaacgugacgcuguccaagaagcggaagcgccgguuccugggguuccuccugggcguggggagcgcgaucgccuccggcaucgccgucugcaaggugcugcaccucgagggcgaggugaacaagaucaagaacgcccugcuguccaccaacaaggccgucgugagccucuccaacggggugagcguccugaccuucaaggugcuggaccucaagaacuacaucgacaagcagcugcugcccauccugaacaagcagagcugcuccaucagcaacaucgagaccgucaucgaguuccagcagaagaacaaccgccuccuggagaucacgcgggaguucagcgugaacgcgggcgugaccacccccgucuccaccuacaugcugacgaacagcgagcuccugucccugaucaacgacaugccgaucaccaacgaccagaagaagcucaugagcaacaacgugcagaucgugcgccagcaguccuacagcaucaugugcaucaucaaggaggagguccuggccuacguggugcagcugccccucuacggggucaucgacacccccugcuggaagcugcacaccagcccccugugcacgaccaacaccaaggagggcuccaacaucugccucacccggacggaccgcgggugguacugcgacaacgccggcagcguguccuucuucccgcaggccgagaccugcaagguccagagcaaccggguguucugcgacaccaugaacucccugacccugcccagcgaggugaaccucugcaacaucgacaucuucaaccccaaguacgacugcaagaucaugacguccaagaccgacgucagcuccagcgugaucaccucccugggcgccaucgugagcugcuacgggaagaccaagugcacggcgagcaacaagaaccgcggcaucaucaagaccuucuccaacgggugcgacuacgucagcaacaagggcguggacaccguguccgucggcaacacccuguacuacgugaacaagcaggagggcaagagccucuacgugaagggggagcccaucaucaacuucuacgacccgcuggucuuccccuccgacgaguucgacgccagcaucucccaggugaacgagaagaucaaccagagccuggccuucauccggaaguccgacgagcuccugcacaacgugaacgucggcaagagcaccacgaacaucaugaucaccaccaucaucaucgugaucaucgugauccugcugcuccugaucgccgucgggcuguuccucuacugcaaggcccgcugaggacuaguacuggcugcaucucccuuuccucuguccuccauccuucucccaggauggugaagggggaccugguacccagugauccccaccccaggauccuaaaucaugacuuaccugcuaauaaaaacucauuggaaaagugagaagaucuaaaaaaaaaaaaaaaaaaaaaaaaaaaaaaaaaaaaaaaaaaaaaaaaaaaaaaaaaaaaaaaaugcaucccccccccccccccccccccccccccccccaaaggcucuuuucagagccaccagaauu

SEQ ID NO: 13163 - RNA, 2115 nt, Artificial Sequence
  mRNA product Design h-5 comprising derived and/or modified sequence from HRSV(Memphis-37)__AIY60640.1__F-del_DSCav1 (opt1)
gggagagggcgcuuggcuugcaaggacccugagcugcggcauugaagcacacccaacccaacucgacugaagucagccucacugaaccggaucugagaaucuucucucucugggcuugccagggcucuccgaaccuagcuagcauccucuucaauuccaacuagaaagcuuaccauggagcugcccauccucaagaccaacgccaucaccacgauccuggccgcggugacccugugcuucgccagcucccagaacaucaccgaggaguucuaccagagcacgugcuccgccgucagcaagggcuaccucuccgcccugcgcaccgggugguacaccagcgugaucaccaucgagcuguccaacaucaaggagaacaagugcaacggcaccgacgccaaggugaagcucaucaagcaggagcuggacaaguacaagaacgcggucacggagcugcagcuccugaugcagagcaccccggccgccaacaaccgggcccgccgggagcugccccgcuucaugaacuacacccucaacaacaccaagaacaacaacgugacgcuguccaagaagcggaagcgccgguuccugggguuccuccugggcguggggagcgcgaucgccuccggcaucgccgucugcaaggugcugcaccucgagggcgaggugaacaagaucaagaacgcccugcugagcaccaacaaggccgucgugucccucagcaacgggguguccguccugaccuucaaggugcuggaccucaagaacuacaucgacaagcagcugcugcccauccucaacaagcagagcugcuccaucagcaacaucgagaccgugaucgaguuccagcagaagaacaaccgccugcuggagaucacgcgggaguucuccgucaacgcgggcgugaccacccccgugagcaccuacaugcucacgaacagcgagcugcugucccucaucaacgacaugccgaucaccaacgaccagaagaagcugaugagcaacaacguccagaucgugcgccagcaguccuacagcaucaugugcaucaucaaggaggaggugcuggccuacgucgugcagcucccccuguacggggugaucgacacccccugcuggaagcugcacaccagcccccucugcacgaccaacaccaaggagggcagcaacaucugccugacccggacggaccgcgggugguacugcgacaacgccggcuccgucagcuucuucccgcaggccgagaccugcaaggugcaguccaaccgggucuucugcgacaccaugaacagccugacccuccccuccgaggugaaccugugcaacaucgacaucuucaaccccaaguacgacugcaagaucaugacgagcaagaccgacguguccagcuccgucaucaccagccugggcgccaucguguccugcuacgggaagaccaagugcacggcgagcaacaagaaccgcggcaucaucaagaccuucuccaacgggugcgacuacgugagcaacaagggcgucgacaccgugagcgugggcaacacccucuacuacgucaacaagcaggaggggaagucccuguacgugaagggcgagcccaucaucaacuucuacgacccgcugguguuccccagcgacgaguucgacgccuccaucagccaggucaacgagaagaucaaccagucccucgccuucauccggaaguccgacgagcugcugcacaacgugaacguggggaaguccaccacgaacaucaugaucaccaccaucaucaucgucaucaucgugauccugcuccugcugaucgccgugggccucuuccuguacugcaaggcccgcugaggacuaguacuggcugcaucucccuuuccucuguccuccauccuucucccaggauggugaagggggaccugguacccagugauccccaccccaggauccuaaaucaugacuuaccugcuaauaaaaacucauuggaaaagugagaagaucuaaaaaaaaaaaaaaaaaaaaaaaaaaaaaaaaaaaaaaaaaaaaaaaaaaaaaaaaaaaaaaaaugcaucccccccccccccccccccccccccccccccaaaggcucuuuucagagccaccagaauu

SEQ ID NO: 13164 - RNA, 2115 nt, Artificial Sequence
  mRNA product Design h-5 comprising derived and/or modified sequence from HRSV(Memphis-37)__AIY60640.1__F-del_DSCav1 (opt2)
gggagagggcgcuuggcuugcaaggacccugagcugcggcauugaagcacacccaacccaacucgacugaagucagccucacugaaccggaucugagaaucuucucucucugggcuugccagggcucuccgaaccuagcuagcauccucuucaauuccaacuagaaagcuuaccauggagcuccccauccucaagaccaacgccaucaccaccauccucgccgccgucacccucugcuucgccuccucccagaacaucaccgaggaguucuaccaguccaccugcuccgccgucuccaagggcuaccucuccgcccuccgcaccggcugguacaccuccgucaucaccaucgagcucuccaacaucaaggagaacaagugcaacggcaccgacgccaaggucaagcucaucaagcaggagcucgacaaguacaagaacgccgucaccgagcuccagcuccucaugcaguccacccccgccgccaacaaccgcgcccgccgcgagcucccccgcuucaugaacuacacccucaacaacaccaagaacaacaacgucacccucuccaagaagcgcaagcgccgcuuccucggcuuccuccucggcgucggcuccgccaucgccuccggcaucgccgucugcaagguccuccaccucgagggcgaggucaacaagaucaagaacgcccuccucuccaccaacaaggccgucgucucccucuccaacggcgucuccguccucaccuucaagguccucgaccucaagaacuacaucgacaagcagcuccuccccauccucaacaagcaguccugcuccaucuccaacaucgagaccgucaucgaguuccagcagaagaacaaccgccuccucgagaucacccgcgaguucuccgucaacgccggcgucaccacccccgucuccaccuacaugcucaccaacuccgagcuccucucccucaucaacgacaugcccaucaccaacgaccagaagaagcucauguccaacaacguccagaucguccgccagcaguccuacuccaucaugugcaucaucaaggaggagguccucgccuacgucguccagcucccccucuacggcgucaucgacacccccugcuggaagcuccacaccuccccccucugcaccaccaacaccaaggagggcuccaacaucugccucacccgcaccgaccgcggcugguacugcgacaacgccggcuccgucuccuucuucccccaggccgagaccugcaagguccaguccaaccgcgucuucugcgacaccaugaacucccucacccuccccuccgaggucaaccucugcaacaucgacaucuucaaccccaaguacgacugcaagaucaugaccuccaagaccgacgucuccuccuccgucaucaccucccucggcgccaucgucuccugcuacggcaagaccaagugcaccgccuccaacaagaaccgcggcaucaucaagaccuucuccaacggcugcgacuacgucuccaacaagggcgucgacaccgucuccgucggcaacacccucuacuacgucaacaagcaggagggcaagucccucuacgucaagggcgagcccaucaucaacuucuacgacccccucgucuuccccuccgacgaguucgacgccuccaucucccaggucaacgagaagaucaaccagucccucgccuucauccgcaaguccgacgagcuccuccacaacgucaacgucggcaaguccaccaccaacaucaugaucaccaccaucaucaucgucaucaucgucauccuccuccuccucaucgccgucggccucuuccucuacugcaaggcccgcugaggacuaguacuggcugcaucucccuuuccucuguccuccauccuucucccaggauggugaagggggaccugguacccagugauccccaccccaggauccuaaaucaugacuuaccugcuaauaaaaacucauuggaaaagugagaagaucuaaaaaaaaaaaaaaaaaaaaaaaaaaaaaaaaaaaaaaaaaaaaaaaaaaaaaaaaaaaaaaaaugcaucccccccccccccccccccccccccccccccaaaggcucuuuucagagccaccagaauu

SEQ ID NO: 13165 - RNA, 2115 nt, Artificial Sequence
  mRNA product Design h-5 comprising derived and/or modified sequence from HRSV(Memphis-37)__AIY60640.1__F-del_DSCav1 (opt3)
gggagagggcgcuuggcuugcaaggacccugagcugcggcauugaagcacacccaacccaacucgacugaagucagccucacugaaccggaucugagaaucuucucucucugggcuugccagggcucuccgaaccuagcuagcauccucuucaauuccaacuagaaagcuuaccauggagcugcccauccucaagaccaacgccauuacaacuauacuugcugcagugacgcugugcuucgccagcucccagaauaucaccgaagaguuuuaccaaucuacauguucagcggucaguaaaggcuauuugagcgcuuuaagaacugggugguacaccuccguuauuacaaucgaacugucuaacauuaaggagaauaaaugcaacggaaccgacgccaaggugaaacuaaucaagcaggaacucgauaaguauaaaaaugcaguaacugagcugcagcuucugaugcagucgaccccugccgcuaacaauagggcacggcgcgaguugccacgauucaugaacuacacacucaauaacacgaagaauaacaaugugacucugagcaaaaagcguaaaagaagguuucuggguuuccucuuaggcgucgggucagccauagcuaguggaaucgccguguguaagguucugcaccuugaaggcgaggugaacaagauuaaaaaugcguugcuguccaccaacaaggcagucgugucucuaagcaacgguguauccguucucacauuuaaagugcuggaccuuaagaauuauaucgauaaacaacuguugccgauucucaacaagcagucaugcaguaucagcaauauagaaacugucauugaguuccagcagaaaaacaaucggcuguuagagaucacccgcgaauuuucugugaacgccggggugacaacccccgucuccacguacaugcugacuaauucagagcuccuuagccugauuaacgacaugccuaucacaaaugaucaaaagaaguugaugaguaacaauguucagaucgugagacagcagucuuauuccauuauguguauaaucaaagaagagguacuagcuuacgugguccaacugccacucuacggagugauugacacccccugcuggaagcugcauacuagcccucuuuguacaaccaacacgaaagaaggcucgaauaucugccugaccaggacagaucggggcugguauugugacaacgccgggucuguuuccuucuuuccacaggcagagacuugcaaggugcagucaaaucgcgucuucugugauaccaugaacaguuugacacuccccagcgaggugaaccugugcaauauagacauuuuuaacccuaaauacgauugcaagaucaugacuuccaagaccgacguaucuagcucaguuaucacaaguuuaggagcuauuguguccuguuaugguaaaaccaagugcacugccagcaauaaaaaccgaggcaucauuaagacguucucuaaugggugugauuacgucucaaacaaaggaguggacacagucagugugggcaauacccuguauuacguuaacaagcaagaagguaagagccuauaugugaaaggggagccaauaaucaauuuuuacgacccgcucguauuccccuccgaugaguucgacgcgucuauuucgcaggucaacgaaaagaucaaucagagccuggccuuuaucagaaaauccgaugaacuuuugcacaacgugaauguuggaaagucaacuaccaacauuaugauaacaaccaucauuaucgugauuaucgucauacugcuccugcuuaucgcagugggccuguucuuguacugcaaagcuaggugaggacuaguacuggcugcaucucccuuuccucuguccuccauccuucucccaggauggugaagggggaccugguacccagugauccccaccccaggauccuaaaucaugacuuaccugcuaauaaaaacucauuggaaaagugagaagaucuaaaaaaaaaaaaaaaaaaaaaaaaaaaaaaaaaaaaaaaaaaaaaaaaaaaaaaaaaaaaaaaaugcaucccccccccccccccccccccccccccccccaaaggcucuuuucagagccaccagaauu

SEQ ID NO: 13166 - RNA, 2115 nt, Artificial Sequence
  mRNA product Design h-5 comprising derived and/or modified sequence from HRSV(Memphis-37)__AIY60640.1__F-del_DSCav1 (opt4)
gggagagggcgcuuggcuugcaaggacccugagcugcggcauugaagcacacccaacccaacucgacugaagucagccucacugaaccggaucugagaaucuucucucucugggcuugccagggcucuccgaaccuagcuagcauccucuucaauuccaacuagaaagcuuaccauggagcugcccauccugaagaccaacgccaucaccaccauccuggccgccgugacccugugcuucgccagcagccagaacaucaccgaggaguucuaccagagcaccugcagcgccgugagcaagggcuaccugagcgcccugagaaccggcugguacaccagcgugaucaccaucgagcugagcaacaucaaggagaacaagugcaacggcaccgacgccaaggugaagcugaucaagcaggagcuggacaaguacaagaacgccgugaccgagcugcagcugcugaugcagagcacccccgccgccaacaacagagccagaagagagcugcccagauucaugaacuacacccugaacaacaccaagaacaacaacgugacccugagcaagaagagaaagagaagauuccugggcuuccugcugggcgugggcagcgccaucgccagcggcaucgccgugugcaaggugcugcaccuggagggcgaggugaacaagaucaagaacgcccugcugagcaccaacaaggccguggugagccugagcaacggcgugagcgugcugaccuucaaggugcuggaccugaagaacuacaucgacaagcagcugcugcccauccugaacaagcagagcugcagcaucagcaacaucgagaccgugaucgaguuccagcagaagaacaacagacugcuggagaucaccagagaguucagcgugaacgccggcgugaccacccccgugagcaccuacaugcugaccaacagcgagcugcugagccugaucaacgacaugcccaucaccaacgaccagaagaagcugaugagcaacaacgugcagaucgugagacagcagagcuacagcaucaugugcaucaucaaggaggaggugcuggccuacguggugcagcugccccuguacggcgugaucgacacccccugcuggaagcugcacaccagcccccugugcaccaccaacaccaaggagggcagcaacaucugccugaccagaaccgacagaggcugguacugcgacaacgccggcagcgugagcuucuucccccaggccgagaccugcaaggugcagagcaacagaguguucugcgacaccaugaacagccugacccugcccagcgaggugaaccugugcaacaucgacaucuucaaccccaaguacgacugcaagaucaugaccagcaagaccgacgugagcagcagcgugaucaccagccugggcgccaucgugagcugcuacggcaagaccaagugcaccgccagcaacaagaacagaggcaucaucaagaccuucagcaacggcugcgacuacgugagcaacaagggcguggacaccgugagcgugggcaacacccuguacuacgugaacaagcaggagggcaagagccuguacgugaagggcgagcccaucaucaacuucuacgacccccugguguuccccagcgacgaguucgacgccagcaucagccaggugaacgagaagaucaaccagagccuggccuucaucagaaagagcgacgagcugcugcacaacgugaacgugggcaagagcaccaccaacaucaugaucaccaccaucaucaucgugaucaucgugauccugcugcugcugaucgccgugggccuguuccuguacugcaaggccagaugaggacuaguacuggcugcaucucccuuuccucuguccuccauccuucucccaggauggugaagggggaccugguacccagugauccccaccccaggauccuaaaucaugacuuaccugcuaauaaaaacucauuggaaaagugagaagaucuaaaaaaaaaaaaaaaaaaaaaaaaaaaaaaaaaaaaaaaaaaaaaaaaaaaaaaaaaaaaaaaaugcaucccccccccccccccccccccccccccccccaaaggcucuuuucagagccaccagaauu

SEQ ID NO: 13167 - RNA, 2115 nt, Artificial Sequence
  mRNA product Design h-5 comprising derived and/or modified sequence from HRSV(Memphis-37)__AIY60640.1__F-del_DSCav1 (opt5)
gggagagggcgcuuggcuugcaaggacccugagcugcggcauugaagcacacccaacccaacucgacugaagucagccucacugaaccggaucugagaaucuucucucucugggcuugccagggcucuccgaaccuagcuagcauccucuucaauuccaacuagaaagcuuaccauggagcugcccauccucaagaccaacgccauuacaacgauccuggcugccgugacccuuugcuucgcgagcucccagaauauuacagaagaguuuuaccaaucuaccuguagcgcugucuccaaaggcuaucugucugcccucagaacagggugguacaccagcguuaucacaauugaacuguccaacaucaaggagaauaaaugcaacggaaccgacgccaaggugaaacuuaucaagcaggaacuggauaaguauaaaaaugcugugacggagcuccagcugcugaugcagucuaccccugccgcuaacaaucgggcccgcagagagcucccgcgguucaugaacuacacacugaauaacaccaagaauaacaaugucacacuuagcaaaaagcgcaaaagacgguuucugggcuuccuccugggggugggauccgcgauugccagcggcaucgcuguuuguaaggugcuucaccuggaaggggaggucaacaagauuaaaaaugcccuccugucuaccaacaaggcugugguuucccugagcaacggagugucuguccucacguuuaaagugcuggaccuuaagaauuauaucgauaaacaacugcuccccauucugaacaagcaguccugcagcaucucuaauauugaaacagugaucgaguuccagcagaaaaacaaucgccuucuggagaucaccagagaauuuuccgucaacgccggcguuacaaccccugugagcaccuacaugcucacaaauuccgagcugcugucucucauuaacgacaugcccaucacgaaugaucaaaagaagcugaugagcaacaaugugcagauuguccggcagcaguccuauagcaucauguguauuaucaaagaagaggugcuugcguacguugugcaacugccucucuacggcgucaucgacacccccugcuggaagcugcauacaucuccucuuuguaccacaaacaccaaagaaggguccaauauuugccugacgcgcacagauagaggaugguauugugacaacgccggcagcgugucuuucuuuccgcaggcugagaccugcaagguucagagcaaucggguguucugugauaccaugaacucccucacacugcccucugaggucaaccugugcaauaucgacauuuuuaacccuaaauacgauugcaagaucaugaccagcaagacagacguguccagcucugucauuacgucccucggggccaucgugagcuguuauggaaaaaccaagugcacagcuucuaauaaaaaccgcggcaucauuaagaccuucuccaaugggugugauuacguuagcaacaaaggaguggacacagucuccgugggcaauacccuguauuacguuaacaagcaagaaggcaagucucuuuaugugaaaggggagcccaucauuaauuuuuacgacccucuggucuuccccagcgaugaguucgacgccuccaucucucaggugaacgaaaagauuaaucagagccucgccuuuaucagaaaauccgaugaacugcugcacaacgugaauguuggaaagagcacgaccaacauuaugaucacaaccaucauuaucgucauuaucgugauucuucuccugcugaucgcugugggccucuuccuguacugcaaagcgcggugaggacuaguacuggcugcaucucccuuuccucuguccuccauccuucucccaggauggugaagggggaccugguacccagugauccccaccccaggauccuaaaucaugacuuaccugcuaauaaaaacucauuggaaaagugagaagaucuaaaaaaaaaaaaaaaaaaaaaaaaaaaaaaaaaaaaaaaaaaaaaaaaaaaaaaaaaaaaaaaaugcaucccccccccccccccccccccccccccccccaaaggcucuuuucagagccaccagaauu

SEQ ID NO: 13168 - RNA, 2115 nt, Artificial Sequence
  mRNA product Design h-5 comprising derived and/or modified sequence from HRSV(Memphis-37)__AIY60640.1__F-del_DSCav1 (opt6)
gggagagggcgcuuggcuugcaaggacccugagcugcggcauugaagcacacccaacccaacucgacugaagucagccucacugaaccggaucugagaaucuucucucucugggcuugccagggcucuccgaaccuagcuagcauccucuucaauuccaacuagaaagcuuaccauggaauuaccaauccuuaaaacaaacgcaauaacaaccauccucgcagcaguaacucucugcuucgcuucaucucaaaacaucacagaagaauuuuaccaaagcacaugcucagcuguauccaaagguuaucuaucagccuugagaaccggaugguacacaucaguaauaacaauugaacuaucaaacauuaaagaaaacaaaugcaacggcaccgacgcaaaaguaaaacuaaucaaacaagaacuagacaaauauaaaaaugcaguaacagaauuacaauuauuaaugcaauccacaccagcugcaaacaaccgagcccgaagagaacuaccaagauucaugaacuacacacuaaacaacaccaaaaauaacaacgucacccuaucuaaaaaacguaaaagaagauucuuaggauuccucuuaggagucggauccgcaauagcaagcggcauagccguauguaaaguccuacacuuagaaggugaagugaauaaaauaaaaaacgcccuauuaagcacuaacaaagcaguagucucccuaucaaacggaguuucaguacucacauucaaaguacucgaccucaaaaacuacaucgacaaacaacuuuuaccaauucuaaacaaacaaucaugcuccauaucuaauaucgaaaccgucaucgaauuucaacaaaaaaacaauagacuacuagaaauaacuagagaauuuucaguaaacgccggcguuacgacaccagucucuacauacauguuaaccaauucagaacucuuaucauuaaucaacgacaugccaauaacaaacgaccaaaaaaaacuaauguccaauaacguacaaauagucagacaacaaucauacucaauuaugugcauaauaaaagaagaaguacuagcuuacguaguacaacucccccuauacggcguaauagacacuccauguuggaaauuacacacaucaccauuauguaccaccaauacaaaagaaggcucaaacauaugccuaacaagaacagauagaggaugguauugcgacaacgcaggcucaguuuccuuuuucccccaagcagaaaccugcaaaguacaaucaaaucguguuuuuugcgacaccaugaacucacucacauuaccaucagaaguaaaccuaugcaacauagacauauucaacccaaaauacgacugcaaaaucaugacaucaaaaacagacguauccucuucaguaauuacuagcuuaggagcaauagucucuuguuauggaaaaacaaaaugcacagccaguaacaaaaaccgcggaauaauaaaaaccuucucaaacgguugcgauuacgucucuaacaaaggagucgacacaguaucaguaggcaauacauuauacuacguuaacaaacaagaaggaaaaucuuuauacgucaaaggagaacccauuauaaacuuuuacgacccauuagucuucccuuccgacgaauuugacgccagcauuucacaaguaaacgaaaaaauaaaccaaucacucgcauuuauaagaaaaucugacgaauuacuccacaacguaaacguaggaaaauccacaacaaacauaaugauaacaaccauaaucaucgucauaauagucauacuucuccuauuaauugcaguaggcuuauuccuauacuguaaagcacgauaaggacuaguacuggcugcaucucccuuuccucuguccuccauccuucucccaggauggugaagggggaccugguacccagugauccccaccccaggauccuaaaucaugacuuaccugcuaauaaaaacucauuggaaaagugagaagaucuaaaaaaaaaaaaaaaaaaaaaaaaaaaaaaaaaaaaaaaaaaaaaaaaaaaaaaaaaaaaaaaaugcaucccccccccccccccccccccccccccccccaaaggcucuuuucagagccaccagaauu

SEQ ID NO: 13169 - RNA, 2115 nt, Artificial Sequence
  mRNA product Design h-5 comprising derived and/or modified sequence from HRSV(Memphis-37)__AIY60640.1__F-del_DSCav1 (opt11)
gggagagggcgcuuggcuugcaaggacccugagcugcggcauugaagcacacccaacccaacucgacugaagucagccucacugaaccggaucugagaaucuucucucucugggcuugccagggcucuccgaaccuagcuagcauccucuucaauuccaacuagaaagcuuaccauggaacuaccaauccuaaaaacuaacgcaaucaccacaauccucgccgccgucacccuuugcuuugcguccucccaaaacauuacugaagaguucuaccaauccacgugcuccgccgucuccaaagguuaccuauccgcccuuaggaccggcugguacaccagcgucaucaccaucgaacuuuccaacaucaaagaaaacaaauguaacggcaccgacgcaaaagucaaacuuauuaaacaggaacucgacaaauauaagaaugccgucaccgaauuacaacuccucaugcaauccacccccgccgccaacaaccgagcaaggcgcgaacucccucgauucaugaauuacacccucaacaauaccaaaaacaacaacgucacccuauccaagaaacgcaaaagacgcuucuugggcuuccuccucggcgugggcuccgcaauagccuccgguauugccgugugcaaagucuuacaccucgaaggcgaggucaacaaaaucaaaaacgcccuccucuccaccaacaaagccgucgucagccuauccaacggcguuuccguccucaccuucaaaguacucgaccucaaaaacuacaucgacaaacaacuccuacccauacuaaacaaacaauccugcuccauuuccaacaucgaaaccguaaucgaguuccaacagaaaaacaaucgccuccuagaaaucacacgugaauuuucaguuaacgccggaguaacaacuccuguaucuaccuacaugcucaccaauuccgaacuccucagccucauaaacgacaugccaauaacaaacgaccaaaagaaacucaugucuaacaacguacaaaucgucagacaacaaaguuacucaaucauguguaucaucaaagaggaaguccuagcauacgugguccaacucccccucuacggaguaaucgacaccccaugcuggaaacuacacaccagcccccucuguaccacaaacacgaaagaagguuccaacaucugccugacccgaaccgaccgcggcugguacugcgauaacgcuggcuccgucucauucuucccccaagcagaaaccugcaaaguacaauccaaccgaguauucugcgacaccaugaacucacucacccuccccagcgaaguaaaccucugcaacaucgacauauucaacccaaaauacgacugcaaaauuaugaccucuaaaacagacguauccuccucuguaaucacaucccucggggccaucgucuccugcuacggcaaaaccaaaugcaccgccuccaacaaaaaccgcggaaucauaaaaaccuucuccaacggaugcgacuacgucucaaauaaaggcgucgacaccgucuccgucggcaacacgcuauacuacgucaacaaacaagaaggcaaaucacucuacgucaaaggugagcccaucaucaauuucuacgauccccucgucuucccaagcgacgaguucgacgccagcauaucccaaguaaacgagaaaaucaaccaaagccuggccuucauccgcaaauccgacgaacuacuacacaacguaaacguaggcaaguccacuaccaacauaaugaucaccacaaucaucauagucauaaucguuauacuacuccugcucaucgccguaggccucuuccucuauugcaaagcccgauagggacuaguacuggcugcaucucccuuuccucuguccuccauccuucucccaggauggugaagggggaccugguacccagugauccccaccccaggauccuaaaucaugacuuaccugcuaauaaaaacucauuggaaaagugagaagaucuaaaaaaaaaaaaaaaaaaaaaaaaaaaaaaaaaaaaaaaaaaaaaaaaaaaaaaaaaaaaaaaaugcaucccccccccccccccccccccccccccccccaaaggcucuuuucagagccaccagaauu

SEQ ID NO: 13170 - RNA, 2048 nt, Artificial Sequence
  mRNA product Design i-1 comprising derived and/or modified sequence from HRSV(Memphis-37)__AIY60640.1__F-del_DSCav1 (opt1)
gggagagggcgcuuggcuugcaaggacccugagcugcggcauugaagcacacccaacccaacucgacugaagucagccucacugaaccggaucugagaaucuucucucucugggcuugccagggcucuccgaaccuagcuagcauccucuucaauuccaacuagaaagcuuaccauggagcugcccauccucaagaccaacgccaucaccacgauccuggccgcggugacccugugcuucgccagcucccagaacaucaccgaggaguucuaccagagcacgugcuccgccgucagcaagggcuaccucuccgcccugcgcaccgggugguacaccagcgugaucaccaucgagcuguccaacaucaaggagaacaagugcaacggcaccgacgccaaggugaagcucaucaagcaggagcuggacaaguacaagaacgcggucacggagcugcagcuccugaugcagagcaccccggccgccaacaaccgggcccgccgggagcugccccgcuucaugaacuacacccucaacaacaccaagaacaacaacgugacgcuguccaagaagcggaagcgccgguuccugggguuccuccugggcguggggagcgcgaucgccuccggcaucgccgucugcaaggugcugcaccucgagggcgaggugaacaagaucaagaacgcccugcuguccaccaacaaggccgucgugagccucuccaacggggugagcguccugaccuucaaggugcuggaccucaagaacuacaucgacaagcagcugcugcccauccugaacaagcagagcugcuccaucagcaacaucgagaccgucaucgaguuccagcagaagaacaaccgccuccuggagaucacgcgggaguucagcgugaacgcgggcgugaccacccccgucuccaccuacaugcugacgaacagcgagcuccugucccugaucaacgacaugccgaucaccaacgaccagaagaagcucaugagcaacaacgugcagaucgugcgccagcaguccuacagcaucaugugcaucaucaaggaggagguccuggccuacguggugcagcugccccucuacggggucaucgacacccccugcuggaagcugcacaccagcccccugugcacgaccaacaccaaggagggcuccaacaucugccucacccggacggaccgcgggugguacugcgacaacgccggcagcguguccuucuucccgcaggccgagaccugcaagguccagagcaaccggguguucugcgacaccaugaacucccugacccugcccagcgaggugaaccucugcaacaucgacaucuucaaccccaaguacgacugcaagaucaugacguccaagaccgacgucagcuccagcgugaucaccucccugggcgccaucgugagcugcuacgggaagaccaagugcacggcgagcaacaagaaccgcggcaucaucaagaccuucuccaacgggugcgacuacgucagcaacaagggcguggacaccguguccgucggcaacacccuguacuacgugaacaagcaggagggcaagagccucuacgugaagggggagcccaucaucaacuucuacgacccgcuggucuuccccuccgacgaguucgacgccagcaucucccaggugaacgagaagaucaaccagagccuggccuucauccggaaguccgacgagcuccugcacaacgugaacgucggcaagagcaccacgaacaucaugaucaccaccaucaucaucgugaucaucgugauccugcugcuccugaucgccgucgggcuguuccucuacugcaaggcccgcugaggacuaguguccaccugucccuccugggcugcuggauugucucguuuuccugccaaauaaacaggaucagcgcuuuacagaucuaaaaaaaaaaaaaaaaaaaaaaaaaaaaaaaaaaaaaaaaaaaaaaaaaaaaaaaaaaaaaaaaugcaucccccccccccccccccccccccccccccccaaaggcucuuuucagagccaccagaauu

SEQ ID NO: 13171 - RNA, 2048 nt, Artificial Sequence
  mRNA product Design i-1 comprising derived and/or modified sequence from HRSV(Memphis-37)__AIY60640.1__F-del_DSCav1 (opt1)
gggagagggcgcuuggcuugcaaggacccugagcugcggcauugaagcacacccaacccaacucgacugaagucagccucacugaaccggaucugagaaucuucucucucugggcuugccagggcucuccgaaccuagcuagcauccucuucaauuccaacuagaaagcuuaccauggagcugcccauccucaagaccaacgccaucaccacgauccuggccgcggugacccugugcuucgccagcucccagaacaucaccgaggaguucuaccagagcacgugcuccgccgucagcaagggcuaccucuccgcccugcgcaccgggugguacaccagcgugaucaccaucgagcuguccaacaucaaggagaacaagugcaacggcaccgacgccaaggugaagcucaucaagcaggagcuggacaaguacaagaacgcggucacggagcugcagcuccugaugcagagcaccccggccgccaacaaccgggcccgccgggagcugccccgcuucaugaacuacacccucaacaacaccaagaacaacaacgugacgcuguccaagaagcggaagcgccgguuccugggguuccuccugggcguggggagcgcgaucgccuccggcaucgccgucugcaaggugcugcaccucgagggcgaggugaacaagaucaagaacgcccugcugagcaccaacaaggccgucgugucccucagcaacgggguguccguccugaccuucaaggugcuggaccucaagaacuacaucgacaagcagcugcugcccauccucaacaagcagagcugcuccaucagcaacaucgagaccgugaucgaguuccagcagaagaacaaccgccugcuggagaucacgcgggaguucuccgucaacgcgggcgugaccacccccgugagcaccuacaugcucacgaacagcgagcugcugucccucaucaacgacaugccgaucaccaacgaccagaagaagcugaugagcaacaacguccagaucgugcgccagcaguccuacagcaucaugugcaucaucaaggaggaggugcuggccuacgucgugcagcucccccuguacggggugaucgacacccccugcuggaagcugcacaccagcccccucugcacgaccaacaccaaggagggcagcaacaucugccugacccggacggaccgcgggugguacugcgacaacgccggcuccgucagcuucuucccgcaggccgagaccugcaaggugcaguccaaccgggucuucugcgacaccaugaacagccugacccuccccuccgaggugaaccugugcaacaucgacaucuucaaccccaaguacgacugcaagaucaugacgagcaagaccgacguguccagcuccgucaucaccagccugggcgccaucguguccugcuacgggaagaccaagugcacggcgagcaacaagaaccgcggcaucaucaagaccuucuccaacgggugcgacuacgugagcaacaagggcgucgacaccgugagcgugggcaacacccucuacuacgucaacaagcaggaggggaagucccuguacgugaagggcgagcccaucaucaacuucuacgacccgcugguguuccccagcgacgaguucgacgccuccaucagccaggucaacgagaagaucaaccagucccucgccuucauccggaaguccgacgagcugcugcacaacgugaacguggggaaguccaccacgaacaucaugaucaccaccaucaucaucgucaucaucgugauccugcuccugcugaucgccgugggccucuuccuguacugcaaggcccgcugaggacuaguguccaccugucccuccugggcugcuggauugucucguuuuccugccaaauaaacaggaucagcgcuuuacagaucuaaaaaaaaaaaaaaaaaaaaaaaaaaaaaaaaaaaaaaaaaaaaaaaaaaaaaaaaaaaaaaaaugcaucccccccccccccccccccccccccccccccaaaggcucuuuucagagccaccagaauu

SEQ ID NO: 13172 - RNA, 2048 nt, Artificial Sequence
  mRNA product Design i-1 comprising derived and/or modified sequence from HRSV(Memphis-37)__AIY60640.1__F-del_DSCav1 (opt2)
gggagagggcgcuuggcuugcaaggacccugagcugcggcauugaagcacacccaacccaacucgacugaagucagccucacugaaccggaucugagaaucuucucucucugggcuugccagggcucuccgaaccuagcuagcauccucuucaauuccaacuagaaagcuuaccauggagcuccccauccucaagaccaacgccaucaccaccauccucgccgccgucacccucugcuucgccuccucccagaacaucaccgaggaguucuaccaguccaccugcuccgccgucuccaagggcuaccucuccgcccuccgcaccggcugguacaccuccgucaucaccaucgagcucuccaacaucaaggagaacaagugcaacggcaccgacgccaaggucaagcucaucaagcaggagcucgacaaguacaagaacgccgucaccgagcuccagcuccucaugcaguccacccccgccgccaacaaccgcgcccgccgcgagcucccccgcuucaugaacuacacccucaacaacaccaagaacaacaacgucacccucuccaagaagcgcaagcgccgcuuccucggcuuccuccucggcgucggcuccgccaucgccuccggcaucgccgucugcaagguccuccaccucgagggcgaggucaacaagaucaagaacgcccuccucuccaccaacaaggccgucgucucccucuccaacggcgucuccguccucaccuucaagguccucgaccucaagaacuacaucgacaagcagcuccuccccauccucaacaagcaguccugcuccaucuccaacaucgagaccgucaucgaguuccagcagaagaacaaccgccuccucgagaucacccgcgaguucuccgucaacgccggcgucaccacccccgucuccaccuacaugcucaccaacuccgagcuccucucccucaucaacgacaugcccaucaccaacgaccagaagaagcucauguccaacaacguccagaucguccgccagcaguccuacuccaucaugugcaucaucaaggaggagguccucgccuacgucguccagcucccccucuacggcgucaucgacacccccugcuggaagcuccacaccuccccccucugcaccaccaacaccaaggagggcuccaacaucugccucacccgcaccgaccgcggcugguacugcgacaacgccggcuccgucuccuucuucccccaggccgagaccugcaagguccaguccaaccgcgucuucugcgacaccaugaacucccucacccuccccuccgaggucaaccucugcaacaucgacaucuucaaccccaaguacgacugcaagaucaugaccuccaagaccgacgucuccuccuccgucaucaccucccucggcgccaucgucuccugcuacggcaagaccaagugcaccgccuccaacaagaaccgcggcaucaucaagaccuucuccaacggcugcgacuacgucuccaacaagggcgucgacaccgucuccgucggcaacacccucuacuacgucaacaagcaggagggcaagucccucuacgucaagggcgagcccaucaucaacuucuacgacccccucgucuuccccuccgacgaguucgacgccuccaucucccaggucaacgagaagaucaaccagucccucgccuucauccgcaaguccgacgagcuccuccacaacgucaacgucggcaaguccaccaccaacaucaugaucaccaccaucaucaucgucaucaucgucauccuccuccuccucaucgccgucggccucuuccucuacugcaaggcccgcugaggacuaguguccaccugucccuccugggcugcuggauugucucguuuuccugccaaauaaacaggaucagcgcuuuacagaucuaaaaaaaaaaaaaaaaaaaaaaaaaaaaaaaaaaaaaaaaaaaaaaaaaaaaaaaaaaaaaaaaugcaucccccccccccccccccccccccccccccccaaaggcucuuuucagagccaccagaauu

SEQ ID NO: 13173 - RNA, 2048 nt, Artificial Sequence
  mRNA product Design i-1 comprising derived and/or modified sequence from HRSV(Memphis-37)__AIY60640.1__F-del_DSCav1 (opt3)
gggagagggcgcuuggcuugcaaggacccugagcugcggcauugaagcacacccaacccaacucgacugaagucagccucacugaaccggaucugagaaucuucucucucugggcuugccagggcucuccgaaccuagcuagcauccucuucaauuccaacuagaaagcuuaccauggagcugcccauccucaagaccaacgccauuacaacuauacuugcugcagugacgcugugcuucgccagcucccagaauaucaccgaagaguuuuaccaaucuacauguucagcggucaguaaaggcuauuugagcgcuuuaagaacugggugguacaccuccguuauuacaaucgaacugucuaacauuaaggagaauaaaugcaacggaaccgacgccaaggugaaacuaaucaagcaggaacucgauaaguauaaaaaugcaguaacugagcugcagcuucugaugcagucgaccccugccgcuaacaauagggcacggcgcgaguugccacgauucaugaacuacacacucaauaacacgaagaauaacaaugugacucugagcaaaaagcguaaaagaagguuucuggguuuccucuuaggcgucgggucagccauagcuaguggaaucgccguguguaagguucugcaccuugaaggcgaggugaacaagauuaaaaaugcguugcuguccaccaacaaggcagucgugucucuaagcaacgguguauccguucucacauuuaaagugcuggaccuuaagaauuauaucgauaaacaacuguugccgauucucaacaagcagucaugcaguaucagcaauauagaaacugucauugaguuccagcagaaaaacaaucggcuguuagagaucacccgcgaauuuucugugaacgccggggugacaacccccgucuccacguacaugcugacuaauucagagcuccuuagccugauuaacgacaugccuaucacaaaugaucaaaagaaguugaugaguaacaauguucagaucgugagacagcagucuuauuccauuauguguauaaucaaagaagagguacuagcuuacgugguccaacugccacucuacggagugauugacacccccugcuggaagcugcauacuagcccucuuuguacaaccaacacgaaagaaggcucgaauaucugccugaccaggacagaucggggcugguauugugacaacgccgggucuguuuccuucuuuccacaggcagagacuugcaaggugcagucaaaucgcgucuucugugauaccaugaacaguuugacacuccccagcgaggugaaccugugcaauauagacauuuuuaacccuaaauacgauugcaagaucaugacuuccaagaccgacguaucuagcucaguuaucacaaguuuaggagcuauuguguccuguuaugguaaaaccaagugcacugccagcaauaaaaaccgaggcaucauuaagacguucucuaaugggugugauuacgucucaaacaaaggaguggacacagucagugugggcaauacccuguauuacguuaacaagcaagaagguaagagccuauaugugaaaggggagccaauaaucaauuuuuacgacccgcucguauuccccuccgaugaguucgacgcgucuauuucgcaggucaacgaaaagaucaaucagagccuggccuuuaucagaaaauccgaugaacuuuugcacaacgugaauguuggaaagucaacuaccaacauuaugauaacaaccaucauuaucgugauuaucgucauacugcuccugcuuaucgcagugggccuguucuuguacugcaaagcuaggugaggacuaguguccaccugucccuccugggcugcuggauugucucguuuuccugccaaauaaacaggaucagcgcuuuacagaucuaaaaaaaaaaaaaaaaaaaaaaaaaaaaaaaaaaaaaaaaaaaaaaaaaaaaaaaaaaaaaaaaugcaucccccccccccccccccccccccccccccccaaaggcucuuuucagagccaccagaauu

SEQ ID NO: 13174 - RNA, 2048 nt, Artificial Sequence
  mRNA product Design i-1 comprising derived and/or modified sequence from HRSV(Memphis-37)__AIY60640.1__F-del_DSCav1 (opt4)
gggagagggcgcuuggcuugcaaggacccugagcugcggcauugaagcacacccaacccaacucgacugaagucagccucacugaaccggaucugagaaucuucucucucugggcuugccagggcucuccgaaccuagcuagcauccucuucaauuccaacuagaaagcuuaccauggagcugcccauccugaagaccaacgccaucaccaccauccuggccgccgugacccugugcuucgccagcagccagaacaucaccgaggaguucuaccagagcaccugcagcgccgugagcaagggcuaccugagcgcccugagaaccggcugguacaccagcgugaucaccaucgagcugagcaacaucaaggagaacaagugcaacggcaccgacgccaaggugaagcugaucaagcaggagcuggacaaguacaagaacgccgugaccgagcugcagcugcugaugcagagcacccccgccgccaacaacagagccagaagagagcugcccagauucaugaacuacacccugaacaacaccaagaacaacaacgugacccugagcaagaagagaaagagaagauuccugggcuuccugcugggcgugggcagcgccaucgccagcggcaucgccgugugcaaggugcugcaccuggagggcgaggugaacaagaucaagaacgcccugcugagcaccaacaaggccguggugagccugagcaacggcgugagcgugcugaccuucaaggugcuggaccugaagaacuacaucgacaagcagcugcugcccauccugaacaagcagagcugcagcaucagcaacaucgagaccgugaucgaguuccagcagaagaacaacagacugcuggagaucaccagagaguucagcgugaacgccggcgugaccacccccgugagcaccuacaugcugaccaacagcgagcugcugagccugaucaacgacaugcccaucaccaacgaccagaagaagcugaugagcaacaacgugcagaucgugagacagcagagcuacagcaucaugugcaucaucaaggaggaggugcuggccuacguggugcagcugccccuguacggcgugaucgacacccccugcuggaagcugcacaccagcccccugugcaccaccaacaccaaggagggcagcaacaucugccugaccagaaccgacagaggcugguacugcgacaacgccggcagcgugagcuucuucccccaggccgagaccugcaaggugcagagcaacagaguguucugcgacaccaugaacagccugacccugcccagcgaggugaaccugugcaacaucgacaucuucaaccccaaguacgacugcaagaucaugaccagcaagaccgacgugagcagcagcgugaucaccagccugggcgccaucgugagcugcuacggcaagaccaagugcaccgccagcaacaagaacagaggcaucaucaagaccuucagcaacggcugcgacuacgugagcaacaagggcguggacaccgugagcgugggcaacacccuguacuacgugaacaagcaggagggcaagagccuguacgugaagggcgagcccaucaucaacuucuacgacccccugguguuccccagcgacgaguucgacgccagcaucagccaggugaacgagaagaucaaccagagccuggccuucaucagaaagagcgacgagcugcugcacaacgugaacgugggcaagagcaccaccaacaucaugaucaccaccaucaucaucgugaucaucgugauccugcugcugcugaucgccgugggccuguuccuguacugcaaggccagaugaggacuaguguccaccugucccuccugggcugcuggauugucucguuuuccugccaaauaaacaggaucagcgcuuuacagaucuaaaaaaaaaaaaaaaaaaaaaaaaaaaaaaaaaaaaaaaaaaaaaaaaaaaaaaaaaaaaaaaaugcaucccccccccccccccccccccccccccccccaaaggcucuuuucagagccaccagaauu

SEQ ID NO: 13175 - RNA, 2048 nt, Artificial Sequence
  mRNA product Design i-1 comprising derived and/or modified sequence from HRSV(Memphis-37)__AIY60640.1__F-del_DSCav1 (opt5)
gggagagggcgcuuggcuugcaaggacccugagcugcggcauugaagcacacccaacccaacucgacugaagucagccucacugaaccggaucugagaaucuucucucucugggcuugccagggcucuccgaaccuagcuagcauccucuucaauuccaacuagaaagcuuaccauggagcugcccauccucaagaccaacgccauuacaacgauccuggcugccgugacccuuugcuucgcgagcucccagaauauuacagaagaguuuuaccaaucuaccuguagcgcugucuccaaaggcuaucugucugcccucagaacagggugguacaccagcguuaucacaauugaacuguccaacaucaaggagaauaaaugcaacggaaccgacgccaaggugaaacuuaucaagcaggaacuggauaaguauaaaaaugcugugacggagcuccagcugcugaugcagucuaccccugccgcuaacaaucgggcccgcagagagcucccgcgguucaugaacuacacacugaauaacaccaagaauaacaaugucacacuuagcaaaaagcgcaaaagacgguuucugggcuuccuccugggggugggauccgcgauugccagcggcaucgcuguuuguaaggugcuucaccuggaaggggaggucaacaagauuaaaaaugcccuccugucuaccaacaaggcugugguuucccugagcaacggagugucuguccucacguuuaaagugcuggaccuuaagaauuauaucgauaaacaacugcuccccauucugaacaagcaguccugcagcaucucuaauauugaaacagugaucgaguuccagcagaaaaacaaucgccuucuggagaucaccagagaauuuuccgucaacgccggcguuacaaccccugugagcaccuacaugcucacaaauuccgagcugcugucucucauuaacgacaugcccaucacgaaugaucaaaagaagcugaugagcaacaaugugcagauuguccggcagcaguccuauagcaucauguguauuaucaaagaagaggugcuugcguacguugugcaacugccucucuacggcgucaucgacacccccugcuggaagcugcauacaucuccucuuuguaccacaaacaccaaagaaggguccaauauuugccugacgcgcacagauagaggaugguauugugacaacgccggcagcgugucuuucuuuccgcaggcugagaccugcaagguucagagcaaucggguguucugugauaccaugaacucccucacacugcccucugaggucaaccugugcaauaucgacauuuuuaacccuaaauacgauugcaagaucaugaccagcaagacagacguguccagcucugucauuacgucccucggggccaucgugagcuguuauggaaaaaccaagugcacagcuucuaauaaaaaccgcggcaucauuaagaccuucuccaaugggugugauuacguuagcaacaaaggaguggacacagucuccgugggcaauacccuguauuacguuaacaagcaagaaggcaagucucuuuaugugaaaggggagcccaucauuaauuuuuacgacccucuggucuuccccagcgaugaguucgacgccuccaucucucaggugaacgaaaagauuaaucagagccucgccuuuaucagaaaauccgaugaacugcugcacaacgugaauguuggaaagagcacgaccaacauuaugaucacaaccaucauuaucgucauuaucgugauucuucuccugcugaucgcugugggccucuuccuguacugcaaagcgcggugaggacuaguguccaccugucccuccugggcugcuggauugucucguuuuccugccaaauaaacaggaucagcgcuuuacagaucuaaaaaaaaaaaaaaaaaaaaaaaaaaaaaaaaaaaaaaaaaaaaaaaaaaaaaaaaaaaaaaaaugcaucccccccccccccccccccccccccccccccaaaggcucuuuucagagccaccagaauu

SEQ ID NO: 13176 - RNA, 2048 nt, Artificial Sequence
  mRNA product Design i-1 comprising derived and/or modified sequence from HRSV(Memphis-37)__AIY60640.1__F-del_DSCav1 (opt6)
gggagagggcgcuuggcuugcaaggacccugagcugcggcauugaagcacacccaacccaacucgacugaagucagccucacugaaccggaucugagaaucuucucucucugggcuugccagggcucuccgaaccuagcuagcauccucuucaauuccaacuagaaagcuuaccauggaauuaccaauccuuaaaacaaacgcaauaacaaccauccucgcagcaguaacucucugcuucgcuucaucucaaaacaucacagaagaauuuuaccaaagcacaugcucagcuguauccaaagguuaucuaucagccuugagaaccggaugguacacaucaguaauaacaauugaacuaucaaacauuaaagaaaacaaaugcaacggcaccgacgcaaaaguaaaacuaaucaaacaagaacuagacaaauauaaaaaugcaguaacagaauuacaauuauuaaugcaauccacaccagcugcaaacaaccgagcccgaagagaacuaccaagauucaugaacuacacacuaaacaacaccaaaaauaacaacgucacccuaucuaaaaaacguaaaagaagauucuuaggauuccucuuaggagucggauccgcaauagcaagcggcauagccguauguaaaguccuacacuuagaaggugaagugaauaaaauaaaaaacgcccuauuaagcacuaacaaagcaguagucucccuaucaaacggaguuucaguacucacauucaaaguacucgaccucaaaaacuacaucgacaaacaacuuuuaccaauucuaaacaaacaaucaugcuccauaucuaauaucgaaaccgucaucgaauuucaacaaaaaaacaauagacuacuagaaauaacuagagaauuuucaguaaacgccggcguuacgacaccagucucuacauacauguuaaccaauucagaacucuuaucauuaaucaacgacaugccaauaacaaacgaccaaaaaaaacuaauguccaauaacguacaaauagucagacaacaaucauacucaauuaugugcauaauaaaagaagaaguacuagcuuacguaguacaacucccccuauacggcguaauagacacuccauguuggaaauuacacacaucaccauuauguaccaccaauacaaaagaaggcucaaacauaugccuaacaagaacagauagaggaugguauugcgacaacgcaggcucaguuuccuuuuucccccaagcagaaaccugcaaaguacaaucaaaucguguuuuuugcgacaccaugaacucacucacauuaccaucagaaguaaaccuaugcaacauagacauauucaacccaaaauacgacugcaaaaucaugacaucaaaaacagacguauccucuucaguaauuacuagcuuaggagcaauagucucuuguuauggaaaaacaaaaugcacagccaguaacaaaaaccgcggaauaauaaaaaccuucucaaacgguugcgauuacgucucuaacaaaggagucgacacaguaucaguaggcaauacauuauacuacguuaacaaacaagaaggaaaaucuuuauacgucaaaggagaacccauuauaaacuuuuacgacccauuagucuucccuuccgacgaauuugacgccagcauuucacaaguaaacgaaaaaauaaaccaaucacucgcauuuauaagaaaaucugacgaauuacuccacaacguaaacguaggaaaauccacaacaaacauaaugauaacaaccauaaucaucgucauaauagucauacuucuccuauuaauugcaguaggcuuauuccuauacuguaaagcacgauaaggacuaguguccaccugucccuccugggcugcuggauugucucguuuuccugccaaauaaacaggaucagcgcuuuacagaucuaaaaaaaaaaaaaaaaaaaaaaaaaaaaaaaaaaaaaaaaaaaaaaaaaaaaaaaaaaaaaaaaugcaucccccccccccccccccccccccccccccccaaaggcucuuuucagagccaccagaauu

SEQ ID NO: 13177 - RNA, 2048 nt, Artificial Sequence
  mRNA product Design i-1 comprising derived and/or modified sequence from HRSV(Memphis-37)__AIY60640.1__F-del_DSCav1 (opt11)
gggagagggcgcuuggcuugcaaggacccugagcugcggcauugaagcacacccaacccaacucgacugaagucagccucacugaaccggaucugagaaucuucucucucugggcuugccagggcucuccgaaccuagcuagcauccucuucaauuccaacuagaaagcuuaccauggaacuaccaauccuaaaaacuaacgcaaucaccacaauccucgccgccgucacccuuugcuuugcguccucccaaaacauuacugaagaguucuaccaauccacgugcuccgccgucuccaaagguuaccuauccgcccuuaggaccggcugguacaccagcgucaucaccaucgaacuuuccaacaucaaagaaaacaaauguaacggcaccgacgcaaaagucaaacuuauuaaacaggaacucgacaaauauaagaaugccgucaccgaauuacaacuccucaugcaauccacccccgccgccaacaaccgagcaaggcgcgaacucccucgauucaugaauuacacccucaacaauaccaaaaacaacaacgucacccuauccaagaaacgcaaaagacgcuucuugggcuuccuccucggcgugggcuccgcaauagccuccgguauugccgugugcaaagucuuacaccucgaaggcgaggucaacaaaaucaaaaacgcccuccucuccaccaacaaagccgucgucagccuauccaacggcguuuccguccucaccuucaaaguacucgaccucaaaaacuacaucgacaaacaacuccuacccauacuaaacaaacaauccugcuccauuuccaacaucgaaaccguaaucgaguuccaacagaaaaacaaucgccuccuagaaaucacacgugaauuuucaguuaacgccggaguaacaacuccuguaucuaccuacaugcucaccaauuccgaacuccucagccucauaaacgacaugccaauaacaaacgaccaaaagaaacucaugucuaacaacguacaaaucgucagacaacaaaguuacucaaucauguguaucaucaaagaggaaguccuagcauacgugguccaacucccccucuacggaguaaucgacaccccaugcuggaaacuacacaccagcccccucuguaccacaaacacgaaagaagguuccaacaucugccugacccgaaccgaccgcggcugguacugcgauaacgcuggcuccgucucauucuucccccaagcagaaaccugcaaaguacaauccaaccgaguauucugcgacaccaugaacucacucacccuccccagcgaaguaaaccucugcaacaucgacauauucaacccaaaauacgacugcaaaauuaugaccucuaaaacagacguauccuccucuguaaucacaucccucggggccaucgucuccugcuacggcaaaaccaaaugcaccgccuccaacaaaaaccgcggaaucauaaaaaccuucuccaacggaugcgacuacgucucaaauaaaggcgucgacaccgucuccgucggcaacacgcuauacuacgucaacaaacaagaaggcaaaucacucuacgucaaaggugagcccaucaucaauuucuacgauccccucgucuucccaagcgacgaguucgacgccagcauaucccaaguaaacgagaaaaucaaccaaagccuggccuucauccgcaaauccgacgaacuacuacacaacguaaacguaggcaaguccacuaccaacauaaugaucaccacaaucaucauagucauaaucguuauacuacuccugcucaucgccguaggccucuuccucuauugcaaagcccgauagggacuaguguccaccugucccuccugggcugcuggauugucucguuuuccugccaaauaaacaggaucagcgcuuuacagaucuaaaaaaaaaaaaaaaaaaaaaaaaaaaaaaaaaaaaaaaaaaaaaaaaaaaaaaaaaaaaaaaaugcaucccccccccccccccccccccccccccccccaaaggcucuuuucagagccaccagaauu

SEQ ID NO: 13178 - RNA, 2048 nt, Artificial Sequence
  mRNA product Design i-2 comprising derived and/or modified sequence from HRSV(Memphis-37)__AIY60640.1__F-del_DSCav1 (opt1)
gggagaggcgcugccuacggagguggcagccaucuccuucucggcaucaagcuuaccauggagcugcccauccucaagaccaacgccaucaccacgauccuggccgcggugacccugugcuucgccagcucccagaacaucaccgaggaguucuaccagagcacgugcuccgccgucagcaagggcuaccucuccgcccugcgcaccgggugguacaccagcgugaucaccaucgagcuguccaacaucaaggagaacaagugcaacggcaccgacgccaaggugaagcucaucaagcaggagcuggacaaguacaagaacgcggucacggagcugcagcuccugaugcagagcaccccggccgccaacaaccgggcccgccgggagcugccccgcuucaugaacuacacccucaacaacaccaagaacaacaacgugacgcuguccaagaagcggaagcgccgguuccugggguuccuccugggcguggggagcgcgaucgccuccggcaucgccgucugcaaggugcugcaccucgagggcgaggugaacaagaucaagaacgcccugcuguccaccaacaaggccgucgugagccucuccaacggggugagcguccugaccuucaaggugcuggaccucaagaacuacaucgacaagcagcugcugcccauccugaacaagcagagcugcuccaucagcaacaucgagaccgucaucgaguuccagcagaagaacaaccgccuccuggagaucacgcgggaguucagcgugaacgcgggcgugaccacccccgucuccaccuacaugcugacgaacagcgagcuccugucccugaucaacgacaugccgaucaccaacgaccagaagaagcucaugagcaacaacgugcagaucgugcgccagcaguccuacagcaucaugugcaucaucaaggaggagguccuggccuacguggugcagcugccccucuacggggucaucgacacccccugcuggaagcugcacaccagcccccugugcacgaccaacaccaaggagggcuccaacaucugccucacccggacggaccgcgggugguacugcgacaacgccggcagcguguccuucuucccgcaggccgagaccugcaagguccagagcaaccggguguucugcgacaccaugaacucccugacccugcccagcgaggugaaccucugcaacaucgacaucuucaaccccaaguacgacugcaagaucaugacguccaagaccgacgucagcuccagcgugaucaccucccugggcgccaucgugagcugcuacgggaagaccaagugcacggcgagcaacaagaaccgcggcaucaucaagaccuucuccaacgggugcgacuacgucagcaacaagggcguggacaccguguccgucggcaacacccuguacuacgugaacaagcaggagggcaagagccucuacgugaagggggagcccaucaucaacuucuacgacccgcuggucuuccccuccgacgaguucgacgccagcaucucccaggugaacgagaagaucaaccagagccuggccuucauccggaaguccgacgagcuccugcacaacgugaacgucggcaagagcaccacgaacaucaugaucaccaccaucaucaucgugaucaucgugauccugcugcuccugaucgccgucgggcuguuccucuacugcaaggcccgcugaggacuagugcaucacauuuaaaagcaucucagccuaccaugagaauaagagaaagaaaaugaagaucaauagcuuauucaucucuuuuucuuuuucguugguguaaagccaacacccugucuaaaaaacauaaauuucuuuaaucauuuugccucuuuucucugugcuucaauuaauaaaaaauggaaagaaccuagaucuaaaaaaaaaaaaaaaaaaaaaaaaaaaaaaaaaaaaaaaaaaaaaaaaaaaaaaaaaaaaaaaaugcaucccccccccccccccccccccccccccccccaaaggcucuuuucagagccaccagaauu

SEQ ID NO: 13179 - RNA, 2048 nt, Artificial Sequence
  mRNA product Design i-2 comprising derived and/or modified sequence from HRSV(Memphis-37)__AIY60640.1__F-del_DSCav1 (opt1)
gggagaggcgcugccuacggagguggcagccaucuccuucucggcaucaagcuuaccauggagcugcccauccucaagaccaacgccaucaccacgauccuggccgcggugacccugugcuucgccagcucccagaacaucaccgaggaguucuaccagagcacgugcuccgccgucagcaagggcuaccucuccgcccugcgcaccgggugguacaccagcgugaucaccaucgagcuguccaacaucaaggagaacaagugcaacggcaccgacgccaaggugaagcucaucaagcaggagcuggacaaguacaagaacgcggucacggagcugcagcuccugaugcagagcaccccggccgccaacaaccgggcccgccgggagcugccccgcuucaugaacuacacccucaacaacaccaagaacaacaacgugacgcuguccaagaagcggaagcgccgguuccugggguuccuccugggcguggggagcgcgaucgccuccggcaucgccgucugcaaggugcugcaccucgagggcgaggugaacaagaucaagaacgcccugcugagcaccaacaaggccgucgugucccucagcaacgggguguccguccugaccuucaaggugcuggaccucaagaacuacaucgacaagcagcugcugcccauccucaacaagcagagcugcuccaucagcaacaucgagaccgugaucgaguuccagcagaagaacaaccgccugcuggagaucacgcgggaguucuccgucaacgcgggcgugaccacccccgugagcaccuacaugcucacgaacagcgagcugcugucccucaucaacgacaugccgaucaccaacgaccagaagaagcugaugagcaacaacguccagaucgugcgccagcaguccuacagcaucaugugcaucaucaaggaggaggugcuggccuacgucgugcagcucccccuguacggggugaucgacacccccugcuggaagcugcacaccagcccccucugcacgaccaacaccaaggagggcagcaacaucugccugacccggacggaccgcgggugguacugcgacaacgccggcuccgucagcuucuucccgcaggccgagaccugcaaggugcaguccaaccgggucuucugcgacaccaugaacagccugacccuccccuccgaggugaaccugugcaacaucgacaucuucaaccccaaguacgacugcaagaucaugacgagcaagaccgacguguccagcuccgucaucaccagccugggcgccaucguguccugcuacgggaagaccaagugcacggcgagcaacaagaaccgcggcaucaucaagaccuucuccaacgggugcgacuacgugagcaacaagggcgucgacaccgugagcgugggcaacacccucuacuacgucaacaagcaggaggggaagucccuguacgugaagggcgagcccaucaucaacuucuacgacccgcugguguuccccagcgacgaguucgacgccuccaucagccaggucaacgagaagaucaaccagucccucgccuucauccggaaguccgacgagcugcugcacaacgugaacguggggaaguccaccacgaacaucaugaucaccaccaucaucaucgucaucaucgugauccugcuccugcugaucgccgugggccucuuccuguacugcaaggcccgcugaggacuagugcaucacauuuaaaagcaucucagccuaccaugagaauaagagaaagaaaaugaagaucaauagcuuauucaucucuuuuucuuuuucguugguguaaagccaacacccugucuaaaaaacauaaauuucuuuaaucauuuugccucuuuucucugugcuucaauuaauaaaaaauggaaagaaccuagaucuaaaaaaaaaaaaaaaaaaaaaaaaaaaaaaaaaaaaaaaaaaaaaaaaaaaaaaaaaaaaaaaaugcaucccccccccccccccccccccccccccccccaaaggcucuuuucagagccaccagaauu

SEQ ID NO: 13180 - RNA, 2048 nt, Artificial Sequence
  mRNA product Design i-2 comprising derived and/or modified sequence from HRSV(Memphis-37)__AIY60640.1__F-del_DSCav1 (opt2)
gggagaggcgcugccuacggagguggcagccaucuccuucucggcaucaagcuuaccauggagcuccccauccucaagaccaacgccaucaccaccauccucgccgccgucacccucugcuucgccuccucccagaacaucaccgaggaguucuaccaguccaccugcuccgccgucuccaagggcuaccucuccgcccuccgcaccggcugguacaccuccgucaucaccaucgagcucuccaacaucaaggagaacaagugcaacggcaccgacgccaaggucaagcucaucaagcaggagcucgacaaguacaagaacgccgucaccgagcuccagcuccucaugcaguccacccccgccgccaacaaccgcgcccgccgcgagcucccccgcuucaugaacuacacccucaacaacaccaagaacaacaacgucacccucuccaagaagcgcaagcgccgcuuccucggcuuccuccucggcgucggcuccgccaucgccuccggcaucgccgucugcaagguccuccaccucgagggcgaggucaacaagaucaagaacgcccuccucuccaccaacaaggccgucgucucccucuccaacggcgucuccguccucaccuucaagguccucgaccucaagaacuacaucgacaagcagcuccuccccauccucaacaagcaguccugcuccaucuccaacaucgagaccgucaucgaguuccagcagaagaacaaccgccuccucgagaucacccgcgaguucuccgucaacgccggcgucaccacccccgucuccaccuacaugcucaccaacuccgagcuccucucccucaucaacgacaugcccaucaccaacgaccagaagaagcucauguccaacaacguccagaucguccgccagcaguccuacuccaucaugugcaucaucaaggaggagguccucgccuacgucguccagcucccccucuacggcgucaucgacacccccugcuggaagcuccacaccuccccccucugcaccaccaacaccaaggagggcuccaacaucugccucacccgcaccgaccgcggcugguacugcgacaacgccggcuccgucuccuucuucccccaggccgagaccugcaagguccaguccaaccgcgucuucugcgacaccaugaacucccucacccuccccuccgaggucaaccucugcaacaucgacaucuucaaccccaaguacgacugcaagaucaugaccuccaagaccgacgucuccuccuccgucaucaccucccucggcgccaucgucuccugcuacggcaagaccaagugcaccgccuccaacaagaaccgcggcaucaucaagaccuucuccaacggcugcgacuacgucuccaacaagggcgucgacaccgucuccgucggcaacacccucuacuacgucaacaagcaggagggcaagucccucuacgucaagggcgagcccaucaucaacuucuacgacccccucgucuuccccuccgacgaguucgacgccuccaucucccaggucaacgagaagaucaaccagucccucgccuucauccgcaaguccgacgagcuccuccacaacgucaacgucggcaaguccaccaccaacaucaugaucaccaccaucaucaucgucaucaucgucauccuccuccuccucaucgccgucggccucuuccucuacugcaaggcccgcugaggacuagugcaucacauuuaaaagcaucucagccuaccaugagaauaagagaaagaaaaugaagaucaauagcuuauucaucucuuuuucuuuuucguugguguaaagccaacacccugucuaaaaaacauaaauuucuuuaaucauuuugccucuuuucucugugcuucaauuaauaaaaaauggaaagaaccuagaucuaaaaaaaaaaaaaaaaaaaaaaaaaaaaaaaaaaaaaaaaaaaaaaaaaaaaaaaaaaaaaaaaugcaucccccccccccccccccccccccccccccccaaaggcucuuuucagagccaccagaauu

SEQ ID NO: 13181 - RNA, 2048 nt, Artificial Sequence
  mRNA product Design i-2 comprising derived and/or modified sequence from HRSV(Memphis-37)__AIY60640.1__F-del_DSCav1 (opt3)
gggagaggcgcugccuacggagguggcagccaucuccuucucggcaucaagcuuaccauggagcugcccauccucaagaccaacgccauuacaacuauacuugcugcagugacgcugugcuucgccagcucccagaauaucaccgaagaguuuuaccaaucuacauguucagcggucaguaaaggcuauuugagcgcuuuaagaacugggugguacaccuccguuauuacaaucgaacugucuaacauuaaggagaauaaaugcaacggaaccgacgccaaggugaaacuaaucaagcaggaacucgauaaguauaaaaaugcaguaacugagcugcagcuucugaugcagucgaccccugccgcuaacaauagggcacggcgcgaguugccacgauucaugaacuacacacucaauaacacgaagaauaacaaugugacucugagcaaaaagcguaaaagaagguuucuggguuuccucuuaggcgucgggucagccauagcuaguggaaucgccguguguaagguucugcaccuugaaggcgaggugaacaagauuaaaaaugcguugcuguccaccaacaaggcagucgugucucuaagcaacgguguauccguucucacauuuaaagugcuggaccuuaagaauuauaucgauaaacaacuguugccgauucucaacaagcagucaugcaguaucagcaauauagaaacugucauugaguuccagcagaaaaacaaucggcuguuagagaucacccgcgaauuuucugugaacgccggggugacaacccccgucuccacguacaugcugacuaauucagagcuccuuagccugauuaacgacaugccuaucacaaaugaucaaaagaaguugaugaguaacaauguucagaucgugagacagcagucuuauuccauuauguguauaaucaaagaagagguacuagcuuacgugguccaacugccacucuacggagugauugacacccccugcuggaagcugcauacuagcccucuuuguacaaccaacacgaaagaaggcucgaauaucugccugaccaggacagaucggggcugguauugugacaacgccgggucuguuuccuucuuuccacaggcagagacuugcaaggugcagucaaaucgcgucuucugugauaccaugaacaguuugacacuccccagcgaggugaaccugugcaauauagacauuuuuaacccuaaauacgauugcaagaucaugacuuccaagaccgacguaucuagcucaguuaucacaaguuuaggagcuauuguguccuguuaugguaaaaccaagugcacugccagcaauaaaaaccgaggcaucauuaagacguucucuaaugggugugauuacgucucaaacaaaggaguggacacagucagugugggcaauacccuguauuacguuaacaagcaagaagguaagagccuauaugugaaaggggagccaauaaucaauuuuuacgacccgcucguauuccccuccgaugaguucgacgcgucuauuucgcaggucaacgaaaagaucaaucagagccuggccuuuaucagaaaauccgaugaacuuuugcacaacgugaauguuggaaagucaacuaccaacauuaugauaacaaccaucauuaucgugauuaucgucauacugcuccugcuuaucgcagugggccuguucuuguacugcaaagcuaggugaggacuagugcaucacauuuaaaagcaucucagccuaccaugagaauaagagaaagaaaaugaagaucaauagcuuauucaucucuuuuucuuuuucguugguguaaagccaacacccugucuaaaaaacauaaauuucuuuaaucauuuugccucuuuucucugugcuucaauuaauaaaaaauggaaagaaccuagaucuaaaaaaaaaaaaaaaaaaaaaaaaaaaaaaaaaaaaaaaaaaaaaaaaaaaaaaaaaaaaaaaaugcaucccccccccccccccccccccccccccccccaaaggcucuuuucagagccaccagaauu

SEQ ID NO: 13182 - RNA, 2048 nt, Artificial Sequence
  mRNA product Design i-2 comprising derived and/or modified sequence from HRSV(Memphis-37)__AIY60640.1__F-del_DSCav1 (opt4)
gggagaggcgcugccuacggagguggcagccaucuccuucucggcaucaagcuuaccauggagcugcccauccugaagaccaacgccaucaccaccauccuggccgccgugacccugugcuucgccagcagccagaacaucaccgaggaguucuaccagagcaccugcagcgccgugagcaagggcuaccugagcgcccugagaaccggcugguacaccagcgugaucaccaucgagcugagcaacaucaaggagaacaagugcaacggcaccgacgccaaggugaagcugaucaagcaggagcuggacaaguacaagaacgccgugaccgagcugcagcugcugaugcagagcacccccgccgccaacaacagagccagaagagagcugcccagauucaugaacuacacccugaacaacaccaagaacaacaacgugacccugagcaagaagagaaagagaagauuccugggcuuccugcugggcgugggcagcgccaucgccagcggcaucgccgugugcaaggugcugcaccuggagggcgaggugaacaagaucaagaacgcccugcugagcaccaacaaggccguggugagccugagcaacggcgugagcgugcugaccuucaaggugcuggaccugaagaacuacaucgacaagcagcugcugcccauccugaacaagcagagcugcagcaucagcaacaucgagaccgugaucgaguuccagcagaagaacaacagacugcuggagaucaccagagaguucagcgugaacgccggcgugaccacccccgugagcaccuacaugcugaccaacagcgagcugcugagccugaucaacgacaugcccaucaccaacgaccagaagaagcugaugagcaacaacgugcagaucgugagacagcagagcuacagcaucaugugcaucaucaaggaggaggugcuggccuacguggugcagcugccccuguacggcgugaucgacacccccugcuggaagcugcacaccagcccccugugcaccaccaacaccaaggagggcagcaacaucugccugaccagaaccgacagaggcugguacugcgacaacgccggcagcgugagcuucuucccccaggccgagaccugcaaggugcagagcaacagaguguucugcgacaccaugaacagccugacccugcccagcgaggugaaccugugcaacaucgacaucuucaaccccaaguacgacugcaagaucaugaccagcaagaccgacgugagcagcagcgugaucaccagccugggcgccaucgugagcugcuacggcaagaccaagugcaccgccagcaacaagaacagaggcaucaucaagaccuucagcaacggcugcgacuacgugagcaacaagggcguggacaccgugagcgugggcaacacccuguacuacgugaacaagcaggagggcaagagccuguacgugaagggcgagcccaucaucaacuucuacgacccccugguguuccccagcgacgaguucgacgccagcaucagccaggugaacgagaagaucaaccagagccuggccuucaucagaaagagcgacgagcugcugcacaacgugaacgugggcaagagcaccaccaacaucaugaucaccaccaucaucaucgugaucaucgugauccugcugcugcugaucgccgugggccuguuccuguacugcaaggccagaugaggacuagugcaucacauuuaaaagcaucucagccuaccaugagaauaagagaaagaaaaugaagaucaauagcuuauucaucucuuuuucuuuuucguugguguaaagccaacacccugucuaaaaaacauaaauuucuuuaaucauuuugccucuuuucucugugcuucaauuaauaaaaaauggaaagaaccuagaucuaaaaaaaaaaaaaaaaaaaaaaaaaaaaaaaaaaaaaaaaaaaaaaaaaaaaaaaaaaaaaaaaugcaucccccccccccccccccccccccccccccccaaaggcucuuuucagagccaccagaauu

SEQ ID NO: 13183 - RNA, 2048 nt, Artificial Sequence
  mRNA product Design i-2 comprising derived and/or modified sequence from HRSV(Memphis-37)__AIY60640.1__F-del_DSCav1 (opt5)
gggagaggcgcugccuacggagguggcagccaucuccuucucggcaucaagcuuaccauggagcugcccauccucaagaccaacgccauuacaacgauccuggcugccgugacccuuugcuucgcgagcucccagaauauuacagaagaguuuuaccaaucuaccuguagcgcugucuccaaaggcuaucugucugcccucagaacagggugguacaccagcguuaucacaauugaacuguccaacaucaaggagaauaaaugcaacggaaccgacgccaaggugaaacuuaucaagcaggaacuggauaaguauaaaaaugcugugacggagcuccagcugcugaugcagucuaccccugccgcuaacaaucgggcccgcagagagcucccgcgguucaugaacuacacacugaauaacaccaagaauaacaaugucacacuuagcaaaaagcgcaaaagacgguuucugggcuuccuccugggggugggauccgcgauugccagcggcaucgcuguuuguaaggugcuucaccuggaaggggaggucaacaagauuaaaaaugcccuccugucuaccaacaaggcugugguuucccugagcaacggagugucuguccucacguuuaaagugcuggaccuuaagaauuauaucgauaaacaacugcuccccauucugaacaagcaguccugcagcaucucuaauauugaaacagugaucgaguuccagcagaaaaacaaucgccuucuggagaucaccagagaauuuuccgucaacgccggcguuacaaccccugugagcaccuacaugcucacaaauuccgagcugcugucucucauuaacgacaugcccaucacgaaugaucaaaagaagcugaugagcaacaaugugcagauuguccggcagcaguccuauagcaucauguguauuaucaaagaagaggugcuugcguacguugugcaacugccucucuacggcgucaucgacacccccugcuggaagcugcauacaucuccucuuuguaccacaaacaccaaagaaggguccaauauuugccugacgcgcacagauagaggaugguauugugacaacgccggcagcgugucuuucuuuccgcaggcugagaccugcaagguucagagcaaucggguguucugugauaccaugaacucccucacacugcccucugaggucaaccugugcaauaucgacauuuuuaacccuaaauacgauugcaagaucaugaccagcaagacagacguguccagcucugucauuacgucccucggggccaucgugagcuguuauggaaaaaccaagugcacagcuucuaauaaaaaccgcggcaucauuaagaccuucuccaaugggugugauuacguuagcaacaaaggaguggacacagucuccgugggcaauacccuguauuacguuaacaagcaagaaggcaagucucuuuaugugaaaggggagcccaucauuaauuuuuacgacccucuggucuuccccagcgaugaguucgacgccuccaucucucaggugaacgaaaagauuaaucagagccucgccuuuaucagaaaauccgaugaacugcugcacaacgugaauguuggaaagagcacgaccaacauuaugaucacaaccaucauuaucgucauuaucgugauucuucuccugcugaucgcugugggccucuuccuguacugcaaagcgcggugaggacuagugcaucacauuuaaaagcaucucagccuaccaugagaauaagagaaagaaaaugaagaucaauagcuuauucaucucuuuuucuuuuucguugguguaaagccaacacccugucuaaaaaacauaaauuucuuuaaucauuuugccucuuuucucugugcuucaauuaauaaaaaauggaaagaaccuagaucuaaaaaaaaaaaaaaaaaaaaaaaaaaaaaaaaaaaaaaaaaaaaaaaaaaaaaaaaaaaaaaaaugcaucccccccccccccccccccccccccccccccaaaggcucuuuucagagccaccagaauu

SEQ ID NO: 13184 - RNA, 2048 nt, Artificial Sequence
  mRNA product Design i-2 comprising derived and/or modified sequence from HRSV(Memphis-37)__AIY60640.1__F-del_DSCav1 (opt6)
gggagaggcgcugccuacggagguggcagccaucuccuucucggcaucaagcuuaccauggaauuaccaauccuuaaaacaaacgcaauaacaaccauccucgcagcaguaacucucugcuucgcuucaucucaaaacaucacagaagaauuuuaccaaagcacaugcucagcuguauccaaagguuaucuaucagccuugagaaccggaugguacacaucaguaauaacaauugaacuaucaaacauuaaagaaaacaaaugcaacggcaccgacgcaaaaguaaaacuaaucaaacaagaacuagacaaauauaaaaaugcaguaacagaauuacaauuauuaaugcaauccacaccagcugcaaacaaccgagcccgaagagaacuaccaagauucaugaacuacacacuaaacaacaccaaaaauaacaacgucacccuaucuaaaaaacguaaaagaagauucuuaggauuccucuuaggagucggauccgcaauagcaagcggcauagccguauguaaaguccuacacuuagaaggugaagugaauaaaauaaaaaacgcccuauuaagcacuaacaaagcaguagucucccuaucaaacggaguuucaguacucacauucaaaguacucgaccucaaaaacuacaucgacaaacaacuuuuaccaauucuaaacaaacaaucaugcuccauaucuaauaucgaaaccgucaucgaauuucaacaaaaaaacaauagacuacuagaaauaacuagagaauuuucaguaaacgccggcguuacgacaccagucucuacauacauguuaaccaauucagaacucuuaucauuaaucaacgacaugccaauaacaaacgaccaaaaaaaacuaauguccaauaacguacaaauagucagacaacaaucauacucaauuaugugcauaauaaaagaagaaguacuagcuuacguaguacaacucccccuauacggcguaauagacacuccauguuggaaauuacacacaucaccauuauguaccaccaauacaaaagaaggcucaaacauaugccuaacaagaacagauagaggaugguauugcgacaacgcaggcucaguuuccuuuuucccccaagcagaaaccugcaaaguacaaucaaaucguguuuuuugcgacaccaugaacucacucacauuaccaucagaaguaaaccuaugcaacauagacauauucaacccaaaauacgacugcaaaaucaugacaucaaaaacagacguauccucuucaguaauuacuagcuuaggagcaauagucucuuguuauggaaaaacaaaaugcacagccaguaacaaaaaccgcggaauaauaaaaaccuucucaaacgguugcgauuacgucucuaacaaaggagucgacacaguaucaguaggcaauacauuauacuacguuaacaaacaagaaggaaaaucuuuauacgucaaaggagaacccauuauaaacuuuuacgacccauuagucuucccuuccgacgaauuugacgccagcauuucacaaguaaacgaaaaaauaaaccaaucacucgcauuuauaagaaaaucugacgaauuacuccacaacguaaacguaggaaaauccacaacaaacauaaugauaacaaccauaaucaucgucauaauagucauacuucuccuauuaauugcaguaggcuuauuccuauacuguaaagcacgauaaggacuagugcaucacauuuaaaagcaucucagccuaccaugagaauaagagaaagaaaaugaagaucaauagcuuauucaucucuuuuucuuuuucguugguguaaagccaacacccugucuaaaaaacauaaauuucuuuaaucauuuugccucuuuucucugugcuucaauuaauaaaaaauggaaagaaccuagaucuaaaaaaaaaaaaaaaaaaaaaaaaaaaaaaaaaaaaaaaaaaaaaaaaaaaaaaaaaaaaaaaaugcaucccccccccccccccccccccccccccccccaaaggcucuuuucagagccaccagaauu

SEQ ID NO: 13185 - RNA, 2048 nt, Artificial Sequence
  mRNA product Design i-2 comprising derived and/or modified sequence from HRSV(Memphis-37)__AIY60640.1__F-del_DSCav1 (opt11)
gggagaggcgcugccuacggagguggcagccaucuccuucucggcaucaagcuuaccauggaacuaccaauccuaaaaacuaacgcaaucaccacaauccucgccgccgucacccuuugcuuugcguccucccaaaacauuacugaagaguucuaccaauccacgugcuccgccgucuccaaagguuaccuauccgcccuuaggaccggcugguacaccagcgucaucaccaucgaacuuuccaacaucaaagaaaacaaauguaacggcaccgacgcaaaagucaaacuuauuaaacaggaacucgacaaauauaagaaugccgucaccgaauuacaacuccucaugcaauccacccccgccgccaacaaccgagcaaggcgcgaacucccucgauucaugaauuacacccucaacaauaccaaaaacaacaacgucacccuauccaagaaacgcaaaagacgcuucuugggcuuccuccucggcgugggcuccgcaauagccuccgguauugccgugugcaaagucuuacaccucgaaggcgaggucaacaaaaucaaaaacgcccuccucuccaccaacaaagccgucgucagccuauccaacggcguuuccguccucaccuucaaaguacucgaccucaaaaacuacaucgacaaacaacuccuacccauacuaaacaaacaauccugcuccauuuccaacaucgaaaccguaaucgaguuccaacagaaaaacaaucgccuccuagaaaucacacgugaauuuucaguuaacgccggaguaacaacuccuguaucuaccuacaugcucaccaauuccgaacuccucagccucauaaacgacaugccaauaacaaacgaccaaaagaaacucaugucuaacaacguacaaaucgucagacaacaaaguuacucaaucauguguaucaucaaagaggaaguccuagcauacgugguccaacucccccucuacggaguaaucgacaccccaugcuggaaacuacacaccagcccccucuguaccacaaacacgaaagaagguuccaacaucugccugacccgaaccgaccgcggcugguacugcgauaacgcuggcuccgucucauucuucccccaagcagaaaccugcaaaguacaauccaaccgaguauucugcgacaccaugaacucacucacccuccccagcgaaguaaaccucugcaacaucgacauauucaacccaaaauacgacugcaaaauuaugaccucuaaaacagacguauccuccucuguaaucacaucccucggggccaucgucuccugcuacggcaaaaccaaaugcaccgccuccaacaaaaaccgcggaaucauaaaaaccuucuccaacggaugcgacuacgucucaaauaaaggcgucgacaccgucuccgucggcaacacgcuauacuacgucaacaaacaagaaggcaaaucacucuacgucaaaggugagcccaucaucaauuucuacgauccccucgucuucccaagcgacgaguucgacgccagcauaucccaaguaaacgagaaaaucaaccaaagccuggccuucauccgcaaauccgacgaacuacuacacaacguaaacguaggcaaguccacuaccaacauaaugaucaccacaaucaucauagucauaaucguuauacuacuccugcucaucgccguaggccucuuccucuauugcaaagcccgauagggacuagugcaucacauuuaaaagcaucucagccuaccaugagaauaagagaaagaaaaugaagaucaauagcuuauucaucucuuuuucuuuuucguugguguaaagccaacacccugucuaaaaaacauaaauuucuuuaaucauuuugccucuuuucucugugcuucaauuaauaaaaaauggaaagaaccuagaucuaaaaaaaaaaaaaaaaaaaaaaaaaaaaaaaaaaaaaaaaaaaaaaaaaaaaaaaaaaaaaaaaugcaucccccccccccccccccccccccccccccccaaaggcucuuuucagagccaccagaauu

SEQ ID NO: 13186 - RNA, 2044 nt, Artificial Sequence
  mRNA product Design i-2 comprising derived and/or modified sequence from HRSV(Memphis-37)__AIY60640.1__F-del_DSCav1 (opt1)
ggggcgcugccuacggagguggcagccaucuccuucucggcaucaagcuuaccauggagcugcccauccucaagaccaacgccaucaccacgauccuggccgcggugacccugugcuucgccagcucccagaacaucaccgaggaguucuaccagagcacgugcuccgccgucagcaagggcuaccucuccgcccugcgcaccgggugguacaccagcgugaucaccaucgagcuguccaacaucaaggagaacaagugcaacggcaccgacgccaaggugaagcucaucaagcaggagcuggacaaguacaagaacgcggucacggagcugcagcuccugaugcagagcaccccggccgccaacaaccgggcccgccgggagcugccccgcuucaugaacuacacccucaacaacaccaagaacaacaacgugacgcuguccaagaagcggaagcgccgguuccugggguuccuccugggcguggggagcgcgaucgccuccggcaucgccgucugcaaggugcugcaccucgagggcgaggugaacaagaucaagaacgcccugcuguccaccaacaaggccgucgugagccucuccaacggggugagcguccugaccuucaaggugcuggaccucaagaacuacaucgacaagcagcugcugcccauccugaacaagcagagcugcuccaucagcaacaucgagaccgucaucgaguuccagcagaagaacaaccgccuccuggagaucacgcgggaguucagcgugaacgcgggcgugaccacccccgucuccaccuacaugcugacgaacagcgagcuccugucccugaucaacgacaugccgaucaccaacgaccagaagaagcucaugagcaacaacgugcagaucgugcgccagcaguccuacagcaucaugugcaucaucaaggaggagguccuggccuacguggugcagcugccccucuacggggucaucgacacccccugcuggaagcugcacaccagcccccugugcacgaccaacaccaaggagggcuccaacaucugccucacccggacggaccgcgggugguacugcgacaacgccggcagcguguccuucuucccgcaggccgagaccugcaagguccagagcaaccggguguucugcgacaccaugaacucccugacccugcccagcgaggugaaccucugcaacaucgacaucuucaaccccaaguacgacugcaagaucaugacguccaagaccgacgucagcuccagcgugaucaccucccugggcgccaucgugagcugcuacgggaagaccaagugcacggcgagcaacaagaaccgcggcaucaucaagaccuucuccaacgggugcgacuacgucagcaacaagggcguggacaccguguccgucggcaacacccuguacuacgugaacaagcaggagggcaagagccucuacgugaagggggagcccaucaucaacuucuacgacccgcuggucuuccccuccgacgaguucgacgccagcaucucccaggugaacgagaagaucaaccagagccuggccuucauccggaaguccgacgagcuccugcacaacgugaacgucggcaagagcaccacgaacaucaugaucaccaccaucaucaucgugaucaucgugauccugcugcuccugaucgccgucgggcuguuccucuacugcaaggcccgcugaggacuagugcaucacauuuaaaagcaucucagccuaccaugagaauaagagaaagaaaaugaagaucaauagcuuauucaucucuuuuucuuuuucguugguguaaagccaacacccugucuaaaaaacauaaauuucuuuaaucauuuugccucuuuucucugugcuucaauuaauaaaaaauggaaagaaccuagaucuaaaaaaaaaaaaaaaaaaaaaaaaaaaaaaaaaaaaaaaaaaaaaaaaaaaaaaaaaaaaaaaaugcaucccccccccccccccccccccccccccccccaaaggcucuuuucagagccaccagaauu

SEQ ID NO: 13187 - RNA, 2044 nt, Artificial Sequence
  mRNA product Design i-2 comprising derived and/or modified sequence from HRSV(Memphis-37)__AIY60640.1__F-del_DSCav1 (opt1)
ggggcgcugccuacggagguggcagccaucuccuucucggcaucaagcuuaccauggagcugcccauccucaagaccaacgccaucaccacgauccuggccgcggugacccugugcuucgccagcucccagaacaucaccgaggaguucuaccagagcacgugcuccgccgucagcaagggcuaccucuccgcccugcgcaccgggugguacaccagcgugaucaccaucgagcuguccaacaucaaggagaacaagugcaacggcaccgacgccaaggugaagcucaucaagcaggagcuggacaaguacaagaacgcggucacggagcugcagcuccugaugcagagcaccccggccgccaacaaccgggcccgccgggagcugccccgcuucaugaacuacacccucaacaacaccaagaacaacaacgugacgcuguccaagaagcggaagcgccgguuccugggguuccuccugggcguggggagcgcgaucgccuccggcaucgccgucugcaaggugcugcaccucgagggcgaggugaacaagaucaagaacgcccugcugagcaccaacaaggccgucgugucccucagcaacgggguguccguccugaccuucaaggugcuggaccucaagaacuacaucgacaagcagcugcugcccauccucaacaagcagagcugcuccaucagcaacaucgagaccgugaucgaguuccagcagaagaacaaccgccugcuggagaucacgcgggaguucuccgucaacgcgggcgugaccacccccgugagcaccuacaugcucacgaacagcgagcugcugucccucaucaacgacaugccgaucaccaacgaccagaagaagcugaugagcaacaacguccagaucgugcgccagcaguccuacagcaucaugugcaucaucaaggaggaggugcuggccuacgucgugcagcucccccuguacggggugaucgacacccccugcuggaagcugcacaccagcccccucugcacgaccaacaccaaggagggcagcaacaucugccugacccggacggaccgcgggugguacugcgacaacgccggcuccgucagcuucuucccgcaggccgagaccugcaaggugcaguccaaccgggucuucugcgacaccaugaacagccugacccuccccuccgaggugaaccugugcaacaucgacaucuucaaccccaaguacgacugcaagaucaugacgagcaagaccgacguguccagcuccgucaucaccagccugggcgccaucguguccugcuacgggaagaccaagugcacggcgagcaacaagaaccgcggcaucaucaagaccuucuccaacgggugcgacuacgugagcaacaagggcgucgacaccgugagcgugggcaacacccucuacuacgucaacaagcaggaggggaagucccuguacgugaagggcgagcccaucaucaacuucuacgacccgcugguguuccccagcgacgaguucgacgccuccaucagccaggucaacgagaagaucaaccagucccucgccuucauccggaaguccgacgagcugcugcacaacgugaacguggggaaguccaccacgaacaucaugaucaccaccaucaucaucgucaucaucgugauccugcuccugcugaucgccgugggccucuuccuguacugcaaggcccgcugaggacuagugcaucacauuuaaaagcaucucagccuaccaugagaauaagagaaagaaaaugaagaucaauagcuuauucaucucuuuuucuuuuucguugguguaaagccaacacccugucuaaaaaacauaaauuucuuuaaucauuuugccucuuuucucugugcuucaauuaauaaaaaauggaaagaaccuagaucuaaaaaaaaaaaaaaaaaaaaaaaaaaaaaaaaaaaaaaaaaaaaaaaaaaaaaaaaaaaaaaaaugcaucccccccccccccccccccccccccccccccaaaggcucuuuucagagccaccagaauu

SEQ ID NO: 13188 - RNA, 2044 nt, Artificial Sequence
  mRNA product Design i-2 comprising derived and/or modified sequence from HRSV(Memphis-37)__AIY60640.1__F-del_DSCav1 (opt2)
ggggcgcugccuacggagguggcagccaucuccuucucggcaucaagcuuaccauggagcuccccauccucaagaccaacgccaucaccaccauccucgccgccgucacccucugcuucgccuccucccagaacaucaccgaggaguucuaccaguccaccugcuccgccgucuccaagggcuaccucuccgcccuccgcaccggcugguacaccuccgucaucaccaucgagcucuccaacaucaaggagaacaagugcaacggcaccgacgccaaggucaagcucaucaagcaggagcucgacaaguacaagaacgccgucaccgagcuccagcuccucaugcaguccacccccgccgccaacaaccgcgcccgccgcgagcucccccgcuucaugaacuacacccucaacaacaccaagaacaacaacgucacccucuccaagaagcgcaagcgccgcuuccucggcuuccuccucggcgucggcuccgccaucgccuccggcaucgccgucugcaagguccuccaccucgagggcgaggucaacaagaucaagaacgcccuccucuccaccaacaaggccgucgucucccucuccaacggcgucuccguccucaccuucaagguccucgaccucaagaacuacaucgacaagcagcuccuccccauccucaacaagcaguccugcuccaucuccaacaucgagaccgucaucgaguuccagcagaagaacaaccgccuccucgagaucacccgcgaguucuccgucaacgccggcgucaccacccccgucuccaccuacaugcucaccaacuccgagcuccucucccucaucaacgacaugcccaucaccaacgaccagaagaagcucauguccaacaacguccagaucguccgccagcaguccuacuccaucaugugcaucaucaaggaggagguccucgccuacgucguccagcucccccucuacggcgucaucgacacccccugcuggaagcuccacaccuccccccucugcaccaccaacaccaaggagggcuccaacaucugccucacccgcaccgaccgcggcugguacugcgacaacgccggcuccgucuccuucuucccccaggccgagaccugcaagguccaguccaaccgcgucuucugcgacaccaugaacucccucacccuccccuccgaggucaaccucugcaacaucgacaucuucaaccccaaguacgacugcaagaucaugaccuccaagaccgacgucuccuccuccgucaucaccucccucggcgccaucgucuccugcuacggcaagaccaagugcaccgccuccaacaagaaccgcggcaucaucaagaccuucuccaacggcugcgacuacgucuccaacaagggcgucgacaccgucuccgucggcaacacccucuacuacgucaacaagcaggagggcaagucccucuacgucaagggcgagcccaucaucaacuucuacgacccccucgucuuccccuccgacgaguucgacgccuccaucucccaggucaacgagaagaucaaccagucccucgccuucauccgcaaguccgacgagcuccuccacaacgucaacgucggcaaguccaccaccaacaucaugaucaccaccaucaucaucgucaucaucgucauccuccuccuccucaucgccgucggccucuuccucuacugcaaggcccgcugaggacuagugcaucacauuuaaaagcaucucagccuaccaugagaauaagagaaagaaaaugaagaucaauagcuuauucaucucuuuuucuuuuucguugguguaaagccaacacccugucuaaaaaacauaaauuucuuuaaucauuuugccucuuuucucugugcuucaauuaauaaaaaauggaaagaaccuagaucuaaaaaaaaaaaaaaaaaaaaaaaaaaaaaaaaaaaaaaaaaaaaaaaaaaaaaaaaaaaaaaaaugcaucccccccccccccccccccccccccccccccaaaggcucuuuucagagccaccagaauu

SEQ ID NO: 13189 - RNA, 2044 nt, Artificial Sequence
  mRNA product Design i-2 comprising derived and/or modified sequence from HRSV(Memphis-37)__AIY60640.1__F-del_DSCav1 (opt3)
ggggcgcugccuacggagguggcagccaucuccuucucggcaucaagcuuaccauggagcugcccauccucaagaccaacgccauuacaacuauacuugcugcagugacgcugugcuucgccagcucccagaauaucaccgaagaguuuuaccaaucuacauguucagcggucaguaaaggcuauuugagcgcuuuaagaacugggugguacaccuccguuauuacaaucgaacugucuaacauuaaggagaauaaaugcaacggaaccgacgccaaggugaaacuaaucaagcaggaacucgauaaguauaaaaaugcaguaacugagcugcagcuucugaugcagucgaccccugccgcuaacaauagggcacggcgcgaguugccacgauucaugaacuacacacucaauaacacgaagaauaacaaugugacucugagcaaaaagcguaaaagaagguuucuggguuuccucuuaggcgucgggucagccauagcuaguggaaucgccguguguaagguucugcaccuugaaggcgaggugaacaagauuaaaaaugcguugcuguccaccaacaaggcagucgugucucuaagcaacgguguauccguucucacauuuaaagugcuggaccuuaagaauuauaucgauaaacaacuguugccgauucucaacaagcagucaugcaguaucagcaauauagaaacugucauugaguuccagcagaaaaacaaucggcuguuagagaucacccgcgaauuuucugugaacgccggggugacaacccccgucuccacguacaugcugacuaauucagagcuccuuagccugauuaacgacaugccuaucacaaaugaucaaaagaaguugaugaguaacaauguucagaucgugagacagcagucuuauuccauuauguguauaaucaaagaagagguacuagcuuacgugguccaacugccacucuacggagugauugacacccccugcuggaagcugcauacuagcccucuuuguacaaccaacacgaaagaaggcucgaauaucugccugaccaggacagaucggggcugguauugugacaacgccgggucuguuuccuucuuuccacaggcagagacuugcaaggugcagucaaaucgcgucuucugugauaccaugaacaguuugacacuccccagcgaggugaaccugugcaauauagacauuuuuaacccuaaauacgauugcaagaucaugacuuccaagaccgacguaucuagcucaguuaucacaaguuuaggagcuauuguguccuguuaugguaaaaccaagugcacugccagcaauaaaaaccgaggcaucauuaagacguucucuaaugggugugauuacgucucaaacaaaggaguggacacagucagugugggcaauacccuguauuacguuaacaagcaagaagguaagagccuauaugugaaaggggagccaauaaucaauuuuuacgacccgcucguauuccccuccgaugaguucgacgcgucuauuucgcaggucaacgaaaagaucaaucagagccuggccuuuaucagaaaauccgaugaacuuuugcacaacgugaauguuggaaagucaacuaccaacauuaugauaacaaccaucauuaucgugauuaucgucauacugcuccugcuuaucgcagugggccuguucuuguacugcaaagcuaggugaggacuagugcaucacauuuaaaagcaucucagccuaccaugagaauaagagaaagaaaaugaagaucaauagcuuauucaucucuuuuucuuuuucguugguguaaagccaacacccugucuaaaaaacauaaauuucuuuaaucauuuugccucuuuucucugugcuucaauuaauaaaaaauggaaagaaccuagaucuaaaaaaaaaaaaaaaaaaaaaaaaaaaaaaaaaaaaaaaaaaaaaaaaaaaaaaaaaaaaaaaaugcaucccccccccccccccccccccccccccccccaaaggcucuuuucagagccaccagaauu

SEQ ID NO: 13190 - RNA, 2044 nt, Artificial Sequence
  mRNA product Design i-2 comprising derived and/or modified sequence from HRSV(Memphis-37)__AIY60640.1__F-del_DSCav1 (opt4)
ggggcgcugccuacggagguggcagccaucuccuucucggcaucaagcuuaccauggagcugcccauccugaagaccaacgccaucaccaccauccuggccgccgugacccugugcuucgccagcagccagaacaucaccgaggaguucuaccagagcaccugcagcgccgugagcaagggcuaccugagcgcccugagaaccggcugguacaccagcgugaucaccaucgagcugagcaacaucaaggagaacaagugcaacggcaccgacgccaaggugaagcugaucaagcaggagcuggacaaguacaagaacgccgugaccgagcugcagcugcugaugcagagcacccccgccgccaacaacagagccagaagagagcugcccagauucaugaacuacacccugaacaacaccaagaacaacaacgugacccugagcaagaagagaaagagaagauuccugggcuuccugcugggcgugggcagcgccaucgccagcggcaucgccgugugcaaggugcugcaccuggagggcgaggugaacaagaucaagaacgcccugcugagcaccaacaaggccguggugagccugagcaacggcgugagcgugcugaccuucaaggugcuggaccugaagaacuacaucgacaagcagcugcugcccauccugaacaagcagagcugcagcaucagcaacaucgagaccgugaucgaguuccagcagaagaacaacagacugcuggagaucaccagagaguucagcgugaacgccggcgugaccacccccgugagcaccuacaugcugaccaacagcgagcugcugagccugaucaacgacaugcccaucaccaacgaccagaagaagcugaugagcaacaacgugcagaucgugagacagcagagcuacagcaucaugugcaucaucaaggaggaggugcuggccuacguggugcagcugccccuguacggcgugaucgacacccccugcuggaagcugcacaccagcccccugugcaccaccaacaccaaggagggcagcaacaucugccugaccagaaccgacagaggcugguacugcgacaacgccggcagcgugagcuucuucccccaggccgagaccugcaaggugcagagcaacagaguguucugcgacaccaugaacagccugacccugcccagcgaggugaaccugugcaacaucgacaucuucaaccccaaguacgacugcaagaucaugaccagcaagaccgacgugagcagcagcgugaucaccagccugggcgccaucgugagcugcuacggcaagaccaagugcaccgccagcaacaagaacagaggcaucaucaagaccuucagcaacggcugcgacuacgugagcaacaagggcguggacaccgugagcgugggcaacacccuguacuacgugaacaagcaggagggcaagagccuguacgugaagggcgagcccaucaucaacuucuacgacccccugguguuccccagcgacgaguucgacgccagcaucagccaggugaacgagaagaucaaccagagccuggccuucaucagaaagagcgacgagcugcugcacaacgugaacgugggcaagagcaccaccaacaucaugaucaccaccaucaucaucgugaucaucgugauccugcugcugcugaucgccgugggccuguuccuguacugcaaggccagaugaggacuagugcaucacauuuaaaagcaucucagccuaccaugagaauaagagaaagaaaaugaagaucaauagcuuauucaucucuuuuucuuuuucguugguguaaagccaacacccugucuaaaaaacauaaauuucuuuaaucauuuugccucuuuucucugugcuucaauuaauaaaaaauggaaagaaccuagaucuaaaaaaaaaaaaaaaaaaaaaaaaaaaaaaaaaaaaaaaaaaaaaaaaaaaaaaaaaaaaaaaaugcaucccccccccccccccccccccccccccccccaaaggcucuuuucagagccaccagaauu

SEQ ID NO: 13191 - RNA, 2044 nt, Artificial Sequence
  mRNA product Design i-2 comprising derived and/or modified sequence from HRSV(Memphis-37)__AIY60640.1__F-del_DSCav1 (opt5)
ggggcgcugccuacggagguggcagccaucuccuucucggcaucaagcuuaccauggagcugcccauccucaagaccaacgccauuacaacgauccuggcugccgugacccuuugcuucgcgagcucccagaauauuacagaagaguuuuaccaaucuaccuguagcgcugucuccaaaggcuaucugucugcccucagaacagggugguacaccagcguuaucacaauugaacuguccaacaucaaggagaauaaaugcaacggaaccgacgccaaggugaaacuuaucaagcaggaacuggauaaguauaaaaaugcugugacggagcuccagcugcugaugcagucuaccccugccgcuaacaaucgggcccgcagagagcucccgcgguucaugaacuacacacugaauaacaccaagaauaacaaugucacacuuagcaaaaagcgcaaaagacgguuucugggcuuccuccugggggugggauccgcgauugccagcggcaucgcuguuuguaaggugcuucaccuggaaggggaggucaacaagauuaaaaaugcccuccugucuaccaacaaggcugugguuucccugagcaacggagugucuguccucacguuuaaagugcuggaccuuaagaauuauaucgauaaacaacugcuccccauucugaacaagcaguccugcagcaucucuaauauugaaacagugaucgaguuccagcagaaaaacaaucgccuucuggagaucaccagagaauuuuccgucaacgccggcguuacaaccccugugagcaccuacaugcucacaaauuccgagcugcugucucucauuaacgacaugcccaucacgaaugaucaaaagaagcugaugagcaacaaugugcagauuguccggcagcaguccuauagcaucauguguauuaucaaagaagaggugcuugcguacguugugcaacugccucucuacggcgucaucgacacccccugcuggaagcugcauacaucuccucuuuguaccacaaacaccaaagaaggguccaauauuugccugacgcgcacagauagaggaugguauugugacaacgccggcagcgugucuuucuuuccgcaggcugagaccugcaagguucagagcaaucggguguucugugauaccaugaacucccucacacugcccucugaggucaaccugugcaauaucgacauuuuuaacccuaaauacgauugcaagaucaugaccagcaagacagacguguccagcucugucauuacgucccucggggccaucgugagcuguuauggaaaaaccaagugcacagcuucuaauaaaaaccgcggcaucauuaagaccuucuccaaugggugugauuacguuagcaacaaaggaguggacacagucuccgugggcaauacccuguauuacguuaacaagcaagaaggcaagucucuuuaugugaaaggggagcccaucauuaauuuuuacgacccucuggucuuccccagcgaugaguucgacgccuccaucucucaggugaacgaaaagauuaaucagagccucgccuuuaucagaaaauccgaugaacugcugcacaacgugaauguuggaaagagcacgaccaacauuaugaucacaaccaucauuaucgucauuaucgugauucuucuccugcugaucgcugugggccucuuccuguacugcaaagcgcggugaggacuagugcaucacauuuaaaagcaucucagccuaccaugagaauaagagaaagaaaaugaagaucaauagcuuauucaucucuuuuucuuuuucguugguguaaagccaacacccugucuaaaaaacauaaauuucuuuaaucauuuugccucuuuucucugugcuucaauuaauaaaaaauggaaagaaccuagaucuaaaaaaaaaaaaaaaaaaaaaaaaaaaaaaaaaaaaaaaaaaaaaaaaaaaaaaaaaaaaaaaaugcaucccccccccccccccccccccccccccccccaaaggcucuuuucagagccaccagaauu

SEQ ID NO: 13192 - RNA, 2044 nt, Artificial Sequence
  mRNA product Design i-2 comprising derived and/or modified sequence from HRSV(Memphis-37)__AIY60640.1__F-del_DSCav1 (opt6)
ggggcgcugccuacggagguggcagccaucuccuucucggcaucaagcuuaccauggaauuaccaauccuuaaaacaaacgcaauaacaaccauccucgcagcaguaacucucugcuucgcuucaucucaaaacaucacagaagaauuuuaccaaagcacaugcucagcuguauccaaagguuaucuaucagccuugagaaccggaugguacacaucaguaauaacaauugaacuaucaaacauuaaagaaaacaaaugcaacggcaccgacgcaaaaguaaaacuaaucaaacaagaacuagacaaauauaaaaaugcaguaacagaauuacaauuauuaaugcaauccacaccagcugcaaacaaccgagcccgaagagaacuaccaagauucaugaacuacacacuaaacaacaccaaaaauaacaacgucacccuaucuaaaaaacguaaaagaagauucuuaggauuccucuuaggagucggauccgcaauagcaagcggcauagccguauguaaaguccuacacuuagaaggugaagugaauaaaauaaaaaacgcccuauuaagcacuaacaaagcaguagucucccuaucaaacggaguuucaguacucacauucaaaguacucgaccucaaaaacuacaucgacaaacaacuuuuaccaauucuaaacaaacaaucaugcuccauaucuaauaucgaaaccgucaucgaauuucaacaaaaaaacaauagacuacuagaaauaacuagagaauuuucaguaaacgccggcguuacgacaccagucucuacauacauguuaaccaauucagaacucuuaucauuaaucaacgacaugccaauaacaaacgaccaaaaaaaacuaauguccaauaacguacaaauagucagacaacaaucauacucaauuaugugcauaauaaaagaagaaguacuagcuuacguaguacaacucccccuauacggcguaauagacacuccauguuggaaauuacacacaucaccauuauguaccaccaauacaaaagaaggcucaaacauaugccuaacaagaacagauagaggaugguauugcgacaacgcaggcucaguuuccuuuuucccccaagcagaaaccugcaaaguacaaucaaaucguguuuuuugcgacaccaugaacucacucacauuaccaucagaaguaaaccuaugcaacauagacauauucaacccaaaauacgacugcaaaaucaugacaucaaaaacagacguauccucuucaguaauuacuagcuuaggagcaauagucucuuguuauggaaaaacaaaaugcacagccaguaacaaaaaccgcggaauaauaaaaaccuucucaaacgguugcgauuacgucucuaacaaaggagucgacacaguaucaguaggcaauacauuauacuacguuaacaaacaagaaggaaaaucuuuauacgucaaaggagaacccauuauaaacuuuuacgacccauuagucuucccuuccgacgaauuugacgccagcauuucacaaguaaacgaaaaaauaaaccaaucacucgcauuuauaagaaaaucugacgaauuacuccacaacguaaacguaggaaaauccacaacaaacauaaugauaacaaccauaaucaucgucauaauagucauacuucuccuauuaauugcaguaggcuuauuccuauacuguaaagcacgauaaggacuagugcaucacauuuaaaagcaucucagccuaccaugagaauaagagaaagaaaaugaagaucaauagcuuauucaucucuuuuucuuuuucguugguguaaagccaacacccugucuaaaaaacauaaauuucuuuaaucauuuugccucuuuucucugugcuucaauuaauaaaaaauggaaagaaccuagaucuaaaaaaaaaaaaaaaaaaaaaaaaaaaaaaaaaaaaaaaaaaaaaaaaaaaaaaaaaaaaaaaaugcaucccccccccccccccccccccccccccccccaaaggcucuuuucagagccaccagaauu

SEQ ID NO: 13193 - RNA, 2044 nt, Artificial Sequence
  mRNA product Design i-2 comprising derived and/or modified sequence from HRSV(Memphis-37)__AIY60640.1__F-del_DSCav1 (opt11)
ggggcgcugccuacggagguggcagccaucuccuucucggcaucaagcuuaccauggaacuaccaauccuaaaaacuaacgcaaucaccacaauccucgccgccgucacccuuugcuuugcguccucccaaaacauuacugaagaguucuaccaauccacgugcuccgccgucuccaaagguuaccuauccgcccuuaggaccggcugguacaccagcgucaucaccaucgaacuuuccaacaucaaagaaaacaaauguaacggcaccgacgcaaaagucaaacuuauuaaacaggaacucgacaaauauaagaaugccgucaccgaauuacaacuccucaugcaauccacccccgccgccaacaaccgagcaaggcgcgaacucccucgauucaugaauuacacccucaacaauaccaaaaacaacaacgucacccuauccaagaaacgcaaaagacgcuucuugggcuuccuccucggcgugggcuccgcaauagccuccgguauugccgugugcaaagucuuacaccucgaaggcgaggucaacaaaaucaaaaacgcccuccucuccaccaacaaagccgucgucagccuauccaacggcguuuccguccucaccuucaaaguacucgaccucaaaaacuacaucgacaaacaacuccuacccauacuaaacaaacaauccugcuccauuuccaacaucgaaaccguaaucgaguuccaacagaaaaacaaucgccuccuagaaaucacacgugaauuuucaguuaacgccggaguaacaacuccuguaucuaccuacaugcucaccaauuccgaacuccucagccucauaaacgacaugccaauaacaaacgaccaaaagaaacucaugucuaacaacguacaaaucgucagacaacaaaguuacucaaucauguguaucaucaaagaggaaguccuagcauacgugguccaacucccccucuacggaguaaucgacaccccaugcuggaaacuacacaccagcccccucuguaccacaaacacgaaagaagguuccaacaucugccugacccgaaccgaccgcggcugguacugcgauaacgcuggcuccgucucauucuucccccaagcagaaaccugcaaaguacaauccaaccgaguauucugcgacaccaugaacucacucacccuccccagcgaaguaaaccucugcaacaucgacauauucaacccaaaauacgacugcaaaauuaugaccucuaaaacagacguauccuccucuguaaucacaucccucggggccaucgucuccugcuacggcaaaaccaaaugcaccgccuccaacaaaaaccgcggaaucauaaaaaccuucuccaacggaugcgacuacgucucaaauaaaggcgucgacaccgucuccgucggcaacacgcuauacuacgucaacaaacaagaaggcaaaucacucuacgucaaaggugagcccaucaucaauuucuacgauccccucgucuucccaagcgacgaguucgacgccagcauaucccaaguaaacgagaaaaucaaccaaagccuggccuucauccgcaaauccgacgaacuacuacacaacguaaacguaggcaaguccacuaccaacauaaugaucaccacaaucaucauagucauaaucguuauacuacuccugcucaucgccguaggccucuuccucuauugcaaagcccgauagggacuagugcaucacauuuaaaagcaucucagccuaccaugagaauaagagaaagaaaaugaagaucaauagcuuauucaucucuuuuucuuuuucguugguguaaagccaacacccugucuaaaaaacauaaauuucuuuaaucauuuugccucuuuucucugugcuucaauuaauaaaaaauggaaagaaccuagaucuaaaaaaaaaaaaaaaaaaaaaaaaaaaaaaaaaaaaaaaaaaaaaaaaaaaaaaaaaaaaaaaaugcaucccccccccccccccccccccccccccccccaaaggcucuuuucagagccaccagaauu

SEQ ID NO: 13194 - RNA, 1879 nt, Artificial Sequence
  mRNA product Design i-3 comprising derived and/or modified sequence from HRSV(Memphis-37)__AIY60640.1__F-del_DSCav1 (opt1)
gggagaaagcuuaccauggagcugcccauccucaagaccaacgccaucaccacgauccuggccgcggugacccugugcuucgccagcucccagaacaucaccgaggaguucuaccagagcacgugcuccgccgucagcaagggcuaccucuccgcccugcgcaccgggugguacaccagcgugaucaccaucgagcuguccaacaucaaggagaacaagugcaacggcaccgacgccaaggugaagcucaucaagcaggagcuggacaaguacaagaacgcggucacggagcugcagcuccugaugcagagcaccccggccgccaacaaccgggcccgccgggagcugccccgcuucaugaacuacacccucaacaacaccaagaacaacaacgugacgcuguccaagaagcggaagcgccgguuccugggguuccuccugggcguggggagcgcgaucgccuccggcaucgccgucugcaaggugcugcaccucgagggcgaggugaacaagaucaagaacgcccugcuguccaccaacaaggccgucgugagccucuccaacggggugagcguccugaccuucaaggugcuggaccucaagaacuacaucgacaagcagcugcugcccauccugaacaagcagagcugcuccaucagcaacaucgagaccgucaucgaguuccagcagaagaacaaccgccuccuggagaucacgcgggaguucagcgugaacgcgggcgugaccacccccgucuccaccuacaugcugacgaacagcgagcuccugucccugaucaacgacaugccgaucaccaacgaccagaagaagcucaugagcaacaacgugcagaucgugcgccagcaguccuacagcaucaugugcaucaucaaggaggagguccuggccuacguggugcagcugccccucuacggggucaucgacacccccugcuggaagcugcacaccagcccccugugcacgaccaacaccaaggagggcuccaacaucugccucacccggacggaccgcgggugguacugcgacaacgccggcagcguguccuucuucccgcaggccgagaccugcaagguccagagcaaccggguguucugcgacaccaugaacucccugacccugcccagcgaggugaaccucugcaacaucgacaucuucaaccccaaguacgacugcaagaucaugacguccaagaccgacgucagcuccagcgugaucaccucccugggcgccaucgugagcugcuacgggaagaccaagugcacggcgagcaacaagaaccgcggcaucaucaagaccuucuccaacgggugcgacuacgucagcaacaagggcguggacaccguguccgucggcaacacccuguacuacgugaacaagcaggagggcaagagccucuacgugaagggggagcccaucaucaacuucuacgacccgcuggucuuccccuccgacgaguucgacgccagcaucucccaggugaacgagaagaucaaccagagccuggccuucauccggaaguccgacgagcuccugcacaacgugaacgucggcaagagcaccacgaacaucaugaucaccaccaucaucaucgugaucaucgugauccugcugcuccugaucgccgucgggcuguuccucuacugcaaggcccgcugaggacuaguuauaagacugacuagcccgaugggccucccaacgggcccuccuccccuccuugcaccgagauuaauaaaaaaaaaaaaaaaaaaaaaaaaaaaaaaaaaaaaaaaaaaaaaaaaaaaaaaaaaaaaaaaaugcaucccccccccccccccccccccccccccccccaaaggcucuuuucagagccaccagaauu

SEQ ID NO: 13195 - RNA, 1879 nt, Artificial Sequence
  mRNA product Design i-3 comprising derived and/or modified sequence from HRSV(Memphis-37)__AIY60640.1__F-del_DSCav1 (opt1)
gggagaaagcuuaccauggagcugcccauccucaagaccaacgccaucaccacgauccuggccgcggugacccugugcuucgccagcucccagaacaucaccgaggaguucuaccagagcacgugcuccgccgucagcaagggcuaccucuccgcccugcgcaccgggugguacaccagcgugaucaccaucgagcuguccaacaucaaggagaacaagugcaacggcaccgacgccaaggugaagcucaucaagcaggagcuggacaaguacaagaacgcggucacggagcugcagcuccugaugcagagcaccccggccgccaacaaccgggcccgccgggagcugccccgcuucaugaacuacacccucaacaacaccaagaacaacaacgugacgcuguccaagaagcggaagcgccgguuccugggguuccuccugggcguggggagcgcgaucgccuccggcaucgccgucugcaaggugcugcaccucgagggcgaggugaacaagaucaagaacgcccugcugagcaccaacaaggccgucgugucccucagcaacgggguguccguccugaccuucaaggugcuggaccucaagaacuacaucgacaagcagcugcugcccauccucaacaagcagagcugcuccaucagcaacaucgagaccgugaucgaguuccagcagaagaacaaccgccugcuggagaucacgcgggaguucuccgucaacgcgggcgugaccacccccgugagcaccuacaugcucacgaacagcgagcugcugucccucaucaacgacaugccgaucaccaacgaccagaagaagcugaugagcaacaacguccagaucgugcgccagcaguccuacagcaucaugugcaucaucaaggaggaggugcuggccuacgucgugcagcucccccuguacggggugaucgacacccccugcuggaagcugcacaccagcccccucugcacgaccaacaccaaggagggcagcaacaucugccugacccggacggaccgcgggugguacugcgacaacgccggcuccgucagcuucuucccgcaggccgagaccugcaaggugcaguccaaccgggucuucugcgacaccaugaacagccugacccuccccuccgaggugaaccugugcaacaucgacaucuucaaccccaaguacgacugcaagaucaugacgagcaagaccgacguguccagcuccgucaucaccagccugggcgccaucguguccugcuacgggaagaccaagugcacggcgagcaacaagaaccgcggcaucaucaagaccuucuccaacgggugcgacuacgugagcaacaagggcgucgacaccgugagcgugggcaacacccucuacuacgucaacaagcaggaggggaagucccuguacgugaagggcgagcccaucaucaacuucuacgacccgcugguguuccccagcgacgaguucgacgccuccaucagccaggucaacgagaagaucaaccagucccucgccuucauccggaaguccgacgagcugcugcacaacgugaacguggggaaguccaccacgaacaucaugaucaccaccaucaucaucgucaucaucgugauccugcuccugcugaucgccgugggccucuuccuguacugcaaggcccgcugaggacuaguuauaagacugacuagcccgaugggccucccaacgggcccuccuccccuccuugcaccgagauuaauaaaaaaaaaaaaaaaaaaaaaaaaaaaaaaaaaaaaaaaaaaaaaaaaaaaaaaaaaaaaaaaaugcaucccccccccccccccccccccccccccccccaaaggcucuuuucagagccaccagaauu

SEQ ID NO: 13196 - RNA, 1879 nt, Artificial Sequence
  mRNA product Design i-3 comprising derived and/or modified sequence from HRSV(Memphis-37)__AIY60640.1__F-del_DSCav1 (opt2)
gggagaaagcuuaccauggagcuccccauccucaagaccaacgccaucaccaccauccucgccgccgucacccucugcuucgccuccucccagaacaucaccgaggaguucuaccaguccaccugcuccgccgucuccaagggcuaccucuccgcccuccgcaccggcugguacaccuccgucaucaccaucgagcucuccaacaucaaggagaacaagugcaacggcaccgacgccaaggucaagcucaucaagcaggagcucgacaaguacaagaacgccgucaccgagcuccagcuccucaugcaguccacccccgccgccaacaaccgcgcccgccgcgagcucccccgcuucaugaacuacacccucaacaacaccaagaacaacaacgucacccucuccaagaagcgcaagcgccgcuuccucggcuuccuccucggcgucggcuccgccaucgccuccggcaucgccgucugcaagguccuccaccucgagggcgaggucaacaagaucaagaacgcccuccucuccaccaacaaggccgucgucucccucuccaacggcgucuccguccucaccuucaagguccucgaccucaagaacuacaucgacaagcagcuccuccccauccucaacaagcaguccugcuccaucuccaacaucgagaccgucaucgaguuccagcagaagaacaaccgccuccucgagaucacccgcgaguucuccgucaacgccggcgucaccacccccgucuccaccuacaugcucaccaacuccgagcuccucucccucaucaacgacaugcccaucaccaacgaccagaagaagcucauguccaacaacguccagaucguccgccagcaguccuacuccaucaugugcaucaucaaggaggagguccucgccuacgucguccagcucccccucuacggcgucaucgacacccccugcuggaagcuccacaccuccccccucugcaccaccaacaccaaggagggcuccaacaucugccucacccgcaccgaccgcggcugguacugcgacaacgccggcuccgucuccuucuucccccaggccgagaccugcaagguccaguccaaccgcgucuucugcgacaccaugaacucccucacccuccccuccgaggucaaccucugcaacaucgacaucuucaaccccaaguacgacugcaagaucaugaccuccaagaccgacgucuccuccuccgucaucaccucccucggcgccaucgucuccugcuacggcaagaccaagugcaccgccuccaacaagaaccgcggcaucaucaagaccuucuccaacggcugcgacuacgucuccaacaagggcgucgacaccgucuccgucggcaacacccucuacuacgucaacaagcaggagggcaagucccucuacgucaagggcgagcccaucaucaacuucuacgacccccucgucuuccccuccgacgaguucgacgccuccaucucccaggucaacgagaagaucaaccagucccucgccuucauccgcaaguccgacgagcuccuccacaacgucaacgucggcaaguccaccaccaacaucaugaucaccaccaucaucaucgucaucaucgucauccuccuccuccucaucgccgucggccucuuccucuacugcaaggcccgcugaggacuaguuauaagacugacuagcccgaugggccucccaacgggcccuccuccccuccuugcaccgagauuaauaaaaaaaaaaaaaaaaaaaaaaaaaaaaaaaaaaaaaaaaaaaaaaaaaaaaaaaaaaaaaaaaugcaucccccccccccccccccccccccccccccccaaaggcucuuuucagagccaccagaauu

SEQ ID NO: 13197 - RNA, 1879 nt, Artificial Sequence
  mRNA product Design i-3 comprising derived and/or modified sequence from HRSV(Memphis-37)__AIY60640.1__F-del_DSCav1 (opt3)
gggagaaagcuuaccauggagcugcccauccucaagaccaacgccauuacaacuauacuugcugcagugacgcugugcuucgccagcucccagaauaucaccgaagaguuuuaccaaucuacauguucagcggucaguaaaggcuauuugagcgcuuuaagaacugggugguacaccuccguuauuacaaucgaacugucuaacauuaaggagaauaaaugcaacggaaccgacgccaaggugaaacuaaucaagcaggaacucgauaaguauaaaaaugcaguaacugagcugcagcuucugaugcagucgaccccugccgcuaacaauagggcacggcgcgaguugccacgauucaugaacuacacacucaauaacacgaagaauaacaaugugacucugagcaaaaagcguaaaagaagguuucuggguuuccucuuaggcgucgggucagccauagcuaguggaaucgccguguguaagguucugcaccuugaaggcgaggugaacaagauuaaaaaugcguugcuguccaccaacaaggcagucgugucucuaagcaacgguguauccguucucacauuuaaagugcuggaccuuaagaauuauaucgauaaacaacuguugccgauucucaacaagcagucaugcaguaucagcaauauagaaacugucauugaguuccagcagaaaaacaaucggcuguuagagaucacccgcgaauuuucugugaacgccggggugacaacccccgucuccacguacaugcugacuaauucagagcuccuuagccugauuaacgacaugccuaucacaaaugaucaaaagaaguugaugaguaacaauguucagaucgugagacagcagucuuauuccauuauguguauaaucaaagaagagguacuagcuuacgugguccaacugccacucuacggagugauugacacccccugcuggaagcugcauacuagcccucuuuguacaaccaacacgaaagaaggcucgaauaucugccugaccaggacagaucggggcugguauugugacaacgccgggucuguuuccuucuuuccacaggcagagacuugcaaggugcagucaaaucgcgucuucugugauaccaugaacaguuugacacuccccagcgaggugaaccugugcaauauagacauuuuuaacccuaaauacgauugcaagaucaugacuuccaagaccgacguaucuagcucaguuaucacaaguuuaggagcuauuguguccuguuaugguaaaaccaagugcacugccagcaauaaaaaccgaggcaucauuaagacguucucuaaugggugugauuacgucucaaacaaaggaguggacacagucagugugggcaauacccuguauuacguuaacaagcaagaagguaagagccuauaugugaaaggggagccaauaaucaauuuuuacgacccgcucguauuccccuccgaugaguucgacgcgucuauuucgcaggucaacgaaaagaucaaucagagccuggccuuuaucagaaaauccgaugaacuuuugcacaacgugaauguuggaaagucaacuaccaacauuaugauaacaaccaucauuaucgugauuaucgucauacugcuccugcuuaucgcagugggccuguucuuguacugcaaagcuaggugaggacuaguuauaagacugacuagcccgaugggccucccaacgggcccuccuccccuccuugcaccgagauuaauaaaaaaaaaaaaaaaaaaaaaaaaaaaaaaaaaaaaaaaaaaaaaaaaaaaaaaaaaaaaaaaaugcaucccccccccccccccccccccccccccccccaaaggcucuuuucagagccaccagaauu

SEQ ID NO: 13198 - RNA, 1879 nt, Artificial Sequence
  mRNA product Design i-3 comprising derived and/or modified sequence from HRSV(Memphis-37)__AIY60640.1__F-del_DSCav1 (opt4)
gggagaaagcuuaccauggagcugcccauccugaagaccaacgccaucaccaccauccuggccgccgugacccugugcuucgccagcagccagaacaucaccgaggaguucuaccagagcaccugcagcgccgugagcaagggcuaccugagcgcccugagaaccggcugguacaccagcgugaucaccaucgagcugagcaacaucaaggagaacaagugcaacggcaccgacgccaaggugaagcugaucaagcaggagcuggacaaguacaagaacgccgugaccgagcugcagcugcugaugcagagcacccccgccgccaacaacagagccagaagagagcugcccagauucaugaacuacacccugaacaacaccaagaacaacaacgugacccugagcaagaagagaaagagaagauuccugggcuuccugcugggcgugggcagcgccaucgccagcggcaucgccgugugcaaggugcugcaccuggagggcgaggugaacaagaucaagaacgcccugcugagcaccaacaaggccguggugagccugagcaacggcgugagcgugcugaccuucaaggugcuggaccugaagaacuacaucgacaagcagcugcugcccauccugaacaagcagagcugcagcaucagcaacaucgagaccgugaucgaguuccagcagaagaacaacagacugcuggagaucaccagagaguucagcgugaacgccggcgugaccacccccgugagcaccuacaugcugaccaacagcgagcugcugagccugaucaacgacaugcccaucaccaacgaccagaagaagcugaugagcaacaacgugcagaucgugagacagcagagcuacagcaucaugugcaucaucaaggaggaggugcuggccuacguggugcagcugccccuguacggcgugaucgacacccccugcuggaagcugcacaccagcccccugugcaccaccaacaccaaggagggcagcaacaucugccugaccagaaccgacagaggcugguacugcgacaacgccggcagcgugagcuucuucccccaggccgagaccugcaaggugcagagcaacagaguguucugcgacaccaugaacagccugacccugcccagcgaggugaaccugugcaacaucgacaucuucaaccccaaguacgacugcaagaucaugaccagcaagaccgacgugagcagcagcgugaucaccagccugggcgccaucgugagcugcuacggcaagaccaagugcaccgccagcaacaagaacagaggcaucaucaagaccuucagcaacggcugcgacuacgugagcaacaagggcguggacaccgugagcgugggcaacacccuguacuacgugaacaagcaggagggcaagagccuguacgugaagggcgagcccaucaucaacuucuacgacccccugguguuccccagcgacgaguucgacgccagcaucagccaggugaacgagaagaucaaccagagccuggccuucaucagaaagagcgacgagcugcugcacaacgugaacgugggcaagagcaccaccaacaucaugaucaccaccaucaucaucgugaucaucgugauccugcugcugcugaucgccgugggccuguuccuguacugcaaggccagaugaggacuaguuauaagacugacuagcccgaugggccucccaacgggcccuccuccccuccuugcaccgagauuaauaaaaaaaaaaaaaaaaaaaaaaaaaaaaaaaaaaaaaaaaaaaaaaaaaaaaaaaaaaaaaaaaugcaucccccccccccccccccccccccccccccccaaaggcucuuuucagagccaccagaauu

SEQ ID NO: 13199 - RNA, 1879 nt, Artificial Sequence
  mRNA product Design i-3 comprising derived and/or modified sequence from HRSV(Memphis-37)__AIY60640.1__F-del_DSCav1 (opt5)
gggagaaagcuuaccauggagcugcccauccucaagaccaacgccauuacaacgauccuggcugccgugacccuuugcuucgcgagcucccagaauauuacagaagaguuuuaccaaucuaccuguagcgcugucuccaaaggcuaucugucugcccucagaacagggugguacaccagcguuaucacaauugaacuguccaacaucaaggagaauaaaugcaacggaaccgacgccaaggugaaacuuaucaagcaggaacuggauaaguauaaaaaugcugugacggagcuccagcugcugaugcagucuaccccugccgcuaacaaucgggcccgcagagagcucccgcgguucaugaacuacacacugaauaacaccaagaauaacaaugucacacuuagcaaaaagcgcaaaagacgguuucugggcuuccuccugggggugggauccgcgauugccagcggcaucgcuguuuguaaggugcuucaccuggaaggggaggucaacaagauuaaaaaugcccuccugucuaccaacaaggcugugguuucccugagcaacggagugucuguccucacguuuaaagugcuggaccuuaagaauuauaucgauaaacaacugcuccccauucugaacaagcaguccugcagcaucucuaauauugaaacagugaucgaguuccagcagaaaaacaaucgccuucuggagaucaccagagaauuuuccgucaacgccggcguuacaaccccugugagcaccuacaugcucacaaauuccgagcugcugucucucauuaacgacaugcccaucacgaaugaucaaaagaagcugaugagcaacaaugugcagauuguccggcagcaguccuauagcaucauguguauuaucaaagaagaggugcuugcguacguugugcaacugccucucuacggcgucaucgacacccccugcuggaagcugcauacaucuccucuuuguaccacaaacaccaaagaaggguccaauauuugccugacgcgcacagauagaggaugguauugugacaacgccggcagcgugucuuucuuuccgcaggcugagaccugcaagguucagagcaaucggguguucugugauaccaugaacucccucacacugcccucugaggucaaccugugcaauaucgacauuuuuaacccuaaauacgauugcaagaucaugaccagcaagacagacguguccagcucugucauuacgucccucggggccaucgugagcuguuauggaaaaaccaagugcacagcuucuaauaaaaaccgcggcaucauuaagaccuucuccaaugggugugauuacguuagcaacaaaggaguggacacagucuccgugggcaauacccuguauuacguuaacaagcaagaaggcaagucucuuuaugugaaaggggagcccaucauuaauuuuuacgacccucuggucuuccccagcgaugaguucgacgccuccaucucucaggugaacgaaaagauuaaucagagccucgccuuuaucagaaaauccgaugaacugcugcacaacgugaauguuggaaagagcacgaccaacauuaugaucacaaccaucauuaucgucauuaucgugauucuucuccugcugaucgcugugggccucuuccuguacugcaaagcgcggugaggacuaguuauaagacugacuagcccgaugggccucccaacgggcccuccuccccuccuugcaccgagauuaauaaaaaaaaaaaaaaaaaaaaaaaaaaaaaaaaaaaaaaaaaaaaaaaaaaaaaaaaaaaaaaaaugcaucccccccccccccccccccccccccccccccaaaggcucuuuucagagccaccagaauu

SEQ ID NO: 13200 - RNA, 1879 nt, Artificial Sequence
  mRNA product Design i-3 comprising derived and/or modified sequence from HRSV(Memphis-37)__AIY60640.1__F-del_DSCav1 (opt6)
gggagaaagcuuaccauggaauuaccaauccuuaaaacaaacgcaauaacaaccauccucgcagcaguaacucucugcuucgcuucaucucaaaacaucacagaagaauuuuaccaaagcacaugcucagcuguauccaaagguuaucuaucagccuugagaaccggaugguacacaucaguaauaacaauugaacuaucaaacauuaaagaaaacaaaugcaacggcaccgacgcaaaaguaaaacuaaucaaacaagaacuagacaaauauaaaaaugcaguaacagaauuacaauuauuaaugcaauccacaccagcugcaaacaaccgagcccgaagagaacuaccaagauucaugaacuacacacuaaacaacaccaaaaauaacaacgucacccuaucuaaaaaacguaaaagaagauucuuaggauuccucuuaggagucggauccgcaauagcaagcggcauagccguauguaaaguccuacacuuagaaggugaagugaauaaaauaaaaaacgcccuauuaagcacuaacaaagcaguagucucccuaucaaacggaguuucaguacucacauucaaaguacucgaccucaaaaacuacaucgacaaacaacuuuuaccaauucuaaacaaacaaucaugcuccauaucuaauaucgaaaccgucaucgaauuucaacaaaaaaacaauagacuacuagaaauaacuagagaauuuucaguaaacgccggcguuacgacaccagucucuacauacauguuaaccaauucagaacucuuaucauuaaucaacgacaugccaauaacaaacgaccaaaaaaaacuaauguccaauaacguacaaauagucagacaacaaucauacucaauuaugugcauaauaaaagaagaaguacuagcuuacguaguacaacucccccuauacggcguaauagacacuccauguuggaaauuacacacaucaccauuauguaccaccaauacaaaagaaggcucaaacauaugccuaacaagaacagauagaggaugguauugcgacaacgcaggcucaguuuccuuuuucccccaagcagaaaccugcaaaguacaaucaaaucguguuuuuugcgacaccaugaacucacucacauuaccaucagaaguaaaccuaugcaacauagacauauucaacccaaaauacgacugcaaaaucaugacaucaaaaacagacguauccucuucaguaauuacuagcuuaggagcaauagucucuuguuauggaaaaacaaaaugcacagccaguaacaaaaaccgcggaauaauaaaaaccuucucaaacgguugcgauuacgucucuaacaaaggagucgacacaguaucaguaggcaauacauuauacuacguuaacaaacaagaaggaaaaucuuuauacgucaaaggagaacccauuauaaacuuuuacgacccauuagucuucccuuccgacgaauuugacgccagcauuucacaaguaaacgaaaaaauaaaccaaucacucgcauuuauaagaaaaucugacgaauuacuccacaacguaaacguaggaaaauccacaacaaacauaaugauaacaaccauaaucaucgucauaauagucauacuucuccuauuaauugcaguaggcuuauuccuauacuguaaagcacgauaaggacuaguuauaagacugacuagcccgaugggccucccaacgggcccuccuccccuccuugcaccgagauuaauaaaaaaaaaaaaaaaaaaaaaaaaaaaaaaaaaaaaaaaaaaaaaaaaaaaaaaaaaaaaaaaaugcaucccccccccccccccccccccccccccccccaaaggcucuuuucagagccaccagaauu

SEQ ID NO: 13201 - RNA, 1879 nt, Artificial Sequence
  mRNA product Design i-3 comprising derived and/or modified sequence from HRSV(Memphis-37)__AIY60640.1__F-del_DSCav1 (opt11)
gggagaaagcuuaccauggaacuaccaauccuaaaaacuaacgcaaucaccacaauccucgccgccgucacccuuugcuuugcguccucccaaaacauuacugaagaguucuaccaauccacgugcuccgccgucuccaaagguuaccuauccgcccuuaggaccggcugguacaccagcgucaucaccaucgaacuuuccaacaucaaagaaaacaaauguaacggcaccgacgcaaaagucaaacuuauuaaacaggaacucgacaaauauaagaaugccgucaccgaauuacaacuccucaugcaauccacccccgccgccaacaaccgagcaaggcgcgaacucccucgauucaugaauuacacccucaacaauaccaaaaacaacaacgucacccuauccaagaaacgcaaaagacgcuucuugggcuuccuccucggcgugggcuccgcaauagccuccgguauugccgugugcaaagucuuacaccucgaaggcgaggucaacaaaaucaaaaacgcccuccucuccaccaacaaagccgucgucagccuauccaacggcguuuccguccucaccuucaaaguacucgaccucaaaaacuacaucgacaaacaacuccuacccauacuaaacaaacaauccugcuccauuuccaacaucgaaaccguaaucgaguuccaacagaaaaacaaucgccuccuagaaaucacacgugaauuuucaguuaacgccggaguaacaacuccuguaucuaccuacaugcucaccaauuccgaacuccucagccucauaaacgacaugccaauaacaaacgaccaaaagaaacucaugucuaacaacguacaaaucgucagacaacaaaguuacucaaucauguguaucaucaaagaggaaguccuagcauacgugguccaacucccccucuacggaguaaucgacaccccaugcuggaaacuacacaccagcccccucuguaccacaaacacgaaagaagguuccaacaucugccugacccgaaccgaccgcggcugguacugcgauaacgcuggcuccgucucauucuucccccaagcagaaaccugcaaaguacaauccaaccgaguauucugcgacaccaugaacucacucacccuccccagcgaaguaaaccucugcaacaucgacauauucaacccaaaauacgacugcaaaauuaugaccucuaaaacagacguauccuccucuguaaucacaucccucggggccaucgucuccugcuacggcaaaaccaaaugcaccgccuccaacaaaaaccgcggaaucauaaaaaccuucuccaacggaugcgacuacgucucaaauaaaggcgucgacaccgucuccgucggcaacacgcuauacuacgucaacaaacaagaaggcaaaucacucuacgucaaaggugagcccaucaucaauuucuacgauccccucgucuucccaagcgacgaguucgacgccagcauaucccaaguaaacgagaaaaucaaccaaagccuggccuucauccgcaaauccgacgaacuacuacacaacguaaacguaggcaaguccacuaccaacauaaugaucaccacaaucaucauagucauaaucguuauacuacuccugcucaucgccguaggccucuuccucuauugcaaagcccgauagggacuaguuauaagacugacuagcccgaugggccucccaacgggcccuccuccccuccuugcaccgagauuaauaaaaaaaaaaaaaaaaaaaaaaaaaaaaaaaaaaaaaaaaaaaaaaaaaaaaaaaaaaaaaaaaugcaucccccccccccccccccccccccccccccccaaaggcucuuuucagagccaccagaauu

SEQ ID NO: 13202 - protein, 535 aa, Artificial Sequence
  derived and/or modified protein sequence (artificial) from HRSV(Memphis-37)__AIY60640.1__F_DSCav1_mut0
MELPILKTNAITTILAAVTLCFASSQNITEEFYQSTCSAVSKGYLSALRTGWYTSVITIELSNIKENKCNGTDAKVKLIKQELDKYKNAVTELQLLMQSTPAAGSGSAIASGIAVCKVLHLEGEVNKIKNALLSTNKAVVSLSNGVSVLTFKVLDLKNYIDKQLLPILNKQSCSISNIETVIEFQQKNNRLLEITREFSVNAGVTTPVSTYMLTNSELLSLINDMPITNDQKKLMSNNVQIVRQQSYSIMCIIKEEVLAYVVQLPLYGVIDTPCWKLHTSPLCTTNTKEGSNICLTRTDRGWYCDNAGSVSFFPQAETCKVQSNRVFCDTMNSRTLPSEVNLCNIDIFNPKYDCKIMTSKTDVSSSVITSLGAIVSCYGKTKCTASNKNRGIIKTFSNGCDYVSNKGVDTVSVGNTLYYVNKQEGKSLYVKGEPIINFYDPLVFPSDEFDASISQVNEKINQSLAFIRKSDELLHNVNVGKSTTNIMITTIIIVIIVILLLLIAVGLFLYCKARSTPVTLSKDQLSGINNIAFSN

SEQ ID NO: 13203 - RNA, 1608 nt, Artificial Sequence
  derived and/or modified CDS sequence (opt1) from HRSV(Memphis-37)__AIY60640.1__F_DSCav1_mut0
auggagcugcccauccucaagaccaacgccaucaccacgauccuggccgcggugacccugugcuucgccagcucccagaacaucaccgaggaguucuaccagagcacgugcuccgccgucagcaagggcuaccucuccgcccugcgcaccgggugguacaccagcgugaucaccaucgagcuguccaacaucaaggagaacaagugcaacggcaccgacgccaaggugaagcucaucaagcaggagcuggacaaguacaagaacgcggucacggagcugcagcuccugaugcagagcaccccggccgccggcuccgggagcgcgaucgccuccggcaucgccgucugcaaggugcugcaccucgagggcgaggugaacaagaucaagaacgcccugcuguccaccaacaaggccgucgugagccucuccaacggggugagcguccugaccuucaaggugcuggaccucaagaacuacaucgacaagcagcugcugcccauccugaacaagcagagcugcuccaucagcaacaucgagaccgucaucgaguuccagcagaagaacaaccgccuccuggagaucacgcgggaguucagcgugaacgcgggcgugaccacccccgucuccaccuacaugcugacgaacagcgagcuccugucccugaucaacgacaugccgaucaccaacgaccagaagaagcucaugagcaacaacgugcagaucgugcgccagcaguccuacagcaucaugugcaucaucaaggaggagguccuggccuacguggugcagcugccccucuacggggucaucgacacccccugcuggaagcugcacaccagcccccugugcacgaccaacaccaaggagggcuccaacaucugccucacccggacggaccgcgggugguacugcgacaacgccggcagcguguccuucuucccgcaggccgagaccugcaagguccagagcaaccggguguucugcgacaccaugaacucccggacccugcccagcgaggugaaccucugcaacaucgacaucuucaaccccaaguacgacugcaagaucaugacguccaagaccgacgucagcuccagcgugaucaccucccugggcgccaucgugagcugcuacgggaagaccaagugcacggcgagcaacaagaaccgcggcaucaucaagaccuucuccaacgggugcgacuacgucagcaacaagggcguggacaccguguccgucggcaacacccuguacuacgugaacaagcaggagggcaagagccucuacgugaagggggagcccaucaucaacuucuacgacccgcuggucuuccccuccgacgaguucgacgccagcaucucccaggugaacgagaagaucaaccagagccuggccuucauccggaaguccgacgagcuccugcacaacgugaacgucggcaagagcaccacgaacaucaugaucaccaccaucaucaucgugaucaucgugauccugcugcuccugaucgccgucgggcuguuccucuacugcaaggcccgcuccacccccgugacgcugagcaaggaccagcuguccgggaucaacaacaucgcguucagcaacuga

SEQ ID NO: 13204 - RNA, 1608 nt, Artificial Sequence
  derived and/or modified CDS sequence (opt1) from HRSV(Memphis-37)__AIY60640.1__F_DSCav1_mut0
auggagcugcccauccucaagaccaacgccaucaccacgauccuggccgcggugacccugugcuucgccagcucccagaacaucaccgaggaguucuaccagagcacgugcuccgccgucagcaagggcuaccucuccgcccugcgcaccgggugguacaccagcgugaucaccaucgagcuguccaacaucaaggagaacaagugcaacggcaccgacgccaaggugaagcucaucaagcaggagcuggacaaguacaagaacgcggucacggagcugcagcuccugaugcagagcaccccggccgccggguccggcagcgccaucgcguccgggaucgccgugugcaaggugcugcaccucgagggcgaggucaacaagaucaagaacgcccugcugagcaccaacaaggccguggugucccucagcaacggcgucuccgugcugaccuucaaggugcuggaccucaagaacuacaucgacaagcagcugcugcccauccucaacaagcagagcugcuccaucagcaacaucgagacggucaucgaguuccagcagaagaacaaccggcugcuggagaucacccgcgaguucuccgugaacgccggggugaccacccccgucagcacguacaugcucaccaacagcgagcugcugucccucaucaacgacaugcccaucaccaacgaccagaagaagcugaugagcaacaacgugcagaucgugcggcagcaguccuacagcaucaugugcaucaucaaggaggagguccuggcguacguggugcagcucccgcuguacggcgucaucgacacccccugcuggaagcugcacacgagcccccucugcaccaccaacaccaaggagggguccaacaucugccugacgcgcaccgaccggggcugguacugcgacaacgccggguccgugagcuucuucccccaggccgagaccugcaaggugcaguccaaccgcgucuucugcgacaccaugaacagccggacgcucccguccgaggugaaccugugcaacaucgacaucuucaaccccaaguacgacugcaagaucaugaccagcaagaccgacgucuccagcuccgugaucaccagccugggcgccaucguguccugcuacggcaagacgaagugcaccgccagcaacaagaaccgggggaucaucaagaccuucuccaacggcugcgacuacgucagcaacaaggggguggacaccgugagcgucggcaacacgcucuacuacgugaacaagcaggagggcaagucccuguacgugaagggggagcccaucaucaacuucuacgacccccuggucuucccgagcgacgaguucgacgcguccaucagccaggugaacgagaagaucaaccagucccucgccuucauccgcaagagcgacgagcugcugcacaacgugaacgucggcaaguccaccaccaacaucaugaucaccaccaucaucaucgugaucaucgugauccuccugcugcucaucgccgucgggcuguuccuguacugcaaggcccggagcacgcccgugacccuguccaaggaccagcucagcggcaucaacaacaucgccuucuccaacuga

SEQ ID NO: 13205 - RNA, 1608 nt, Artificial Sequence
  derived and/or modified CDS sequence (opt2) from HRSV(Memphis-37)__AIY60640.1__F_DSCav1_mut0
auggagcuccccauccucaagaccaacgccaucaccaccauccucgccgccgucacccucugcuucgccuccucccagaacaucaccgaggaguucuaccaguccaccugcuccgccgucuccaagggcuaccucuccgcccuccgcaccggcugguacaccuccgucaucaccaucgagcucuccaacaucaaggagaacaagugcaacggcaccgacgccaaggucaagcucaucaagcaggagcucgacaaguacaagaacgccgucaccgagcuccagcuccucaugcaguccacccccgccgccggcuccggcuccgccaucgccuccggcaucgccgucugcaagguccuccaccucgagggcgaggucaacaagaucaagaacgcccuccucuccaccaacaaggccgucgucucccucuccaacggcgucuccguccucaccuucaagguccucgaccucaagaacuacaucgacaagcagcuccuccccauccucaacaagcaguccugcuccaucuccaacaucgagaccgucaucgaguuccagcagaagaacaaccgccuccucgagaucacccgcgaguucuccgucaacgccggcgucaccacccccgucuccaccuacaugcucaccaacuccgagcuccucucccucaucaacgacaugcccaucaccaacgaccagaagaagcucauguccaacaacguccagaucguccgccagcaguccuacuccaucaugugcaucaucaaggaggagguccucgccuacgucguccagcucccccucuacggcgucaucgacacccccugcuggaagcuccacaccuccccccucugcaccaccaacaccaaggagggcuccaacaucugccucacccgcaccgaccgcggcugguacugcgacaacgccggcuccgucuccuucuucccccaggccgagaccugcaagguccaguccaaccgcgucuucugcgacaccaugaacucccgcacccuccccuccgaggucaaccucugcaacaucgacaucuucaaccccaaguacgacugcaagaucaugaccuccaagaccgacgucuccuccuccgucaucaccucccucggcgccaucgucuccugcuacggcaagaccaagugcaccgccuccaacaagaaccgcggcaucaucaagaccuucuccaacggcugcgacuacgucuccaacaagggcgucgacaccgucuccgucggcaacacccucuacuacgucaacaagcaggagggcaagucccucuacgucaagggcgagcccaucaucaacuucuacgacccccucgucuuccccuccgacgaguucgacgccuccaucucccaggucaacgagaagaucaaccagucccucgccuucauccgcaaguccgacgagcuccuccacaacgucaacgucggcaaguccaccaccaacaucaugaucaccaccaucaucaucgucaucaucgucauccuccuccuccucaucgccgucggccucuuccucuacugcaaggcccgcuccacccccgucacccucuccaaggaccagcucuccggcaucaacaacaucgccuucuccaacuga

SEQ ID NO: 13206 - RNA, 1608 nt, Artificial Sequence
  derived and/or modified CDS sequence (opt3) from HRSV(Memphis-37)__AIY60640.1__F_DSCav1_mut0
auggagcugcccauccucaagaccaacgccauuacaacuauacuugcugcagugacgcugugcuucgccagcucccagaauaucaccgaagaguuuuaccaaucuacauguucagcggucaguaaaggcuauuugagcgcuuuaagaacugggugguacaccuccguuauuacaaucgaacugucuaacauuaaggagaauaaaugcaacggaaccgacgccaaggugaaacuaaucaagcaggaacucgauaaguauaaaaaugcaguaacugagcugcagcuucugaugcagucgaccccugccgcugguucaggcagcgcaauagccagugggaucgcuguguguaaggucuugcaccucgagggagaagugaacaaaauuaagaaugcccugcuguccacaaacaaagcgguugugucucucagcaauggcgucuccguguuaacguucaagguacuggaccuuaagaacuacaucgauaaacaauugcugccaauucuaaauaagcagucaugcaguaucagcaacauagagacuguuauugaauuucagcagaaaaauaacaggcuccuggagaucacccgggaguucucugugaaugccggugucacaacuccgguguccaccuauaugcuuacaaacucagaacuguugagccucauuaacgacaugcccaucaccaaugaucaaaagaaacugaugaguaacaaugugcagaucguccgccagcagucuuacuccauuauguguauaaucaaggaggaaguuuuagcauaugugguacaacugccucucuacggggugauugacacgccaugcuggaaacuucauacuagcccccuguguacaaccaacacuaaggagggaucgaauaucugcuugacacgaaccgaucguggcugguacugugacaacgcuggcucugucuccuuuuucccucaggccgaaacgugcaaggugcagucaaauagaguguuuugugauaccaugaacaguagaacacugccaagcgaggugaaucucugcaacauagacauuuucaaucccaaauaugauugcaagaucaugacuuccaaaaccgacgucucuagcucagugaucacaagucugggggcaauuguauccuguuacggaaagacuaaaugcaccgcuagcaacaagaauagggguaucauuaagacauuuucuaacggcugugauuauguuucaaauaaagggguggacaccgucagugugggaaacacucuuuacuaugucaacaagcaagagggcaaaagccuguacgugaagggugaaccuauaaucaauuucuaugacccauugguuuuuccguccgaugaguucgacgccucuauuucgcagguuaacgagaaaaucaaucagagccucgcguuuauccggaaguccgaugaacuguuacacaacguaaaugucgggaagucaacgacaaacauuaugauaaccacuaucauuaucgugauuaucguuauacugcuacuccugaucgccgugggacuuuucuuguacugcaaagcacgcaguacccccgucacacugucuaaggaccagcucagcggcauuaauaacaucgcuuucuccaauuga

SEQ ID NO: 13207 - RNA, 1608 nt, Artificial Sequence
  derived and/or modified CDS sequence (opt4) from HRSV(Memphis-37)__AIY60640.1__F_DSCav1_mut0
auggagcugcccauccugaagaccaacgccaucaccaccauccuggccgccgugacccugugcuucgccagcagccagaacaucaccgaggaguucuaccagagcaccugcagcgccgugagcaagggcuaccugagcgcccugagaaccggcugguacaccagcgugaucaccaucgagcugagcaacaucaaggagaacaagugcaacggcaccgacgccaaggugaagcugaucaagcaggagcuggacaaguacaagaacgccgugaccgagcugcagcugcugaugcagagcacccccgccgccggcagcggcagcgccaucgccagcggcaucgccgugugcaaggugcugcaccuggagggcgaggugaacaagaucaagaacgcccugcugagcaccaacaaggccguggugagccugagcaacggcgugagcgugcugaccuucaaggugcuggaccugaagaacuacaucgacaagcagcugcugcccauccugaacaagcagagcugcagcaucagcaacaucgagaccgugaucgaguuccagcagaagaacaacagacugcuggagaucaccagagaguucagcgugaacgccggcgugaccacccccgugagcaccuacaugcugaccaacagcgagcugcugagccugaucaacgacaugcccaucaccaacgaccagaagaagcugaugagcaacaacgugcagaucgugagacagcagagcuacagcaucaugugcaucaucaaggaggaggugcuggccuacguggugcagcugccccuguacggcgugaucgacacccccugcuggaagcugcacaccagcccccugugcaccaccaacaccaaggagggcagcaacaucugccugaccagaaccgacagaggcugguacugcgacaacgccggcagcgugagcuucuucccccaggccgagaccugcaaggugcagagcaacagaguguucugcgacaccaugaacagcagaacccugcccagcgaggugaaccugugcaacaucgacaucuucaaccccaaguacgacugcaagaucaugaccagcaagaccgacgugagcagcagcgugaucaccagccugggcgccaucgugagcugcuacggcaagaccaagugcaccgccagcaacaagaacagaggcaucaucaagaccuucagcaacggcugcgacuacgugagcaacaagggcguggacaccgugagcgugggcaacacccuguacuacgugaacaagcaggagggcaagagccuguacgugaagggcgagcccaucaucaacuucuacgacccccugguguuccccagcgacgaguucgacgccagcaucagccaggugaacgagaagaucaaccagagccuggccuucaucagaaagagcgacgagcugcugcacaacgugaacgugggcaagagcaccaccaacaucaugaucaccaccaucaucaucgugaucaucgugauccugcugcugcugaucgccgugggccuguuccuguacugcaaggccagaagcacccccgugacccugagcaaggaccagcugagcggcaucaacaacaucgccuucagcaacuga

SEQ ID NO: 13208 - RNA, 1608 nt, Artificial Sequence
  derived and/or modified CDS sequence (opt5) from HRSV(Memphis-37)__AIY60640.1__F_DSCav1_mut0
auggagcugcccauccucaagaccaacgccauuacaacgauccuggcugccgugacccuuugcuucgcgagcucccagaauauuacagaagaguuuuaccaaucuaccuguagcgcugucuccaaaggcuaucugucugcccucagaacagggugguacaccagcguuaucacaauugaacuguccaacaucaaggagaauaaaugcaacggaaccgacgccaaggugaaacuuaucaagcaggaacuggauaaguauaaaaaugcugugacggagcuccagcugcugaugcagucuaccccugccgcuggcagcggguccgccauugcgagcggaaucgccgucuguaaggugcuccaccuggagggcgaaguuaacaaaauuaagaaugcccuucugucuacaaacaaagcuguggucucccucagcaauggggugucuguucugaccuucaaggugcuugaccugaagaacuacaucgauaaacaacuccugccgauucugaauaagcaguccugcagcaucucuaacauugagacagucaucgaauuucagcagaaaaauaaccggcuccuggagaucacccgcgaguucuccgugaaugcuggagugacgacacccgucagcaccuauaugcuuacaaacuccgaacugcucucucugauuaacgacaugccuaucaccaaugaucaaaagaaacuuaugagcaacaauguucagauugugagacagcaguccuacagcaucauguguauuaucaaggaggaagugcuggccuaugucgugcaacucccccuguacggcguuaucgacaccccuugcuggaaacugcauacaucuccccucuguacgaccaacacaaaggagggcuccaauauuugccugacccggacagaucgcgggugguacugugacaacgcgggaagcgugagcuuuuucccucaggccgaaaccugcaagguccagucuaauagaguguuuugugauacgaugaacuccagaacacugccgucugagguuaaucucugcaacaucgacauuuucaaucccaaauaugauugcaagaucaugaccagcaaaaccgacguguccagcucugucauuacaucccugggcgcuaucgugagcuguuacgggaagaccaaaugcacagccucuaacaagaaucggggaaucauuaagacguuuuccaacggcugugauuaugucagcaauaaagggguggacaccguuuccgugggaaacacacuuuacuaugucaacaagcaagagggcaaaucucuguacgugaagggcgaaccuaucauuaauuucuaugacccccucguuuuuccuagcgaugaguucgacgcuuccaucucucaggugaacgaaaagauuaaucagagccuggccuuuauccgcaaguccgaugagcugcuccacaacgucaauguggggaaaagcaccacaaacauuaugaucaccacgaucauuaucgugauuaucguuauucugcuucugcucaucgccgucggacuguuccuguacugcaaagcuagaucuacccccgugacacuuuccaaggaccagcucagcggcaucaauaacauugcguucucuaauuga

SEQ ID NO: 13209 - RNA, 1608 nt, Artificial Sequence
  derived and/or modified CDS sequence (opt6) from HRSV(Memphis-37)__AIY60640.1__F_DSCav1_mut0
auggaauuaccaaucuuaaaaacaaacgccauaacaaccauccucgcagcaguaacccuaugcuuugcauccucacaaaacauaacugaagaauuuuaccaaucaacaugcucagcaguaucaaaaggauaucuaucagcccucagaacaggaugguacacaucagucauuacaaucgaacuuucaaacauaaaagaaaauaaauguaacggcacagaugccaaaguaaaauuaauuaaacaagaacuugacaaauacaaaaaugccguaacagaacuacaacuacuaaugcaaaguacuccugcugcaggaagcggaucugcaauagcaucagguauagcaguauguaaaguucuacaccuagaaggcgaaguaaacaaaauuaaaaacgcacuacucucaacaaauaaagcaguugucucccuaucaaacggaguaucaguauuaacuuucaaaguacuagaccucaaaaacuauauagacaaacaacuauuaccaauacuaaacaaacaaagcugcucuaucuccaacaucgaaacaguaauagaauuucaacaaaaaaauaauagacuacuugaaauaaccagagaauuuucaguaaacgccggaguaacaacaccaguaucaacuuacaugcuaacaaacuccgaacuacuaucauuaauaaacgacaugcccauaacaaacgaccaaaaaaaauuaaugucaaacaacguccaaaucguacgacaacaauccuauuccauaauguguauaauaaaagaagaaguacuagcauacguaguacaauuaccauuauauggaguaauagauaccccuugcuggaaacuacacacaucaccccuaugcacuacaaauacgaaagaagguucaaauauaugcuuaacuagaaccgauagagguugguauugugacaacgcuggaucaguaucauuuuucccacaagcagaaacaugcaaaguacaaucaaacagaguauuuugcgacacuaugaacucaagaacuuuaccauccgaaguuaaucuauguaacauagauauauuuaacccaaaauacgacugcaaaauaaugacaucaaaaacagauguaucaucaucaguuauaaccucccucggagcaauaguaucaugcuauggaaaaacaaaaugcacagcaucaaacaaaaaucguggaauuauaaaaacauucucaaacggcugugacuacgucagcaauaaaggaguagacacagucucaguaggaaacacuuuauacuauguuaacaaacaagaaggaaaaucacucuacgucaaaggcgaaccaauaauaaauuucuaugacccacucguauucccauccgacgaauuugacgcaucaauaucacaaguaaaugaaaaaauaaaccaaagccuagcauuuauacgaaaaucagacgaacuacuacacaacguaaacguagguaaaagcacaaccaauauaaugauaacaacaauaaucauaguaauaaucguaauauuacuauuacuaauagcuguaggauuguuccuauacugcaaagcaagaucaacaccaguaaccuuaucuaaggaccaacuaucaggaaucaauaacauugccuucucaaacuaa

SEQ ID NO: 13210 - RNA, 1608 nt, Artificial Sequence
  derived and/or modified CDS sequence (opt11) from HRSV(Memphis-37)__AIY60640.1__F_DSCav1_mut0
auggaacuaccuauccuuaaaaccaacgcaaucaccaccauccuugccgcagucacacucugcuucgcauccucacagaacaucaccgaagaguucuaucaaucaaccugcuccgccguauccaaaggauaccucucagcccuccgcaccggcugguauaccucagucauaacaaucgaauuaucaaauaucaaggagaacaaaugcaacggcaccgacgccaaagucaaacucauaaaacaagaacuagacaaauacaaaaacgccgugacagaacuccaacuccucaugcaguccacccccgcagccggauccggcucagcaaucgccucgggcauugcaguaugcaaaguccuccaccucgaaggcgaagucaacaaaaucaaaaacgcccuccucuccaccaacaaagccgucgucucccucuccaacggcguaucuguccucacuuucaagguccucgaccucaaaaacuacaucgacaagcaacuacuuccaauccucaacaagcaauccugcucaaucucaaacaucgaaaccguaauagaguuccaacaaaagaacaaccgccuccucgaaaucacccgcgaguucuccguuaacgccggugucacuaccccagucagcaccuacaugcucaccaacuccgaacuccuuucucugaucaacgacaugccaaucaccaacgaucaaaagaaauuaauguccaacaacguccagaucguccgccaacaaagcuacagcaucaugugcaucauaaaagaagaaguacuugcguacguaguucaacuaccccuuuacggcguaaucgacaccccaugcuggaaacuccacaccuccccacuaugcaccaccaacaccaaagaaggauccaacaucugccuaacccgcaccgaccgcggcugguacugcgacaacgcugggagcgucucauucuucccacaagcagaaaccugcaaaguccaaucgaaccgcguauucugcgacaccaugaacuccagaacccuaccaagcgaagucaaucuuugcaacaucgacauauuuaaccccaaauacgacugcaaaaucaugacaucaaagaccgacgucucaucuucagucauuaccucacucggcgcaauugucagcugcuacggaaagaccaaauguaccgccuccaauaaaaaccguggaaucauaaaaaccuuuagcaacggcugcgacuacgucuccaacaaaggagucgacaccgucuccgucggcaacacccucuacuacgucaacaaacaagaaggaaaaucccucuacgugaaaggcgaacccauaauaaacuucuacgacccccuagucuuccccucugacgaguucgacgccuccaucucccaagucaacgaaaagauaaaucaaucacuagccuucauacgcaaaucugacgaacuucuccacaacgucaacgucggcaaauccaccaccaacauaaugaucacaacgauaauaaucgugaucauaguaauccuacuucuccucaucgcaguaggucuauuccuauacugcaaagcccgcagcacccccgucacccuaucaaaagaccaacucuccggcaucaacaacaucgccuucucaaacuaa

SEQ ID NO: 13211 - RNA, 1884 nt, Artificial Sequence
  mRNA product Design a-1 comprising derived and/or modified sequence from HRSV(Memphis-37)__AIY60640.1__F_DSCav1_mut0 (opt1)
gggagagucccgcagucggcguccagcggcucugcuuguucgugugugugucguugcaggccuuauucaagcuuaccauggagcugcccauccucaagaccaacgccaucaccacgauccuggccgcggugacccugugcuucgccagcucccagaacaucaccgaggaguucuaccagagcacgugcuccgccgucagcaagggcuaccucuccgcccugcgcaccgggugguacaccagcgugaucaccaucgagcuguccaacaucaaggagaacaagugcaacggcaccgacgccaaggugaagcucaucaagcaggagcuggacaaguacaagaacgcggucacggagcugcagcuccugaugcagagcaccccggccgccggcuccgggagcgcgaucgccuccggcaucgccgucugcaaggugcugcaccucgagggcgaggugaacaagaucaagaacgcccugcuguccaccaacaaggccgucgugagccucuccaacggggugagcguccugaccuucaaggugcuggaccucaagaacuacaucgacaagcagcugcugcccauccugaacaagcagagcugcuccaucagcaacaucgagaccgucaucgaguuccagcagaagaacaaccgccuccuggagaucacgcgggaguucagcgugaacgcgggcgugaccacccccgucuccaccuacaugcugacgaacagcgagcuccugucccugaucaacgacaugccgaucaccaacgaccagaagaagcucaugagcaacaacgugcagaucgugcgccagcaguccuacagcaucaugugcaucaucaaggaggagguccuggccuacguggugcagcugccccucuacggggucaucgacacccccugcuggaagcugcacaccagcccccugugcacgaccaacaccaaggagggcuccaacaucugccucacccggacggaccgcgggugguacugcgacaacgccggcagcguguccuucuucccgcaggccgagaccugcaagguccagagcaaccggguguucugcgacaccaugaacucccggacccugcccagcgaggugaaccucugcaacaucgacaucuucaaccccaaguacgacugcaagaucaugacguccaagaccgacgucagcuccagcgugaucaccucccugggcgccaucgugagcugcuacgggaagaccaagugcacggcgagcaacaagaaccgcggcaucaucaagaccuucuccaacgggugcgacuacgucagcaacaagggcguggacaccguguccgucggcaacacccuguacuacgugaacaagcaggagggcaagagccucuacgugaagggggagcccaucaucaacuucuacgacccgcuggucuuccccuccgacgaguucgacgccagcaucucccaggugaacgagaagaucaaccagagccuggccuucauccggaaguccgacgagcuccugcacaacgugaacgucggcaagagcaccacgaacaucaugaucaccaccaucaucaucgugaucaucgugauccugcugcuccugaucgccgucgggcuguuccucuacugcaaggcccgcuccacccccgugacgcugagcaaggaccagcuguccgggaucaacaacaucgcguucagcaacugaggacuagucccuguucccagagcccacuuuuuuuucuuuuuuugaaauaaaauagccugucuuucagaucuaaaaaaaaaaaaaaaaaaaaaaaaaaaaaaaaaaaaaaaaaaaaaaaaaaaaaaaaaaaaaaaaugcaucccccccccccccccccccccccccccccccaaaggcucuuuucagagccaccagaauu

SEQ ID NO: 13212 - RNA, 1884 nt, Artificial Sequence
  mRNA product Design a-1 comprising derived and/or modified sequence from HRSV(Memphis-37)__AIY60640.1__F_DSCav1_mut0 (opt1)
gggagagucccgcagucggcguccagcggcucugcuuguucgugugugugucguugcaggccuuauucaagcuuaccauggagcugcccauccucaagaccaacgccaucaccacgauccuggccgcggugacccugugcuucgccagcucccagaacaucaccgaggaguucuaccagagcacgugcuccgccgucagcaagggcuaccucuccgcccugcgcaccgggugguacaccagcgugaucaccaucgagcuguccaacaucaaggagaacaagugcaacggcaccgacgccaaggugaagcucaucaagcaggagcuggacaaguacaagaacgcggucacggagcugcagcuccugaugcagagcaccccggccgccggguccggcagcgccaucgcguccgggaucgccgugugcaaggugcugcaccucgagggcgaggucaacaagaucaagaacgcccugcugagcaccaacaaggccguggugucccucagcaacggcgucuccgugcugaccuucaaggugcuggaccucaagaacuacaucgacaagcagcugcugcccauccucaacaagcagagcugcuccaucagcaacaucgagacggucaucgaguuccagcagaagaacaaccggcugcuggagaucacccgcgaguucuccgugaacgccggggugaccacccccgucagcacguacaugcucaccaacagcgagcugcugucccucaucaacgacaugcccaucaccaacgaccagaagaagcugaugagcaacaacgugcagaucgugcggcagcaguccuacagcaucaugugcaucaucaaggaggagguccuggcguacguggugcagcucccgcuguacggcgucaucgacacccccugcuggaagcugcacacgagcccccucugcaccaccaacaccaaggagggguccaacaucugccugacgcgcaccgaccggggcugguacugcgacaacgccggguccgugagcuucuucccccaggccgagaccugcaaggugcaguccaaccgcgucuucugcgacaccaugaacagccggacgcucccguccgaggugaaccugugcaacaucgacaucuucaaccccaaguacgacugcaagaucaugaccagcaagaccgacgucuccagcuccgugaucaccagccugggcgccaucguguccugcuacggcaagacgaagugcaccgccagcaacaagaaccgggggaucaucaagaccuucuccaacggcugcgacuacgucagcaacaaggggguggacaccgugagcgucggcaacacgcucuacuacgugaacaagcaggagggcaagucccuguacgugaagggggagcccaucaucaacuucuacgacccccuggucuucccgagcgacgaguucgacgcguccaucagccaggugaacgagaagaucaaccagucccucgccuucauccgcaagagcgacgagcugcugcacaacgugaacgucggcaaguccaccaccaacaucaugaucaccaccaucaucaucgugaucaucgugauccuccugcugcucaucgccgucgggcuguuccuguacugcaaggcccggagcacgcccgugacccuguccaaggaccagcucagcggcaucaacaacaucgccuucuccaacugaggacuagucccuguucccagagcccacuuuuuuuucuuuuuuugaaauaaaauagccugucuuucagaucuaaaaaaaaaaaaaaaaaaaaaaaaaaaaaaaaaaaaaaaaaaaaaaaaaaaaaaaaaaaaaaaaugcaucccccccccccccccccccccccccccccccaaaggcucuuuucagagccaccagaauu

SEQ ID NO: 13213 - RNA, 1884 nt, Artificial Sequence
  mRNA product Design a-1 comprising derived and/or modified sequence from HRSV(Memphis-37)__AIY60640.1__F_DSCav1_mut0 (opt2)
gggagagucccgcagucggcguccagcggcucugcuuguucgugugugugucguugcaggccuuauucaagcuuaccauggagcuccccauccucaagaccaacgccaucaccaccauccucgccgccgucacccucugcuucgccuccucccagaacaucaccgaggaguucuaccaguccaccugcuccgccgucuccaagggcuaccucuccgcccuccgcaccggcugguacaccuccgucaucaccaucgagcucuccaacaucaaggagaacaagugcaacggcaccgacgccaaggucaagcucaucaagcaggagcucgacaaguacaagaacgccgucaccgagcuccagcuccucaugcaguccacccccgccgccggcuccggcuccgccaucgccuccggcaucgccgucugcaagguccuccaccucgagggcgaggucaacaagaucaagaacgcccuccucuccaccaacaaggccgucgucucccucuccaacggcgucuccguccucaccuucaagguccucgaccucaagaacuacaucgacaagcagcuccuccccauccucaacaagcaguccugcuccaucuccaacaucgagaccgucaucgaguuccagcagaagaacaaccgccuccucgagaucacccgcgaguucuccgucaacgccggcgucaccacccccgucuccaccuacaugcucaccaacuccgagcuccucucccucaucaacgacaugcccaucaccaacgaccagaagaagcucauguccaacaacguccagaucguccgccagcaguccuacuccaucaugugcaucaucaaggaggagguccucgccuacgucguccagcucccccucuacggcgucaucgacacccccugcuggaagcuccacaccuccccccucugcaccaccaacaccaaggagggcuccaacaucugccucacccgcaccgaccgcggcugguacugcgacaacgccggcuccgucuccuucuucccccaggccgagaccugcaagguccaguccaaccgcgucuucugcgacaccaugaacucccgcacccuccccuccgaggucaaccucugcaacaucgacaucuucaaccccaaguacgacugcaagaucaugaccuccaagaccgacgucuccuccuccgucaucaccucccucggcgccaucgucuccugcuacggcaagaccaagugcaccgccuccaacaagaaccgcggcaucaucaagaccuucuccaacggcugcgacuacgucuccaacaagggcgucgacaccgucuccgucggcaacacccucuacuacgucaacaagcaggagggcaagucccucuacgucaagggcgagcccaucaucaacuucuacgacccccucgucuuccccuccgacgaguucgacgccuccaucucccaggucaacgagaagaucaaccagucccucgccuucauccgcaaguccgacgagcuccuccacaacgucaacgucggcaaguccaccaccaacaucaugaucaccaccaucaucaucgucaucaucgucauccuccuccuccucaucgccgucggccucuuccucuacugcaaggcccgcuccacccccgucacccucuccaaggaccagcucuccggcaucaacaacaucgccuucuccaacugaggacuagucccuguucccagagcccacuuuuuuuucuuuuuuugaaauaaaauagccugucuuucagaucuaaaaaaaaaaaaaaaaaaaaaaaaaaaaaaaaaaaaaaaaaaaaaaaaaaaaaaaaaaaaaaaaugcaucccccccccccccccccccccccccccccccaaaggcucuuuucagagccaccagaauu

SEQ ID NO: 13214 - RNA, 1884 nt, Artificial Sequence
  mRNA product Design a-1 comprising derived and/or modified sequence from HRSV(Memphis-37)__AIY60640.1__F_DSCav1_mut0 (opt3)
gggagagucccgcagucggcguccagcggcucugcuuguucgugugugugucguugcaggccuuauucaagcuuaccauggagcugcccauccucaagaccaacgccauuacaacuauacuugcugcagugacgcugugcuucgccagcucccagaauaucaccgaagaguuuuaccaaucuacauguucagcggucaguaaaggcuauuugagcgcuuuaagaacugggugguacaccuccguuauuacaaucgaacugucuaacauuaaggagaauaaaugcaacggaaccgacgccaaggugaaacuaaucaagcaggaacucgauaaguauaaaaaugcaguaacugagcugcagcuucugaugcagucgaccccugccgcugguucaggcagcgcaauagccagugggaucgcuguguguaaggucuugcaccucgagggagaagugaacaaaauuaagaaugcccugcuguccacaaacaaagcgguugugucucucagcaauggcgucuccguguuaacguucaagguacuggaccuuaagaacuacaucgauaaacaauugcugccaauucuaaauaagcagucaugcaguaucagcaacauagagacuguuauugaauuucagcagaaaaauaacaggcuccuggagaucacccgggaguucucugugaaugccggugucacaacuccgguguccaccuauaugcuuacaaacucagaacuguugagccucauuaacgacaugcccaucaccaaugaucaaaagaaacugaugaguaacaaugugcagaucguccgccagcagucuuacuccauuauguguauaaucaaggaggaaguuuuagcauaugugguacaacugccucucuacggggugauugacacgccaugcuggaaacuucauacuagcccccuguguacaaccaacacuaaggagggaucgaauaucugcuugacacgaaccgaucguggcugguacugugacaacgcuggcucugucuccuuuuucccucaggccgaaacgugcaaggugcagucaaauagaguguuuugugauaccaugaacaguagaacacugccaagcgaggugaaucucugcaacauagacauuuucaaucccaaauaugauugcaagaucaugacuuccaaaaccgacgucucuagcucagugaucacaagucugggggcaauuguauccuguuacggaaagacuaaaugcaccgcuagcaacaagaauagggguaucauuaagacauuuucuaacggcugugauuauguuucaaauaaagggguggacaccgucagugugggaaacacucuuuacuaugucaacaagcaagagggcaaaagccuguacgugaagggugaaccuauaaucaauuucuaugacccauugguuuuuccguccgaugaguucgacgccucuauuucgcagguuaacgagaaaaucaaucagagccucgcguuuauccggaaguccgaugaacuguuacacaacguaaaugucgggaagucaacgacaaacauuaugauaaccacuaucauuaucgugauuaucguuauacugcuacuccugaucgccgugggacuuuucuuguacugcaaagcacgcaguacccccgucacacugucuaaggaccagcucagcggcauuaauaacaucgcuuucuccaauugaggacuagucccuguucccagagcccacuuuuuuuucuuuuuuugaaauaaaauagccugucuuucagaucuaaaaaaaaaaaaaaaaaaaaaaaaaaaaaaaaaaaaaaaaaaaaaaaaaaaaaaaaaaaaaaaaugcaucccccccccccccccccccccccccccccccaaaggcucuuuucagagccaccagaauu

SEQ ID NO: 13215 - RNA, 1884 nt, Artificial Sequence
  mRNA product Design a-1 comprising derived and/or modified sequence from HRSV(Memphis-37)__AIY60640.1__F_DSCav1_mut0 (opt4)
gggagagucccgcagucggcguccagcggcucugcuuguucgugugugugucguugcaggccuuauucaagcuuaccauggagcugcccauccugaagaccaacgccaucaccaccauccuggccgccgugacccugugcuucgccagcagccagaacaucaccgaggaguucuaccagagcaccugcagcgccgugagcaagggcuaccugagcgcccugagaaccggcugguacaccagcgugaucaccaucgagcugagcaacaucaaggagaacaagugcaacggcaccgacgccaaggugaagcugaucaagcaggagcuggacaaguacaagaacgccgugaccgagcugcagcugcugaugcagagcacccccgccgccggcagcggcagcgccaucgccagcggcaucgccgugugcaaggugcugcaccuggagggcgaggugaacaagaucaagaacgcccugcugagcaccaacaaggccguggugagccugagcaacggcgugagcgugcugaccuucaaggugcuggaccugaagaacuacaucgacaagcagcugcugcccauccugaacaagcagagcugcagcaucagcaacaucgagaccgugaucgaguuccagcagaagaacaacagacugcuggagaucaccagagaguucagcgugaacgccggcgugaccacccccgugagcaccuacaugcugaccaacagcgagcugcugagccugaucaacgacaugcccaucaccaacgaccagaagaagcugaugagcaacaacgugcagaucgugagacagcagagcuacagcaucaugugcaucaucaaggaggaggugcuggccuacguggugcagcugccccuguacggcgugaucgacacccccugcuggaagcugcacaccagcccccugugcaccaccaacaccaaggagggcagcaacaucugccugaccagaaccgacagaggcugguacugcgacaacgccggcagcgugagcuucuucccccaggccgagaccugcaaggugcagagcaacagaguguucugcgacaccaugaacagcagaacccugcccagcgaggugaaccugugcaacaucgacaucuucaaccccaaguacgacugcaagaucaugaccagcaagaccgacgugagcagcagcgugaucaccagccugggcgccaucgugagcugcuacggcaagaccaagugcaccgccagcaacaagaacagaggcaucaucaagaccuucagcaacggcugcgacuacgugagcaacaagggcguggacaccgugagcgugggcaacacccuguacuacgugaacaagcaggagggcaagagccuguacgugaagggcgagcccaucaucaacuucuacgacccccugguguuccccagcgacgaguucgacgccagcaucagccaggugaacgagaagaucaaccagagccuggccuucaucagaaagagcgacgagcugcugcacaacgugaacgugggcaagagcaccaccaacaucaugaucaccaccaucaucaucgugaucaucgugauccugcugcugcugaucgccgugggccuguuccuguacugcaaggccagaagcacccccgugacccugagcaaggaccagcugagcggcaucaacaacaucgccuucagcaacugaggacuagucccuguucccagagcccacuuuuuuuucuuuuuuugaaauaaaauagccugucuuucagaucuaaaaaaaaaaaaaaaaaaaaaaaaaaaaaaaaaaaaaaaaaaaaaaaaaaaaaaaaaaaaaaaaugcaucccccccccccccccccccccccccccccccaaaggcucuuuucagagccaccagaauu

SEQ ID NO: 13216 - RNA, 1884 nt, Artificial Sequence
  mRNA product Design a-1 comprising derived and/or modified sequence from HRSV(Memphis-37)__AIY60640.1__F_DSCav1_mut0 (opt5)
gggagagucccgcagucggcguccagcggcucugcuuguucgugugugugucguugcaggccuuauucaagcuuaccauggagcugcccauccucaagaccaacgccauuacaacgauccuggcugccgugacccuuugcuucgcgagcucccagaauauuacagaagaguuuuaccaaucuaccuguagcgcugucuccaaaggcuaucugucugcccucagaacagggugguacaccagcguuaucacaauugaacuguccaacaucaaggagaauaaaugcaacggaaccgacgccaaggugaaacuuaucaagcaggaacuggauaaguauaaaaaugcugugacggagcuccagcugcugaugcagucuaccccugccgcuggcagcggguccgccauugcgagcggaaucgccgucuguaaggugcuccaccuggagggcgaaguuaacaaaauuaagaaugcccuucugucuacaaacaaagcuguggucucccucagcaauggggugucuguucugaccuucaaggugcuugaccugaagaacuacaucgauaaacaacuccugccgauucugaauaagcaguccugcagcaucucuaacauugagacagucaucgaauuucagcagaaaaauaaccggcuccuggagaucacccgcgaguucuccgugaaugcuggagugacgacacccgucagcaccuauaugcuuacaaacuccgaacugcucucucugauuaacgacaugccuaucaccaaugaucaaaagaaacuuaugagcaacaauguucagauugugagacagcaguccuacagcaucauguguauuaucaaggaggaagugcuggccuaugucgugcaacucccccuguacggcguuaucgacaccccuugcuggaaacugcauacaucuccccucuguacgaccaacacaaaggagggcuccaauauuugccugacccggacagaucgcgggugguacugugacaacgcgggaagcgugagcuuuuucccucaggccgaaaccugcaagguccagucuaauagaguguuuugugauacgaugaacuccagaacacugccgucugagguuaaucucugcaacaucgacauuuucaaucccaaauaugauugcaagaucaugaccagcaaaaccgacguguccagcucugucauuacaucccugggcgcuaucgugagcuguuacgggaagaccaaaugcacagccucuaacaagaaucggggaaucauuaagacguuuuccaacggcugugauuaugucagcaauaaagggguggacaccguuuccgugggaaacacacuuuacuaugucaacaagcaagagggcaaaucucuguacgugaagggcgaaccuaucauuaauuucuaugacccccucguuuuuccuagcgaugaguucgacgcuuccaucucucaggugaacgaaaagauuaaucagagccuggccuuuauccgcaaguccgaugagcugcuccacaacgucaauguggggaaaagcaccacaaacauuaugaucaccacgaucauuaucgugauuaucguuauucugcuucugcucaucgccgucggacuguuccuguacugcaaagcuagaucuacccccgugacacuuuccaaggaccagcucagcggcaucaauaacauugcguucucuaauugaggacuagucccuguucccagagcccacuuuuuuuucuuuuuuugaaauaaaauagccugucuuucagaucuaaaaaaaaaaaaaaaaaaaaaaaaaaaaaaaaaaaaaaaaaaaaaaaaaaaaaaaaaaaaaaaaugcaucccccccccccccccccccccccccccccccaaaggcucuuuucagagccaccagaauu

SEQ ID NO: 13217 - RNA, 1884 nt, Artificial Sequence
  mRNA product Design a-1 comprising derived and/or modified sequence from HRSV(Memphis-37)__AIY60640.1__F_DSCav1_mut0 (opt6)
gggagagucccgcagucggcguccagcggcucugcuuguucgugugugugucguugcaggccuuauucaagcuuaccauggaauuaccaaucuuaaaaacaaacgccauaacaaccauccucgcagcaguaacccuaugcuuugcauccucacaaaacauaacugaagaauuuuaccaaucaacaugcucagcaguaucaaaaggauaucuaucagcccucagaacaggaugguacacaucagucauuacaaucgaacuuucaaacauaaaagaaaauaaauguaacggcacagaugccaaaguaaaauuaauuaaacaagaacuugacaaauacaaaaaugccguaacagaacuacaacuacuaaugcaaaguacuccugcugcaggaagcggaucugcaauagcaucagguauagcaguauguaaaguucuacaccuagaaggcgaaguaaacaaaauuaaaaacgcacuacucucaacaaauaaagcaguugucucccuaucaaacggaguaucaguauuaacuuucaaaguacuagaccucaaaaacuauauagacaaacaacuauuaccaauacuaaacaaacaaagcugcucuaucuccaacaucgaaacaguaauagaauuucaacaaaaaaauaauagacuacuugaaauaaccagagaauuuucaguaaacgccggaguaacaacaccaguaucaacuuacaugcuaacaaacuccgaacuacuaucauuaauaaacgacaugcccauaacaaacgaccaaaaaaaauuaaugucaaacaacguccaaaucguacgacaacaauccuauuccauaauguguauaauaaaagaagaaguacuagcauacguaguacaauuaccauuauauggaguaauagauaccccuugcuggaaacuacacacaucaccccuaugcacuacaaauacgaaagaagguucaaauauaugcuuaacuagaaccgauagagguugguauugugacaacgcuggaucaguaucauuuuucccacaagcagaaacaugcaaaguacaaucaaacagaguauuuugcgacacuaugaacucaagaacuuuaccauccgaaguuaaucuauguaacauagauauauuuaacccaaaauacgacugcaaaauaaugacaucaaaaacagauguaucaucaucaguuauaaccucccucggagcaauaguaucaugcuauggaaaaacaaaaugcacagcaucaaacaaaaaucguggaauuauaaaaacauucucaaacggcugugacuacgucagcaauaaaggaguagacacagucucaguaggaaacacuuuauacuauguuaacaaacaagaaggaaaaucacucuacgucaaaggcgaaccaauaauaaauuucuaugacccacucguauucccauccgacgaauuugacgcaucaauaucacaaguaaaugaaaaaauaaaccaaagccuagcauuuauacgaaaaucagacgaacuacuacacaacguaaacguagguaaaagcacaaccaauauaaugauaacaacaauaaucauaguaauaaucguaauauuacuauuacuaauagcuguaggauuguuccuauacugcaaagcaagaucaacaccaguaaccuuaucuaaggaccaacuaucaggaaucaauaacauugccuucucaaacuaaggacuagucccuguucccagagcccacuuuuuuuucuuuuuuugaaauaaaauagccugucuuucagaucuaaaaaaaaaaaaaaaaaaaaaaaaaaaaaaaaaaaaaaaaaaaaaaaaaaaaaaaaaaaaaaaaugcaucccccccccccccccccccccccccccccccaaaggcucuuuucagagccaccagaauu

SEQ ID NO: 13218 - RNA, 1884 nt, Artificial Sequence
  mRNA product Design a-1 comprising derived and/or modified sequence from HRSV(Memphis-37)__AIY60640.1__F_DSCav1_mut0 (opt11)
gggagagucccgcagucggcguccagcggcucugcuuguucgugugugugucguugcaggccuuauucaagcuuaccauggaacuaccuauccuuaaaaccaacgcaaucaccaccauccuugccgcagucacacucugcuucgcauccucacagaacaucaccgaagaguucuaucaaucaaccugcuccgccguauccaaaggauaccucucagcccuccgcaccggcugguauaccucagucauaacaaucgaauuaucaaauaucaaggagaacaaaugcaacggcaccgacgccaaagucaaacucauaaaacaagaacuagacaaauacaaaaacgccgugacagaacuccaacuccucaugcaguccacccccgcagccggauccggcucagcaaucgccucgggcauugcaguaugcaaaguccuccaccucgaaggcgaagucaacaaaaucaaaaacgcccuccucuccaccaacaaagccgucgucucccucuccaacggcguaucuguccucacuuucaagguccucgaccucaaaaacuacaucgacaagcaacuacuuccaauccucaacaagcaauccugcucaaucucaaacaucgaaaccguaauagaguuccaacaaaagaacaaccgccuccucgaaaucacccgcgaguucuccguuaacgccggugucacuaccccagucagcaccuacaugcucaccaacuccgaacuccuuucucugaucaacgacaugccaaucaccaacgaucaaaagaaauuaauguccaacaacguccagaucguccgccaacaaagcuacagcaucaugugcaucauaaaagaagaaguacuugcguacguaguucaacuaccccuuuacggcguaaucgacaccccaugcuggaaacuccacaccuccccacuaugcaccaccaacaccaaagaaggauccaacaucugccuaacccgcaccgaccgcggcugguacugcgacaacgcugggagcgucucauucuucccacaagcagaaaccugcaaaguccaaucgaaccgcguauucugcgacaccaugaacuccagaacccuaccaagcgaagucaaucuuugcaacaucgacauauuuaaccccaaauacgacugcaaaaucaugacaucaaagaccgacgucucaucuucagucauuaccucacucggcgcaauugucagcugcuacggaaagaccaaauguaccgccuccaauaaaaaccguggaaucauaaaaaccuuuagcaacggcugcgacuacgucuccaacaaaggagucgacaccgucuccgucggcaacacccucuacuacgucaacaaacaagaaggaaaaucccucuacgugaaaggcgaacccauaauaaacuucuacgacccccuagucuuccccucugacgaguucgacgccuccaucucccaagucaacgaaaagauaaaucaaucacuagccuucauacgcaaaucugacgaacuucuccacaacgucaacgucggcaaauccaccaccaacauaaugaucacaacgauaauaaucgugaucauaguaauccuacuucuccucaucgcaguaggucuauuccuauacugcaaagcccgcagcacccccgucacccuaucaaaagaccaacucuccggcaucaacaacaucgccuucucaaacuaaggacuagucccuguucccagagcccacuuuuuuuucuuuuuuugaaauaaaauagccugucuuucagaucuaaaaaaaaaaaaaaaaaaaaaaaaaaaaaaaaaaaaaaaaaaaaaaaaaaaaaaaaaaaaaaaaugcaucccccccccccccccccccccccccccccccaaaggcucuuuucagagccaccagaauu

SEQ ID NO: 13219 - RNA, 1903 nt, Artificial Sequence
  mRNA product Design a-2 comprising derived and/or modified sequence from HRSV(Memphis-37)__AIY60640.1__F_DSCav1_mut0 (opt1)
gggagaguccgcucagccagguugcagaagcggcuuagcguguguccuaaucuucucucugcguguagguaggccugugccgcaaacaagcuuaccauggagcugcccauccucaagaccaacgccaucaccacgauccuggccgcggugacccugugcuucgccagcucccagaacaucaccgaggaguucuaccagagcacgugcuccgccgucagcaagggcuaccucuccgcccugcgcaccgggugguacaccagcgugaucaccaucgagcuguccaacaucaaggagaacaagugcaacggcaccgacgccaaggugaagcucaucaagcaggagcuggacaaguacaagaacgcggucacggagcugcagcuccugaugcagagcaccccggccgccggcuccgggagcgcgaucgccuccggcaucgccgucugcaaggugcugcaccucgagggcgaggugaacaagaucaagaacgcccugcuguccaccaacaaggccgucgugagccucuccaacggggugagcguccugaccuucaaggugcuggaccucaagaacuacaucgacaagcagcugcugcccauccugaacaagcagagcugcuccaucagcaacaucgagaccgucaucgaguuccagcagaagaacaaccgccuccuggagaucacgcgggaguucagcgugaacgcgggcgugaccacccccgucuccaccuacaugcugacgaacagcgagcuccugucccugaucaacgacaugccgaucaccaacgaccagaagaagcucaugagcaacaacgugcagaucgugcgccagcaguccuacagcaucaugugcaucaucaaggaggagguccuggccuacguggugcagcugccccucuacggggucaucgacacccccugcuggaagcugcacaccagcccccugugcacgaccaacaccaaggagggcuccaacaucugccucacccggacggaccgcgggugguacugcgacaacgccggcagcguguccuucuucccgcaggccgagaccugcaagguccagagcaaccggguguucugcgacaccaugaacucccggacccugcccagcgaggugaaccucugcaacaucgacaucuucaaccccaaguacgacugcaagaucaugacguccaagaccgacgucagcuccagcgugaucaccucccugggcgccaucgugagcugcuacgggaagaccaagugcacggcgagcaacaagaaccgcggcaucaucaagaccuucuccaacgggugcgacuacgucagcaacaagggcguggacaccguguccgucggcaacacccuguacuacgugaacaagcaggagggcaagagccucuacgugaagggggagcccaucaucaacuucuacgacccgcuggucuuccccuccgacgaguucgacgccagcaucucccaggugaacgagaagaucaaccagagccuggccuucauccggaaguccgacgagcuccugcacaacgugaacgucggcaagagcaccacgaacaucaugaucaccaccaucaucaucgugaucaucgugauccugcugcuccugaucgccgucgggcuguuccucuacugcaaggcccgcuccacccccgugacgcugagcaaggaccagcuguccgggaucaacaacaucgcguucagcaacugaggacuagucccuguucccagagcccacuuuuuuuucuuuuuuugaaauaaaauagccugucuuucagaucuaaaaaaaaaaaaaaaaaaaaaaaaaaaaaaaaaaaaaaaaaaaaaaaaaaaaaaaaaaaaaaaaugcaucccccccccccccccccccccccccccccccaaaggcucuuuucagagccaccagaauu

SEQ ID NO: 13220 - RNA, 1903 nt, Artificial Sequence
  mRNA product Design a-2 comprising derived and/or modified sequence from HRSV(Memphis-37)__AIY60640.1__F_DSCav1_mut0 (opt1)
gggagaguccgcucagccagguugcagaagcggcuuagcguguguccuaaucuucucucugcguguagguaggccugugccgcaaacaagcuuaccauggagcugcccauccucaagaccaacgccaucaccacgauccuggccgcggugacccugugcuucgccagcucccagaacaucaccgaggaguucuaccagagcacgugcuccgccgucagcaagggcuaccucuccgcccugcgcaccgggugguacaccagcgugaucaccaucgagcuguccaacaucaaggagaacaagugcaacggcaccgacgccaaggugaagcucaucaagcaggagcuggacaaguacaagaacgcggucacggagcugcagcuccugaugcagagcaccccggccgccggguccggcagcgccaucgcguccgggaucgccgugugcaaggugcugcaccucgagggcgaggucaacaagaucaagaacgcccugcugagcaccaacaaggccguggugucccucagcaacggcgucuccgugcugaccuucaaggugcuggaccucaagaacuacaucgacaagcagcugcugcccauccucaacaagcagagcugcuccaucagcaacaucgagacggucaucgaguuccagcagaagaacaaccggcugcuggagaucacccgcgaguucuccgugaacgccggggugaccacccccgucagcacguacaugcucaccaacagcgagcugcugucccucaucaacgacaugcccaucaccaacgaccagaagaagcugaugagcaacaacgugcagaucgugcggcagcaguccuacagcaucaugugcaucaucaaggaggagguccuggcguacguggugcagcucccgcuguacggcgucaucgacacccccugcuggaagcugcacacgagcccccucugcaccaccaacaccaaggagggguccaacaucugccugacgcgcaccgaccggggcugguacugcgacaacgccggguccgugagcuucuucccccaggccgagaccugcaaggugcaguccaaccgcgucuucugcgacaccaugaacagccggacgcucccguccgaggugaaccugugcaacaucgacaucuucaaccccaaguacgacugcaagaucaugaccagcaagaccgacgucuccagcuccgugaucaccagccugggcgccaucguguccugcuacggcaagacgaagugcaccgccagcaacaagaaccgggggaucaucaagaccuucuccaacggcugcgacuacgucagcaacaaggggguggacaccgugagcgucggcaacacgcucuacuacgugaacaagcaggagggcaagucccuguacgugaagggggagcccaucaucaacuucuacgacccccuggucuucccgagcgacgaguucgacgcguccaucagccaggugaacgagaagaucaaccagucccucgccuucauccgcaagagcgacgagcugcugcacaacgugaacgucggcaaguccaccaccaacaucaugaucaccaccaucaucaucgugaucaucgugauccuccugcugcucaucgccgucgggcuguuccuguacugcaaggcccggagcacgcccgugacccuguccaaggaccagcucagcggcaucaacaacaucgccuucuccaacugaggacuagucccuguucccagagcccacuuuuuuuucuuuuuuugaaauaaaauagccugucuuucagaucuaaaaaaaaaaaaaaaaaaaaaaaaaaaaaaaaaaaaaaaaaaaaaaaaaaaaaaaaaaaaaaaaugcaucccccccccccccccccccccccccccccccaaaggcucuuuucagagccaccagaauu

SEQ ID NO: 13221 - RNA, 1903 nt, Artificial Sequence
  mRNA product Design a-2 comprising derived and/or modified sequence from HRSV(Memphis-37)__AIY60640.1__F_DSCav1_mut0 (opt2)
gggagaguccgcucagccagguugcagaagcggcuuagcguguguccuaaucuucucucugcguguagguaggccugugccgcaaacaagcuuaccauggagcuccccauccucaagaccaacgccaucaccaccauccucgccgccgucacccucugcuucgccuccucccagaacaucaccgaggaguucuaccaguccaccugcuccgccgucuccaagggcuaccucuccgcccuccgcaccggcugguacaccuccgucaucaccaucgagcucuccaacaucaaggagaacaagugcaacggcaccgacgccaaggucaagcucaucaagcaggagcucgacaaguacaagaacgccgucaccgagcuccagcuccucaugcaguccacccccgccgccggcuccggcuccgccaucgccuccggcaucgccgucugcaagguccuccaccucgagggcgaggucaacaagaucaagaacgcccuccucuccaccaacaaggccgucgucucccucuccaacggcgucuccguccucaccuucaagguccucgaccucaagaacuacaucgacaagcagcuccuccccauccucaacaagcaguccugcuccaucuccaacaucgagaccgucaucgaguuccagcagaagaacaaccgccuccucgagaucacccgcgaguucuccgucaacgccggcgucaccacccccgucuccaccuacaugcucaccaacuccgagcuccucucccucaucaacgacaugcccaucaccaacgaccagaagaagcucauguccaacaacguccagaucguccgccagcaguccuacuccaucaugugcaucaucaaggaggagguccucgccuacgucguccagcucccccucuacggcgucaucgacacccccugcuggaagcuccacaccuccccccucugcaccaccaacaccaaggagggcuccaacaucugccucacccgcaccgaccgcggcugguacugcgacaacgccggcuccgucuccuucuucccccaggccgagaccugcaagguccaguccaaccgcgucuucugcgacaccaugaacucccgcacccuccccuccgaggucaaccucugcaacaucgacaucuucaaccccaaguacgacugcaagaucaugaccuccaagaccgacgucuccuccuccgucaucaccucccucggcgccaucgucuccugcuacggcaagaccaagugcaccgccuccaacaagaaccgcggcaucaucaagaccuucuccaacggcugcgacuacgucuccaacaagggcgucgacaccgucuccgucggcaacacccucuacuacgucaacaagcaggagggcaagucccucuacgucaagggcgagcccaucaucaacuucuacgacccccucgucuuccccuccgacgaguucgacgccuccaucucccaggucaacgagaagaucaaccagucccucgccuucauccgcaaguccgacgagcuccuccacaacgucaacgucggcaaguccaccaccaacaucaugaucaccaccaucaucaucgucaucaucgucauccuccuccuccucaucgccgucggccucuuccucuacugcaaggcccgcuccacccccgucacccucuccaaggaccagcucuccggcaucaacaacaucgccuucuccaacugaggacuagucccuguucccagagcccacuuuuuuuucuuuuuuugaaauaaaauagccugucuuucagaucuaaaaaaaaaaaaaaaaaaaaaaaaaaaaaaaaaaaaaaaaaaaaaaaaaaaaaaaaaaaaaaaaugcaucccccccccccccccccccccccccccccccaaaggcucuuuucagagccaccagaauu

SEQ ID NO: 13222 - RNA, 1903 nt, Artificial Sequence
  mRNA product Design a-2 comprising derived and/or modified sequence from HRSV(Memphis-37)__AIY60640.1__F_DSCav1_mut0 (opt3)
gggagaguccgcucagccagguugcagaagcggcuuagcguguguccuaaucuucucucugcguguagguaggccugugccgcaaacaagcuuaccauggagcugcccauccucaagaccaacgccauuacaacuauacuugcugcagugacgcugugcuucgccagcucccagaauaucaccgaagaguuuuaccaaucuacauguucagcggucaguaaaggcuauuugagcgcuuuaagaacugggugguacaccuccguuauuacaaucgaacugucuaacauuaaggagaauaaaugcaacggaaccgacgccaaggugaaacuaaucaagcaggaacucgauaaguauaaaaaugcaguaacugagcugcagcuucugaugcagucgaccccugccgcugguucaggcagcgcaauagccagugggaucgcuguguguaaggucuugcaccucgagggagaagugaacaaaauuaagaaugcccugcuguccacaaacaaagcgguugugucucucagcaauggcgucuccguguuaacguucaagguacuggaccuuaagaacuacaucgauaaacaauugcugccaauucuaaauaagcagucaugcaguaucagcaacauagagacuguuauugaauuucagcagaaaaauaacaggcuccuggagaucacccgggaguucucugugaaugccggugucacaacuccgguguccaccuauaugcuuacaaacucagaacuguugagccucauuaacgacaugcccaucaccaaugaucaaaagaaacugaugaguaacaaugugcagaucguccgccagcagucuuacuccauuauguguauaaucaaggaggaaguuuuagcauaugugguacaacugccucucuacggggugauugacacgccaugcuggaaacuucauacuagcccccuguguacaaccaacacuaaggagggaucgaauaucugcuugacacgaaccgaucguggcugguacugugacaacgcuggcucugucuccuuuuucccucaggccgaaacgugcaaggugcagucaaauagaguguuuugugauaccaugaacaguagaacacugccaagcgaggugaaucucugcaacauagacauuuucaaucccaaauaugauugcaagaucaugacuuccaaaaccgacgucucuagcucagugaucacaagucugggggcaauuguauccuguuacggaaagacuaaaugcaccgcuagcaacaagaauagggguaucauuaagacauuuucuaacggcugugauuauguuucaaauaaagggguggacaccgucagugugggaaacacucuuuacuaugucaacaagcaagagggcaaaagccuguacgugaagggugaaccuauaaucaauuucuaugacccauugguuuuuccguccgaugaguucgacgccucuauuucgcagguuaacgagaaaaucaaucagagccucgcguuuauccggaaguccgaugaacuguuacacaacguaaaugucgggaagucaacgacaaacauuaugauaaccacuaucauuaucgugauuaucguuauacugcuacuccugaucgccgugggacuuuucuuguacugcaaagcacgcaguacccccgucacacugucuaaggaccagcucagcggcauuaauaacaucgcuuucuccaauugaggacuagucccuguucccagagcccacuuuuuuuucuuuuuuugaaauaaaauagccugucuuucagaucuaaaaaaaaaaaaaaaaaaaaaaaaaaaaaaaaaaaaaaaaaaaaaaaaaaaaaaaaaaaaaaaaugcaucccccccccccccccccccccccccccccccaaaggcucuuuucagagccaccagaauu

SEQ ID NO: 13223 - RNA, 1903 nt, Artificial Sequence
  mRNA product Design a-2 comprising derived and/or modified sequence from HRSV(Memphis-37)__AIY60640.1__F_DSCav1_mut0 (opt4)
gggagaguccgcucagccagguugcagaagcggcuuagcguguguccuaaucuucucucugcguguagguaggccugugccgcaaacaagcuuaccauggagcugcccauccugaagaccaacgccaucaccaccauccuggccgccgugacccugugcuucgccagcagccagaacaucaccgaggaguucuaccagagcaccugcagcgccgugagcaagggcuaccugagcgcccugagaaccggcugguacaccagcgugaucaccaucgagcugagcaacaucaaggagaacaagugcaacggcaccgacgccaaggugaagcugaucaagcaggagcuggacaaguacaagaacgccgugaccgagcugcagcugcugaugcagagcacccccgccgccggcagcggcagcgccaucgccagcggcaucgccgugugcaaggugcugcaccuggagggcgaggugaacaagaucaagaacgcccugcugagcaccaacaaggccguggugagccugagcaacggcgugagcgugcugaccuucaaggugcuggaccugaagaacuacaucgacaagcagcugcugcccauccugaacaagcagagcugcagcaucagcaacaucgagaccgugaucgaguuccagcagaagaacaacagacugcuggagaucaccagagaguucagcgugaacgccggcgugaccacccccgugagcaccuacaugcugaccaacagcgagcugcugagccugaucaacgacaugcccaucaccaacgaccagaagaagcugaugagcaacaacgugcagaucgugagacagcagagcuacagcaucaugugcaucaucaaggaggaggugcuggccuacguggugcagcugccccuguacggcgugaucgacacccccugcuggaagcugcacaccagcccccugugcaccaccaacaccaaggagggcagcaacaucugccugaccagaaccgacagaggcugguacugcgacaacgccggcagcgugagcuucuucccccaggccgagaccugcaaggugcagagcaacagaguguucugcgacaccaugaacagcagaacccugcccagcgaggugaaccugugcaacaucgacaucuucaaccccaaguacgacugcaagaucaugaccagcaagaccgacgugagcagcagcgugaucaccagccugggcgccaucgugagcugcuacggcaagaccaagugcaccgccagcaacaagaacagaggcaucaucaagaccuucagcaacggcugcgacuacgugagcaacaagggcguggacaccgugagcgugggcaacacccuguacuacgugaacaagcaggagggcaagagccuguacgugaagggcgagcccaucaucaacuucuacgacccccugguguuccccagcgacgaguucgacgccagcaucagccaggugaacgagaagaucaaccagagccuggccuucaucagaaagagcgacgagcugcugcacaacgugaacgugggcaagagcaccaccaacaucaugaucaccaccaucaucaucgugaucaucgugauccugcugcugcugaucgccgugggccuguuccuguacugcaaggccagaagcacccccgugacccugagcaaggaccagcugagcggcaucaacaacaucgccuucagcaacugaggacuagucccuguucccagagcccacuuuuuuuucuuuuuuugaaauaaaauagccugucuuucagaucuaaaaaaaaaaaaaaaaaaaaaaaaaaaaaaaaaaaaaaaaaaaaaaaaaaaaaaaaaaaaaaaaugcaucccccccccccccccccccccccccccccccaaaggcucuuuucagagccaccagaauu

SEQ ID NO: 13224 - RNA, 1903 nt, Artificial Sequence
  mRNA product Design a-2 comprising derived and/or modified sequence from HRSV(Memphis-37)__AIY60640.1__F_DSCav1_mut0 (opt5)
gggagaguccgcucagccagguugcagaagcggcuuagcguguguccuaaucuucucucugcguguagguaggccugugccgcaaacaagcuuaccauggagcugcccauccucaagaccaacgccauuacaacgauccuggcugccgugacccuuugcuucgcgagcucccagaauauuacagaagaguuuuaccaaucuaccuguagcgcugucuccaaaggcuaucugucugcccucagaacagggugguacaccagcguuaucacaauugaacuguccaacaucaaggagaauaaaugcaacggaaccgacgccaaggugaaacuuaucaagcaggaacuggauaaguauaaaaaugcugugacggagcuccagcugcugaugcagucuaccccugccgcuggcagcggguccgccauugcgagcggaaucgccgucuguaaggugcuccaccuggagggcgaaguuaacaaaauuaagaaugcccuucugucuacaaacaaagcuguggucucccucagcaauggggugucuguucugaccuucaaggugcuugaccugaagaacuacaucgauaaacaacuccugccgauucugaauaagcaguccugcagcaucucuaacauugagacagucaucgaauuucagcagaaaaauaaccggcuccuggagaucacccgcgaguucuccgugaaugcuggagugacgacacccgucagcaccuauaugcuuacaaacuccgaacugcucucucugauuaacgacaugccuaucaccaaugaucaaaagaaacuuaugagcaacaauguucagauugugagacagcaguccuacagcaucauguguauuaucaaggaggaagugcuggccuaugucgugcaacucccccuguacggcguuaucgacaccccuugcuggaaacugcauacaucuccccucuguacgaccaacacaaaggagggcuccaauauuugccugacccggacagaucgcgggugguacugugacaacgcgggaagcgugagcuuuuucccucaggccgaaaccugcaagguccagucuaauagaguguuuugugauacgaugaacuccagaacacugccgucugagguuaaucucugcaacaucgacauuuucaaucccaaauaugauugcaagaucaugaccagcaaaaccgacguguccagcucugucauuacaucccugggcgcuaucgugagcuguuacgggaagaccaaaugcacagccucuaacaagaaucggggaaucauuaagacguuuuccaacggcugugauuaugucagcaauaaagggguggacaccguuuccgugggaaacacacuuuacuaugucaacaagcaagagggcaaaucucuguacgugaagggcgaaccuaucauuaauuucuaugacccccucguuuuuccuagcgaugaguucgacgcuuccaucucucaggugaacgaaaagauuaaucagagccuggccuuuauccgcaaguccgaugagcugcuccacaacgucaauguggggaaaagcaccacaaacauuaugaucaccacgaucauuaucgugauuaucguuauucugcuucugcucaucgccgucggacuguuccuguacugcaaagcuagaucuacccccgugacacuuuccaaggaccagcucagcggcaucaauaacauugcguucucuaauugaggacuagucccuguucccagagcccacuuuuuuuucuuuuuuugaaauaaaauagccugucuuucagaucuaaaaaaaaaaaaaaaaaaaaaaaaaaaaaaaaaaaaaaaaaaaaaaaaaaaaaaaaaaaaaaaaugcaucccccccccccccccccccccccccccccccaaaggcucuuuucagagccaccagaauu

SEQ ID NO: 13225 - RNA, 1903 nt, Artificial Sequence
  mRNA product Design a-2 comprising derived and/or modified sequence from HRSV(Memphis-37)__AIY60640.1__F_DSCav1_mut0 (opt6)
gggagaguccgcucagccagguugcagaagcggcuuagcguguguccuaaucuucucucugcguguagguaggccugugccgcaaacaagcuuaccauggaauuaccaaucuuaaaaacaaacgccauaacaaccauccucgcagcaguaacccuaugcuuugcauccucacaaaacauaacugaagaauuuuaccaaucaacaugcucagcaguaucaaaaggauaucuaucagcccucagaacaggaugguacacaucagucauuacaaucgaacuuucaaacauaaaagaaaauaaauguaacggcacagaugccaaaguaaaauuaauuaaacaagaacuugacaaauacaaaaaugccguaacagaacuacaacuacuaaugcaaaguacuccugcugcaggaagcggaucugcaauagcaucagguauagcaguauguaaaguucuacaccuagaaggcgaaguaaacaaaauuaaaaacgcacuacucucaacaaauaaagcaguugucucccuaucaaacggaguaucaguauuaacuuucaaaguacuagaccucaaaaacuauauagacaaacaacuauuaccaauacuaaacaaacaaagcugcucuaucuccaacaucgaaacaguaauagaauuucaacaaaaaaauaauagacuacuugaaauaaccagagaauuuucaguaaacgccggaguaacaacaccaguaucaacuuacaugcuaacaaacuccgaacuacuaucauuaauaaacgacaugcccauaacaaacgaccaaaaaaaauuaaugucaaacaacguccaaaucguacgacaacaauccuauuccauaauguguauaauaaaagaagaaguacuagcauacguaguacaauuaccauuauauggaguaauagauaccccuugcuggaaacuacacacaucaccccuaugcacuacaaauacgaaagaagguucaaauauaugcuuaacuagaaccgauagagguugguauugugacaacgcuggaucaguaucauuuuucccacaagcagaaacaugcaaaguacaaucaaacagaguauuuugcgacacuaugaacucaagaacuuuaccauccgaaguuaaucuauguaacauagauauauuuaacccaaaauacgacugcaaaauaaugacaucaaaaacagauguaucaucaucaguuauaaccucccucggagcaauaguaucaugcuauggaaaaacaaaaugcacagcaucaaacaaaaaucguggaauuauaaaaacauucucaaacggcugugacuacgucagcaauaaaggaguagacacagucucaguaggaaacacuuuauacuauguuaacaaacaagaaggaaaaucacucuacgucaaaggcgaaccaauaauaaauuucuaugacccacucguauucccauccgacgaauuugacgcaucaauaucacaaguaaaugaaaaaauaaaccaaagccuagcauuuauacgaaaaucagacgaacuacuacacaacguaaacguagguaaaagcacaaccaauauaaugauaacaacaauaaucauaguaauaaucguaauauuacuauuacuaauagcuguaggauuguuccuauacugcaaagcaagaucaacaccaguaaccuuaucuaaggaccaacuaucaggaaucaauaacauugccuucucaaacuaaggacuagucccuguucccagagcccacuuuuuuuucuuuuuuugaaauaaaauagccugucuuucagaucuaaaaaaaaaaaaaaaaaaaaaaaaaaaaaaaaaaaaaaaaaaaaaaaaaaaaaaaaaaaaaaaaugcaucccccccccccccccccccccccccccccccaaaggcucuuuucagagccaccagaauu

SEQ ID NO: 13226 - RNA, 1903 nt, Artificial Sequence
  mRNA product Design a-2 comprising derived and/or modified sequence from HRSV(Memphis-37)__AIY60640.1__F_DSCav1_mut0 (opt11)
gggagaguccgcucagccagguugcagaagcggcuuagcguguguccuaaucuucucucugcguguagguaggccugugccgcaaacaagcuuaccauggaacuaccuauccuuaaaaccaacgcaaucaccaccauccuugccgcagucacacucugcuucgcauccucacagaacaucaccgaagaguucuaucaaucaaccugcuccgccguauccaaaggauaccucucagcccuccgcaccggcugguauaccucagucauaacaaucgaauuaucaaauaucaaggagaacaaaugcaacggcaccgacgccaaagucaaacucauaaaacaagaacuagacaaauacaaaaacgccgugacagaacuccaacuccucaugcaguccacccccgcagccggauccggcucagcaaucgccucgggcauugcaguaugcaaaguccuccaccucgaaggcgaagucaacaaaaucaaaaacgcccuccucuccaccaacaaagccgucgucucccucuccaacggcguaucuguccucacuuucaagguccucgaccucaaaaacuacaucgacaagcaacuacuuccaauccucaacaagcaauccugcucaaucucaaacaucgaaaccguaauagaguuccaacaaaagaacaaccgccuccucgaaaucacccgcgaguucuccguuaacgccggugucacuaccccagucagcaccuacaugcucaccaacuccgaacuccuuucucugaucaacgacaugccaaucaccaacgaucaaaagaaauuaauguccaacaacguccagaucguccgccaacaaagcuacagcaucaugugcaucauaaaagaagaaguacuugcguacguaguucaacuaccccuuuacggcguaaucgacaccccaugcuggaaacuccacaccuccccacuaugcaccaccaacaccaaagaaggauccaacaucugccuaacccgcaccgaccgcggcugguacugcgacaacgcugggagcgucucauucuucccacaagcagaaaccugcaaaguccaaucgaaccgcguauucugcgacaccaugaacuccagaacccuaccaagcgaagucaaucuuugcaacaucgacauauuuaaccccaaauacgacugcaaaaucaugacaucaaagaccgacgucucaucuucagucauuaccucacucggcgcaauugucagcugcuacggaaagaccaaauguaccgccuccaauaaaaaccguggaaucauaaaaaccuuuagcaacggcugcgacuacgucuccaacaaaggagucgacaccgucuccgucggcaacacccucuacuacgucaacaaacaagaaggaaaaucccucuacgugaaaggcgaacccauaauaaacuucuacgacccccuagucuuccccucugacgaguucgacgccuccaucucccaagucaacgaaaagauaaaucaaucacuagccuucauacgcaaaucugacgaacuucuccacaacgucaacgucggcaaauccaccaccaacauaaugaucacaacgauaauaaucgugaucauaguaauccuacuucuccucaucgcaguaggucuauuccuauacugcaaagcccgcagcacccccgucacccuaucaaaagaccaacucuccggcaucaacaacaucgccuucucaaacuaaggacuagucccuguucccagagcccacuuuuuuuucuuuuuuugaaauaaaauagccugucuuucagaucuaaaaaaaaaaaaaaaaaaaaaaaaaaaaaaaaaaaaaaaaaaaaaaaaaaaaaaaaaaaaaaaaugcaucccccccccccccccccccccccccccccccaaaggcucuuuucagagccaccagaauu

SEQ ID NO: 13227 - RNA, 1981 nt, Artificial Sequence
  mRNA product Design a-3 comprising derived and/or modified sequence from HRSV(Memphis-37)__AIY60640.1__F_DSCav1_mut0 (opt1)
gggagagggcgcuuggcuugcaaggacccugagcugcggcauugaagcacacccaacccaacucgacugaagucagccucacugaaccggaucugagaaucuucucucucugggcuugccagggcucuccgaaccuagcuagcauccucuucaauuccaacuagaaagcuuaccauggagcugcccauccucaagaccaacgccaucaccacgauccuggccgcggugacccugugcuucgccagcucccagaacaucaccgaggaguucuaccagagcacgugcuccgccgucagcaagggcuaccucuccgcccugcgcaccgggugguacaccagcgugaucaccaucgagcuguccaacaucaaggagaacaagugcaacggcaccgacgccaaggugaagcucaucaagcaggagcuggacaaguacaagaacgcggucacggagcugcagcuccugaugcagagcaccccggccgccggcuccgggagcgcgaucgccuccggcaucgccgucugcaaggugcugcaccucgagggcgaggugaacaagaucaagaacgcccugcuguccaccaacaaggccgucgugagccucuccaacggggugagcguccugaccuucaaggugcuggaccucaagaacuacaucgacaagcagcugcugcccauccugaacaagcagagcugcuccaucagcaacaucgagaccgucaucgaguuccagcagaagaacaaccgccuccuggagaucacgcgggaguucagcgugaacgcgggcgugaccacccccgucuccaccuacaugcugacgaacagcgagcuccugucccugaucaacgacaugccgaucaccaacgaccagaagaagcucaugagcaacaacgugcagaucgugcgccagcaguccuacagcaucaugugcaucaucaaggaggagguccuggccuacguggugcagcugccccucuacggggucaucgacacccccugcuggaagcugcacaccagcccccugugcacgaccaacaccaaggagggcuccaacaucugccucacccggacggaccgcgggugguacugcgacaacgccggcagcguguccuucuucccgcaggccgagaccugcaagguccagagcaaccggguguucugcgacaccaugaacucccggacccugcccagcgaggugaaccucugcaacaucgacaucuucaaccccaaguacgacugcaagaucaugacguccaagaccgacgucagcuccagcgugaucaccucccugggcgccaucgugagcugcuacgggaagaccaagugcacggcgagcaacaagaaccgcggcaucaucaagaccuucuccaacgggugcgacuacgucagcaacaagggcguggacaccguguccgucggcaacacccuguacuacgugaacaagcaggagggcaagagccucuacgugaagggggagcccaucaucaacuucuacgacccgcuggucuuccccuccgacgaguucgacgccagcaucucccaggugaacgagaagaucaaccagagccuggccuucauccggaaguccgacgagcuccugcacaacgugaacgucggcaagagcaccacgaacaucaugaucaccaccaucaucaucgugaucaucgugauccugcugcuccugaucgccgucgggcuguuccucuacugcaaggcccgcuccacccccgugacgcugagcaaggaccagcuguccgggaucaacaacaucgcguucagcaacugaggacuagucccuguucccagagcccacuuuuuuuucuuuuuuugaaauaaaauagccugucuuucagaucuaaaaaaaaaaaaaaaaaaaaaaaaaaaaaaaaaaaaaaaaaaaaaaaaaaaaaaaaaaaaaaaaugcaucccccccccccccccccccccccccccccccaaaggcucuuuucagagccaccagaauu

SEQ ID NO: 13228 - RNA, 1981 nt, Artificial Sequence
  mRNA product Design a-3 comprising derived and/or modified sequence from HRSV(Memphis-37)__AIY60640.1__F_DSCav1_mut0 (opt1)
gggagagggcgcuuggcuugcaaggacccugagcugcggcauugaagcacacccaacccaacucgacugaagucagccucacugaaccggaucugagaaucuucucucucugggcuugccagggcucuccgaaccuagcuagcauccucuucaauuccaacuagaaagcuuaccauggagcugcccauccucaagaccaacgccaucaccacgauccuggccgcggugacccugugcuucgccagcucccagaacaucaccgaggaguucuaccagagcacgugcuccgccgucagcaagggcuaccucuccgcccugcgcaccgggugguacaccagcgugaucaccaucgagcuguccaacaucaaggagaacaagugcaacggcaccgacgccaaggugaagcucaucaagcaggagcuggacaaguacaagaacgcggucacggagcugcagcuccugaugcagagcaccccggccgccggguccggcagcgccaucgcguccgggaucgccgugugcaaggugcugcaccucgagggcgaggucaacaagaucaagaacgcccugcugagcaccaacaaggccguggugucccucagcaacggcgucuccgugcugaccuucaaggugcuggaccucaagaacuacaucgacaagcagcugcugcccauccucaacaagcagagcugcuccaucagcaacaucgagacggucaucgaguuccagcagaagaacaaccggcugcuggagaucacccgcgaguucuccgugaacgccggggugaccacccccgucagcacguacaugcucaccaacagcgagcugcugucccucaucaacgacaugcccaucaccaacgaccagaagaagcugaugagcaacaacgugcagaucgugcggcagcaguccuacagcaucaugugcaucaucaaggaggagguccuggcguacguggugcagcucccgcuguacggcgucaucgacacccccugcuggaagcugcacacgagcccccucugcaccaccaacaccaaggagggguccaacaucugccugacgcgcaccgaccggggcugguacugcgacaacgccggguccgugagcuucuucccccaggccgagaccugcaaggugcaguccaaccgcgucuucugcgacaccaugaacagccggacgcucccguccgaggugaaccugugcaacaucgacaucuucaaccccaaguacgacugcaagaucaugaccagcaagaccgacgucuccagcuccgugaucaccagccugggcgccaucguguccugcuacggcaagacgaagugcaccgccagcaacaagaaccgggggaucaucaagaccuucuccaacggcugcgacuacgucagcaacaaggggguggacaccgugagcgucggcaacacgcucuacuacgugaacaagcaggagggcaagucccuguacgugaagggggagcccaucaucaacuucuacgacccccuggucuucccgagcgacgaguucgacgcguccaucagccaggugaacgagaagaucaaccagucccucgccuucauccgcaagagcgacgagcugcugcacaacgugaacgucggcaaguccaccaccaacaucaugaucaccaccaucaucaucgugaucaucgugauccuccugcugcucaucgccgucgggcuguuccuguacugcaaggcccggagcacgcccgugacccuguccaaggaccagcucagcggcaucaacaacaucgccuucuccaacugaggacuagucccuguucccagagcccacuuuuuuuucuuuuuuugaaauaaaauagccugucuuucagaucuaaaaaaaaaaaaaaaaaaaaaaaaaaaaaaaaaaaaaaaaaaaaaaaaaaaaaaaaaaaaaaaaugcaucccccccccccccccccccccccccccccccaaaggcucuuuucagagccaccagaauu

SEQ ID NO: 13229 - RNA, 1981 nt, Artificial Sequence
  mRNA product Design a-3 comprising derived and/or modified sequence from HRSV(Memphis-37)__AIY60640.1__F_DSCav1_mut0 (opt2)
gggagagggcgcuuggcuugcaaggacccugagcugcggcauugaagcacacccaacccaacucgacugaagucagccucacugaaccggaucugagaaucuucucucucugggcuugccagggcucuccgaaccuagcuagcauccucuucaauuccaacuagaaagcuuaccauggagcuccccauccucaagaccaacgccaucaccaccauccucgccgccgucacccucugcuucgccuccucccagaacaucaccgaggaguucuaccaguccaccugcuccgccgucuccaagggcuaccucuccgcccuccgcaccggcugguacaccuccgucaucaccaucgagcucuccaacaucaaggagaacaagugcaacggcaccgacgccaaggucaagcucaucaagcaggagcucgacaaguacaagaacgccgucaccgagcuccagcuccucaugcaguccacccccgccgccggcuccggcuccgccaucgccuccggcaucgccgucugcaagguccuccaccucgagggcgaggucaacaagaucaagaacgcccuccucuccaccaacaaggccgucgucucccucuccaacggcgucuccguccucaccuucaagguccucgaccucaagaacuacaucgacaagcagcuccuccccauccucaacaagcaguccugcuccaucuccaacaucgagaccgucaucgaguuccagcagaagaacaaccgccuccucgagaucacccgcgaguucuccgucaacgccggcgucaccacccccgucuccaccuacaugcucaccaacuccgagcuccucucccucaucaacgacaugcccaucaccaacgaccagaagaagcucauguccaacaacguccagaucguccgccagcaguccuacuccaucaugugcaucaucaaggaggagguccucgccuacgucguccagcucccccucuacggcgucaucgacacccccugcuggaagcuccacaccuccccccucugcaccaccaacaccaaggagggcuccaacaucugccucacccgcaccgaccgcggcugguacugcgacaacgccggcuccgucuccuucuucccccaggccgagaccugcaagguccaguccaaccgcgucuucugcgacaccaugaacucccgcacccuccccuccgaggucaaccucugcaacaucgacaucuucaaccccaaguacgacugcaagaucaugaccuccaagaccgacgucuccuccuccgucaucaccucccucggcgccaucgucuccugcuacggcaagaccaagugcaccgccuccaacaagaaccgcggcaucaucaagaccuucuccaacggcugcgacuacgucuccaacaagggcgucgacaccgucuccgucggcaacacccucuacuacgucaacaagcaggagggcaagucccucuacgucaagggcgagcccaucaucaacuucuacgacccccucgucuuccccuccgacgaguucgacgccuccaucucccaggucaacgagaagaucaaccagucccucgccuucauccgcaaguccgacgagcuccuccacaacgucaacgucggcaaguccaccaccaacaucaugaucaccaccaucaucaucgucaucaucgucauccuccuccuccucaucgccgucggccucuuccucuacugcaaggcccgcuccacccccgucacccucuccaaggaccagcucuccggcaucaacaacaucgccuucuccaacugaggacuagucccuguucccagagcccacuuuuuuuucuuuuuuugaaauaaaauagccugucuuucagaucuaaaaaaaaaaaaaaaaaaaaaaaaaaaaaaaaaaaaaaaaaaaaaaaaaaaaaaaaaaaaaaaaugcaucccccccccccccccccccccccccccccccaaaggcucuuuucagagccaccagaauu

SEQ ID NO: 13230 - RNA, 1981 nt, Artificial Sequence
  mRNA product Design a-3 comprising derived and/or modified sequence from HRSV(Memphis-37)__AIY60640.1__F_DSCav1_mut0 (opt3)
gggagagggcgcuuggcuugcaaggacccugagcugcggcauugaagcacacccaacccaacucgacugaagucagccucacugaaccggaucugagaaucuucucucucugggcuugccagggcucuccgaaccuagcuagcauccucuucaauuccaacuagaaagcuuaccauggagcugcccauccucaagaccaacgccauuacaacuauacuugcugcagugacgcugugcuucgccagcucccagaauaucaccgaagaguuuuaccaaucuacauguucagcggucaguaaaggcuauuugagcgcuuuaagaacugggugguacaccuccguuauuacaaucgaacugucuaacauuaaggagaauaaaugcaacggaaccgacgccaaggugaaacuaaucaagcaggaacucgauaaguauaaaaaugcaguaacugagcugcagcuucugaugcagucgaccccugccgcugguucaggcagcgcaauagccagugggaucgcuguguguaaggucuugcaccucgagggagaagugaacaaaauuaagaaugcccugcuguccacaaacaaagcgguugugucucucagcaauggcgucuccguguuaacguucaagguacuggaccuuaagaacuacaucgauaaacaauugcugccaauucuaaauaagcagucaugcaguaucagcaacauagagacuguuauugaauuucagcagaaaaauaacaggcuccuggagaucacccgggaguucucugugaaugccggugucacaacuccgguguccaccuauaugcuuacaaacucagaacuguugagccucauuaacgacaugcccaucaccaaugaucaaaagaaacugaugaguaacaaugugcagaucguccgccagcagucuuacuccauuauguguauaaucaaggaggaaguuuuagcauaugugguacaacugccucucuacggggugauugacacgccaugcuggaaacuucauacuagcccccuguguacaaccaacacuaaggagggaucgaauaucugcuugacacgaaccgaucguggcugguacugugacaacgcuggcucugucuccuuuuucccucaggccgaaacgugcaaggugcagucaaauagaguguuuugugauaccaugaacaguagaacacugccaagcgaggugaaucucugcaacauagacauuuucaaucccaaauaugauugcaagaucaugacuuccaaaaccgacgucucuagcucagugaucacaagucugggggcaauuguauccuguuacggaaagacuaaaugcaccgcuagcaacaagaauagggguaucauuaagacauuuucuaacggcugugauuauguuucaaauaaagggguggacaccgucagugugggaaacacucuuuacuaugucaacaagcaagagggcaaaagccuguacgugaagggugaaccuauaaucaauuucuaugacccauugguuuuuccguccgaugaguucgacgccucuauuucgcagguuaacgagaaaaucaaucagagccucgcguuuauccggaaguccgaugaacuguuacacaacguaaaugucgggaagucaacgacaaacauuaugauaaccacuaucauuaucgugauuaucguuauacugcuacuccugaucgccgugggacuuuucuuguacugcaaagcacgcaguacccccgucacacugucuaaggaccagcucagcggcauuaauaacaucgcuuucuccaauugaggacuagucccuguucccagagcccacuuuuuuuucuuuuuuugaaauaaaauagccugucuuucagaucuaaaaaaaaaaaaaaaaaaaaaaaaaaaaaaaaaaaaaaaaaaaaaaaaaaaaaaaaaaaaaaaaugcaucccccccccccccccccccccccccccccccaaaggcucuuuucagagccaccagaauu

SEQ ID NO: 13231 - RNA, 1981 nt, Artificial Sequence
  mRNA product Design a-3 comprising derived and/or modified sequence from HRSV(Memphis-37)__AIY60640.1__F_DSCav1_mut0 (opt4)
gggagagggcgcuuggcuugcaaggacccugagcugcggcauugaagcacacccaacccaacucgacugaagucagccucacugaaccggaucugagaaucuucucucucugggcuugccagggcucuccgaaccuagcuagcauccucuucaauuccaacuagaaagcuuaccauggagcugcccauccugaagaccaacgccaucaccaccauccuggccgccgugacccugugcuucgccagcagccagaacaucaccgaggaguucuaccagagcaccugcagcgccgugagcaagggcuaccugagcgcccugagaaccggcugguacaccagcgugaucaccaucgagcugagcaacaucaaggagaacaagugcaacggcaccgacgccaaggugaagcugaucaagcaggagcuggacaaguacaagaacgccgugaccgagcugcagcugcugaugcagagcacccccgccgccggcagcggcagcgccaucgccagcggcaucgccgugugcaaggugcugcaccuggagggcgaggugaacaagaucaagaacgcccugcugagcaccaacaaggccguggugagccugagcaacggcgugagcgugcugaccuucaaggugcuggaccugaagaacuacaucgacaagcagcugcugcccauccugaacaagcagagcugcagcaucagcaacaucgagaccgugaucgaguuccagcagaagaacaacagacugcuggagaucaccagagaguucagcgugaacgccggcgugaccacccccgugagcaccuacaugcugaccaacagcgagcugcugagccugaucaacgacaugcccaucaccaacgaccagaagaagcugaugagcaacaacgugcagaucgugagacagcagagcuacagcaucaugugcaucaucaaggaggaggugcuggccuacguggugcagcugccccuguacggcgugaucgacacccccugcuggaagcugcacaccagcccccugugcaccaccaacaccaaggagggcagcaacaucugccugaccagaaccgacagaggcugguacugcgacaacgccggcagcgugagcuucuucccccaggccgagaccugcaaggugcagagcaacagaguguucugcgacaccaugaacagcagaacccugcccagcgaggugaaccugugcaacaucgacaucuucaaccccaaguacgacugcaagaucaugaccagcaagaccgacgugagcagcagcgugaucaccagccugggcgccaucgugagcugcuacggcaagaccaagugcaccgccagcaacaagaacagaggcaucaucaagaccuucagcaacggcugcgacuacgugagcaacaagggcguggacaccgugagcgugggcaacacccuguacuacgugaacaagcaggagggcaagagccuguacgugaagggcgagcccaucaucaacuucuacgacccccugguguuccccagcgacgaguucgacgccagcaucagccaggugaacgagaagaucaaccagagccuggccuucaucagaaagagcgacgagcugcugcacaacgugaacgugggcaagagcaccaccaacaucaugaucaccaccaucaucaucgugaucaucgugauccugcugcugcugaucgccgugggccuguuccuguacugcaaggccagaagcacccccgugacccugagcaaggaccagcugagcggcaucaacaacaucgccuucagcaacugaggacuagucccuguucccagagcccacuuuuuuuucuuuuuuugaaauaaaauagccugucuuucagaucuaaaaaaaaaaaaaaaaaaaaaaaaaaaaaaaaaaaaaaaaaaaaaaaaaaaaaaaaaaaaaaaaugcaucccccccccccccccccccccccccccccccaaaggcucuuuucagagccaccagaauu

SEQ ID NO: 13232 - RNA, 1981 nt, Artificial Sequence
  mRNA product Design a-3 comprising derived and/or modified sequence from HRSV(Memphis-37)__AIY60640.1__F_DSCav1_mut0 (opt5)
gggagagggcgcuuggcuugcaaggacccugagcugcggcauugaagcacacccaacccaacucgacugaagucagccucacugaaccggaucugagaaucuucucucucugggcuugccagggcucuccgaaccuagcuagcauccucuucaauuccaacuagaaagcuuaccauggagcugcccauccucaagaccaacgccauuacaacgauccuggcugccgugacccuuugcuucgcgagcucccagaauauuacagaagaguuuuaccaaucuaccuguagcgcugucuccaaaggcuaucugucugcccucagaacagggugguacaccagcguuaucacaauugaacuguccaacaucaaggagaauaaaugcaacggaaccgacgccaaggugaaacuuaucaagcaggaacuggauaaguauaaaaaugcugugacggagcuccagcugcugaugcagucuaccccugccgcuggcagcggguccgccauugcgagcggaaucgccgucuguaaggugcuccaccuggagggcgaaguuaacaaaauuaagaaugcccuucugucuacaaacaaagcuguggucucccucagcaauggggugucuguucugaccuucaaggugcuugaccugaagaacuacaucgauaaacaacuccugccgauucugaauaagcaguccugcagcaucucuaacauugagacagucaucgaauuucagcagaaaaauaaccggcuccuggagaucacccgcgaguucuccgugaaugcuggagugacgacacccgucagcaccuauaugcuuacaaacuccgaacugcucucucugauuaacgacaugccuaucaccaaugaucaaaagaaacuuaugagcaacaauguucagauugugagacagcaguccuacagcaucauguguauuaucaaggaggaagugcuggccuaugucgugcaacucccccuguacggcguuaucgacaccccuugcuggaaacugcauacaucuccccucuguacgaccaacacaaaggagggcuccaauauuugccugacccggacagaucgcgggugguacugugacaacgcgggaagcgugagcuuuuucccucaggccgaaaccugcaagguccagucuaauagaguguuuugugauacgaugaacuccagaacacugccgucugagguuaaucucugcaacaucgacauuuucaaucccaaauaugauugcaagaucaugaccagcaaaaccgacguguccagcucugucauuacaucccugggcgcuaucgugagcuguuacgggaagaccaaaugcacagccucuaacaagaaucggggaaucauuaagacguuuuccaacggcugugauuaugucagcaauaaagggguggacaccguuuccgugggaaacacacuuuacuaugucaacaagcaagagggcaaaucucuguacgugaagggcgaaccuaucauuaauuucuaugacccccucguuuuuccuagcgaugaguucgacgcuuccaucucucaggugaacgaaaagauuaaucagagccuggccuuuauccgcaaguccgaugagcugcuccacaacgucaauguggggaaaagcaccacaaacauuaugaucaccacgaucauuaucgugauuaucguuauucugcuucugcucaucgccgucggacuguuccuguacugcaaagcuagaucuacccccgugacacuuuccaaggaccagcucagcggcaucaauaacauugcguucucuaauugaggacuagucccuguucccagagcccacuuuuuuuucuuuuuuugaaauaaaauagccugucuuucagaucuaaaaaaaaaaaaaaaaaaaaaaaaaaaaaaaaaaaaaaaaaaaaaaaaaaaaaaaaaaaaaaaaugcaucccccccccccccccccccccccccccccccaaaggcucuuuucagagccaccagaauu

SEQ ID NO: 13233 - RNA, 1981 nt, Artificial Sequence
  mRNA product Design a-3 comprising derived and/or modified sequence from HRSV(Memphis-37)__AIY60640.1__F_DSCav1_mut0 (opt6)
gggagagggcgcuuggcuugcaaggacccugagcugcggcauugaagcacacccaacccaacucgacugaagucagccucacugaaccggaucugagaaucuucucucucugggcuugccagggcucuccgaaccuagcuagcauccucuucaauuccaacuagaaagcuuaccauggaauuaccaaucuuaaaaacaaacgccauaacaaccauccucgcagcaguaacccuaugcuuugcauccucacaaaacauaacugaagaauuuuaccaaucaacaugcucagcaguaucaaaaggauaucuaucagcccucagaacaggaugguacacaucagucauuacaaucgaacuuucaaacauaaaagaaaauaaauguaacggcacagaugccaaaguaaaauuaauuaaacaagaacuugacaaauacaaaaaugccguaacagaacuacaacuacuaaugcaaaguacuccugcugcaggaagcggaucugcaauagcaucagguauagcaguauguaaaguucuacaccuagaaggcgaaguaaacaaaauuaaaaacgcacuacucucaacaaauaaagcaguugucucccuaucaaacggaguaucaguauuaacuuucaaaguacuagaccucaaaaacuauauagacaaacaacuauuaccaauacuaaacaaacaaagcugcucuaucuccaacaucgaaacaguaauagaauuucaacaaaaaaauaauagacuacuugaaauaaccagagaauuuucaguaaacgccggaguaacaacaccaguaucaacuuacaugcuaacaaacuccgaacuacuaucauuaauaaacgacaugcccauaacaaacgaccaaaaaaaauuaaugucaaacaacguccaaaucguacgacaacaauccuauuccauaauguguauaauaaaagaagaaguacuagcauacguaguacaauuaccauuauauggaguaauagauaccccuugcuggaaacuacacacaucaccccuaugcacuacaaauacgaaagaagguucaaauauaugcuuaacuagaaccgauagagguugguauugugacaacgcuggaucaguaucauuuuucccacaagcagaaacaugcaaaguacaaucaaacagaguauuuugcgacacuaugaacucaagaacuuuaccauccgaaguuaaucuauguaacauagauauauuuaacccaaaauacgacugcaaaauaaugacaucaaaaacagauguaucaucaucaguuauaaccucccucggagcaauaguaucaugcuauggaaaaacaaaaugcacagcaucaaacaaaaaucguggaauuauaaaaacauucucaaacggcugugacuacgucagcaauaaaggaguagacacagucucaguaggaaacacuuuauacuauguuaacaaacaagaaggaaaaucacucuacgucaaaggcgaaccaauaauaaauuucuaugacccacucguauucccauccgacgaauuugacgcaucaauaucacaaguaaaugaaaaaauaaaccaaagccuagcauuuauacgaaaaucagacgaacuacuacacaacguaaacguagguaaaagcacaaccaauauaaugauaacaacaauaaucauaguaauaaucguaauauuacuauuacuaauagcuguaggauuguuccuauacugcaaagcaagaucaacaccaguaaccuuaucuaaggaccaacuaucaggaaucaauaacauugccuucucaaacuaaggacuagucccuguucccagagcccacuuuuuuuucuuuuuuugaaauaaaauagccugucuuucagaucuaaaaaaaaaaaaaaaaaaaaaaaaaaaaaaaaaaaaaaaaaaaaaaaaaaaaaaaaaaaaaaaaugcaucccccccccccccccccccccccccccccccaaaggcucuuuucagagccaccagaauu

SEQ ID NO: 13234 - RNA, 1981 nt, Artificial Sequence
  mRNA product Design a-3 comprising derived and/or modified sequence from HRSV(Memphis-37)__AIY60640.1__F_DSCav1_mut0 (opt11)
gggagagggcgcuuggcuugcaaggacccugagcugcggcauugaagcacacccaacccaacucgacugaagucagccucacugaaccggaucugagaaucuucucucucugggcuugccagggcucuccgaaccuagcuagcauccucuucaauuccaacuagaaagcuuaccauggaacuaccuauccuuaaaaccaacgcaaucaccaccauccuugccgcagucacacucugcuucgcauccucacagaacaucaccgaagaguucuaucaaucaaccugcuccgccguauccaaaggauaccucucagcccuccgcaccggcugguauaccucagucauaacaaucgaauuaucaaauaucaaggagaacaaaugcaacggcaccgacgccaaagucaaacucauaaaacaagaacuagacaaauacaaaaacgccgugacagaacuccaacuccucaugcaguccacccccgcagccggauccggcucagcaaucgccucgggcauugcaguaugcaaaguccuccaccucgaaggcgaagucaacaaaaucaaaaacgcccuccucuccaccaacaaagccgucgucucccucuccaacggcguaucuguccucacuuucaagguccucgaccucaaaaacuacaucgacaagcaacuacuuccaauccucaacaagcaauccugcucaaucucaaacaucgaaaccguaauagaguuccaacaaaagaacaaccgccuccucgaaaucacccgcgaguucuccguuaacgccggugucacuaccccagucagcaccuacaugcucaccaacuccgaacuccuuucucugaucaacgacaugccaaucaccaacgaucaaaagaaauuaauguccaacaacguccagaucguccgccaacaaagcuacagcaucaugugcaucauaaaagaagaaguacuugcguacguaguucaacuaccccuuuacggcguaaucgacaccccaugcuggaaacuccacaccuccccacuaugcaccaccaacaccaaagaaggauccaacaucugccuaacccgcaccgaccgcggcugguacugcgacaacgcugggagcgucucauucuucccacaagcagaaaccugcaaaguccaaucgaaccgcguauucugcgacaccaugaacuccagaacccuaccaagcgaagucaaucuuugcaacaucgacauauuuaaccccaaauacgacugcaaaaucaugacaucaaagaccgacgucucaucuucagucauuaccucacucggcgcaauugucagcugcuacggaaagaccaaauguaccgccuccaauaaaaaccguggaaucauaaaaaccuuuagcaacggcugcgacuacgucuccaacaaaggagucgacaccgucuccgucggcaacacccucuacuacgucaacaaacaagaaggaaaaucccucuacgugaaaggcgaacccauaauaaacuucuacgacccccuagucuuccccucugacgaguucgacgccuccaucucccaagucaacgaaaagauaaaucaaucacuagccuucauacgcaaaucugacgaacuucuccacaacgucaacgucggcaaauccaccaccaacauaaugaucacaacgauaauaaucgugaucauaguaauccuacuucuccucaucgcaguaggucuauuccuauacugcaaagcccgcagcacccccgucacccuaucaaaagaccaacucuccggcaucaacaacaucgccuucucaaacuaaggacuagucccuguucccagagcccacuuuuuuuucuuuuuuugaaauaaaauagccugucuuucagaucuaaaaaaaaaaaaaaaaaaaaaaaaaaaaaaaaaaaaaaaaaaaaaaaaaaaaaaaaaaaaaaaaugcaucccccccccccccccccccccccccccccccaaaggcucuuuucagagccaccagaauu

SEQ ID NO: 13235 - RNA, 1930 nt, Artificial Sequence
  mRNA product Design a-4 comprising derived and/or modified sequence from HRSV(Memphis-37)__AIY60640.1__F_DSCav1_mut0 (opt1)
gggagacuccugucgggcggaaguaggaggaguagaguuuaaaaacaguacucuuuuuccgguucgggacguaguugaagcaacgacaagccggauaaccgcucuugagacaggaagcuuaccauggagcugcccauccucaagaccaacgccaucaccacgauccuggccgcggugacccugugcuucgccagcucccagaacaucaccgaggaguucuaccagagcacgugcuccgccgucagcaagggcuaccucuccgcccugcgcaccgggugguacaccagcgugaucaccaucgagcuguccaacaucaaggagaacaagugcaacggcaccgacgccaaggugaagcucaucaagcaggagcuggacaaguacaagaacgcggucacggagcugcagcuccugaugcagagcaccccggccgccggcuccgggagcgcgaucgccuccggcaucgccgucugcaaggugcugcaccucgagggcgaggugaacaagaucaagaacgcccugcuguccaccaacaaggccgucgugagccucuccaacggggugagcguccugaccuucaaggugcuggaccucaagaacuacaucgacaagcagcugcugcccauccugaacaagcagagcugcuccaucagcaacaucgagaccgucaucgaguuccagcagaagaacaaccgccuccuggagaucacgcgggaguucagcgugaacgcgggcgugaccacccccgucuccaccuacaugcugacgaacagcgagcuccugucccugaucaacgacaugccgaucaccaacgaccagaagaagcucaugagcaacaacgugcagaucgugcgccagcaguccuacagcaucaugugcaucaucaaggaggagguccuggccuacguggugcagcugccccucuacggggucaucgacacccccugcuggaagcugcacaccagcccccugugcacgaccaacaccaaggagggcuccaacaucugccucacccggacggaccgcgggugguacugcgacaacgccggcagcguguccuucuucccgcaggccgagaccugcaagguccagagcaaccggguguucugcgacaccaugaacucccggacccugcccagcgaggugaaccucugcaacaucgacaucuucaaccccaaguacgacugcaagaucaugacguccaagaccgacgucagcuccagcgugaucaccucccugggcgccaucgugagcugcuacgggaagaccaagugcacggcgagcaacaagaaccgcggcaucaucaagaccuucuccaacgggugcgacuacgucagcaacaagggcguggacaccguguccgucggcaacacccuguacuacgugaacaagcaggagggcaagagccucuacgugaagggggagcccaucaucaacuucuacgacccgcuggucuuccccuccgacgaguucgacgccagcaucucccaggugaacgagaagaucaaccagagccuggccuucauccggaaguccgacgagcuccugcacaacgugaacgucggcaagagcaccacgaacaucaugaucaccaccaucaucaucgugaucaucgugauccugcugcuccugaucgccgucgggcuguuccucuacugcaaggcccgcuccacccccgugacgcugagcaaggaccagcuguccgggaucaacaacaucgcguucagcaacugaggacuagucccuguucccagagcccacuuuuuuuucuuuuuuugaaauaaaauagccugucuuucagaucuaaaaaaaaaaaaaaaaaaaaaaaaaaaaaaaaaaaaaaaaaaaaaaaaaaaaaaaaaaaaaaaaugcaucccccccccccccccccccccccccccccccaaaggcucuuuucagagccaccagaauu

SEQ ID NO: 13236 - RNA, 1930 nt, Artificial Sequence
  mRNA product Design a-4 comprising derived and/or modified sequence from HRSV(Memphis-37)__AIY60640.1__F_DSCav1_mut0 (opt1)
gggagacuccugucgggcggaaguaggaggaguagaguuuaaaaacaguacucuuuuuccgguucgggacguaguugaagcaacgacaagccggauaaccgcucuugagacaggaagcuuaccauggagcugcccauccucaagaccaacgccaucaccacgauccuggccgcggugacccugugcuucgccagcucccagaacaucaccgaggaguucuaccagagcacgugcuccgccgucagcaagggcuaccucuccgcccugcgcaccgggugguacaccagcgugaucaccaucgagcuguccaacaucaaggagaacaagugcaacggcaccgacgccaaggugaagcucaucaagcaggagcuggacaaguacaagaacgcggucacggagcugcagcuccugaugcagagcaccccggccgccggguccggcagcgccaucgcguccgggaucgccgugugcaaggugcugcaccucgagggcgaggucaacaagaucaagaacgcccugcugagcaccaacaaggccguggugucccucagcaacggcgucuccgugcugaccuucaaggugcuggaccucaagaacuacaucgacaagcagcugcugcccauccucaacaagcagagcugcuccaucagcaacaucgagacggucaucgaguuccagcagaagaacaaccggcugcuggagaucacccgcgaguucuccgugaacgccggggugaccacccccgucagcacguacaugcucaccaacagcgagcugcugucccucaucaacgacaugcccaucaccaacgaccagaagaagcugaugagcaacaacgugcagaucgugcggcagcaguccuacagcaucaugugcaucaucaaggaggagguccuggcguacguggugcagcucccgcuguacggcgucaucgacacccccugcuggaagcugcacacgagcccccucugcaccaccaacaccaaggagggguccaacaucugccugacgcgcaccgaccggggcugguacugcgacaacgccggguccgugagcuucuucccccaggccgagaccugcaaggugcaguccaaccgcgucuucugcgacaccaugaacagccggacgcucccguccgaggugaaccugugcaacaucgacaucuucaaccccaaguacgacugcaagaucaugaccagcaagaccgacgucuccagcuccgugaucaccagccugggcgccaucguguccugcuacggcaagacgaagugcaccgccagcaacaagaaccgggggaucaucaagaccuucuccaacggcugcgacuacgucagcaacaaggggguggacaccgugagcgucggcaacacgcucuacuacgugaacaagcaggagggcaagucccuguacgugaagggggagcccaucaucaacuucuacgacccccuggucuucccgagcgacgaguucgacgcguccaucagccaggugaacgagaagaucaaccagucccucgccuucauccgcaagagcgacgagcugcugcacaacgugaacgucggcaaguccaccaccaacaucaugaucaccaccaucaucaucgugaucaucgugauccuccugcugcucaucgccgucgggcuguuccuguacugcaaggcccggagcacgcccgugacccuguccaaggaccagcucagcggcaucaacaacaucgccuucuccaacugaggacuagucccuguucccagagcccacuuuuuuuucuuuuuuugaaauaaaauagccugucuuucagaucuaaaaaaaaaaaaaaaaaaaaaaaaaaaaaaaaaaaaaaaaaaaaaaaaaaaaaaaaaaaaaaaaugcaucccccccccccccccccccccccccccccccaaaggcucuuuucagagccaccagaauu

SEQ ID NO: 13237 - RNA, 1930 nt, Artificial Sequence
  mRNA product Design a-4 comprising derived and/or modified sequence from HRSV(Memphis-37)__AIY60640.1__F_DSCav1_mut0 (opt2)
gggagacuccugucgggcggaaguaggaggaguagaguuuaaaaacaguacucuuuuuccgguucgggacguaguugaagcaacgacaagccggauaaccgcucuugagacaggaagcuuaccauggagcuccccauccucaagaccaacgccaucaccaccauccucgccgccgucacccucugcuucgccuccucccagaacaucaccgaggaguucuaccaguccaccugcuccgccgucuccaagggcuaccucuccgcccuccgcaccggcugguacaccuccgucaucaccaucgagcucuccaacaucaaggagaacaagugcaacggcaccgacgccaaggucaagcucaucaagcaggagcucgacaaguacaagaacgccgucaccgagcuccagcuccucaugcaguccacccccgccgccggcuccggcuccgccaucgccuccggcaucgccgucugcaagguccuccaccucgagggcgaggucaacaagaucaagaacgcccuccucuccaccaacaaggccgucgucucccucuccaacggcgucuccguccucaccuucaagguccucgaccucaagaacuacaucgacaagcagcuccuccccauccucaacaagcaguccugcuccaucuccaacaucgagaccgucaucgaguuccagcagaagaacaaccgccuccucgagaucacccgcgaguucuccgucaacgccggcgucaccacccccgucuccaccuacaugcucaccaacuccgagcuccucucccucaucaacgacaugcccaucaccaacgaccagaagaagcucauguccaacaacguccagaucguccgccagcaguccuacuccaucaugugcaucaucaaggaggagguccucgccuacgucguccagcucccccucuacggcgucaucgacacccccugcuggaagcuccacaccuccccccucugcaccaccaacaccaaggagggcuccaacaucugccucacccgcaccgaccgcggcugguacugcgacaacgccggcuccgucuccuucuucccccaggccgagaccugcaagguccaguccaaccgcgucuucugcgacaccaugaacucccgcacccuccccuccgaggucaaccucugcaacaucgacaucuucaaccccaaguacgacugcaagaucaugaccuccaagaccgacgucuccuccuccgucaucaccucccucggcgccaucgucuccugcuacggcaagaccaagugcaccgccuccaacaagaaccgcggcaucaucaagaccuucuccaacggcugcgacuacgucuccaacaagggcgucgacaccgucuccgucggcaacacccucuacuacgucaacaagcaggagggcaagucccucuacgucaagggcgagcccaucaucaacuucuacgacccccucgucuuccccuccgacgaguucgacgccuccaucucccaggucaacgagaagaucaaccagucccucgccuucauccgcaaguccgacgagcuccuccacaacgucaacgucggcaaguccaccaccaacaucaugaucaccaccaucaucaucgucaucaucgucauccuccuccuccucaucgccgucggccucuuccucuacugcaaggcccgcuccacccccgucacccucuccaaggaccagcucuccggcaucaacaacaucgccuucuccaacugaggacuagucccuguucccagagcccacuuuuuuuucuuuuuuugaaauaaaauagccugucuuucagaucuaaaaaaaaaaaaaaaaaaaaaaaaaaaaaaaaaaaaaaaaaaaaaaaaaaaaaaaaaaaaaaaaugcaucccccccccccccccccccccccccccccccaaaggcucuuuucagagccaccagaauu

SEQ ID NO: 13238 - RNA, 1930 nt, Artificial Sequence
  mRNA product Design a-4 comprising derived and/or modified sequence from HRSV(Memphis-37)__AIY60640.1__F_DSCav1_mut0 (opt3)
gggagacuccugucgggcggaaguaggaggaguagaguuuaaaaacaguacucuuuuuccgguucgggacguaguugaagcaacgacaagccggauaaccgcucuugagacaggaagcuuaccauggagcugcccauccucaagaccaacgccauuacaacuauacuugcugcagugacgcugugcuucgccagcucccagaauaucaccgaagaguuuuaccaaucuacauguucagcggucaguaaaggcuauuugagcgcuuuaagaacugggugguacaccuccguuauuacaaucgaacugucuaacauuaaggagaauaaaugcaacggaaccgacgccaaggugaaacuaaucaagcaggaacucgauaaguauaaaaaugcaguaacugagcugcagcuucugaugcagucgaccccugccgcugguucaggcagcgcaauagccagugggaucgcuguguguaaggucuugcaccucgagggagaagugaacaaaauuaagaaugcccugcuguccacaaacaaagcgguugugucucucagcaauggcgucuccguguuaacguucaagguacuggaccuuaagaacuacaucgauaaacaauugcugccaauucuaaauaagcagucaugcaguaucagcaacauagagacuguuauugaauuucagcagaaaaauaacaggcuccuggagaucacccgggaguucucugugaaugccggugucacaacuccgguguccaccuauaugcuuacaaacucagaacuguugagccucauuaacgacaugcccaucaccaaugaucaaaagaaacugaugaguaacaaugugcagaucguccgccagcagucuuacuccauuauguguauaaucaaggaggaaguuuuagcauaugugguacaacugccucucuacggggugauugacacgccaugcuggaaacuucauacuagcccccuguguacaaccaacacuaaggagggaucgaauaucugcuugacacgaaccgaucguggcugguacugugacaacgcuggcucugucuccuuuuucccucaggccgaaacgugcaaggugcagucaaauagaguguuuugugauaccaugaacaguagaacacugccaagcgaggugaaucucugcaacauagacauuuucaaucccaaauaugauugcaagaucaugacuuccaaaaccgacgucucuagcucagugaucacaagucugggggcaauuguauccuguuacggaaagacuaaaugcaccgcuagcaacaagaauagggguaucauuaagacauuuucuaacggcugugauuauguuucaaauaaagggguggacaccgucagugugggaaacacucuuuacuaugucaacaagcaagagggcaaaagccuguacgugaagggugaaccuauaaucaauuucuaugacccauugguuuuuccguccgaugaguucgacgccucuauuucgcagguuaacgagaaaaucaaucagagccucgcguuuauccggaaguccgaugaacuguuacacaacguaaaugucgggaagucaacgacaaacauuaugauaaccacuaucauuaucgugauuaucguuauacugcuacuccugaucgccgugggacuuuucuuguacugcaaagcacgcaguacccccgucacacugucuaaggaccagcucagcggcauuaauaacaucgcuuucuccaauugaggacuagucccuguucccagagcccacuuuuuuuucuuuuuuugaaauaaaauagccugucuuucagaucuaaaaaaaaaaaaaaaaaaaaaaaaaaaaaaaaaaaaaaaaaaaaaaaaaaaaaaaaaaaaaaaaugcaucccccccccccccccccccccccccccccccaaaggcucuuuucagagccaccagaauu

SEQ ID NO: 13239 - RNA, 1930 nt, Artificial Sequence
  mRNA product Design a-4 comprising derived and/or modified sequence from HRSV(Memphis-37)__AIY60640.1__F_DSCav1_mut0 (opt4)
gggagacuccugucgggcggaaguaggaggaguagaguuuaaaaacaguacucuuuuuccgguucgggacguaguugaagcaacgacaagccggauaaccgcucuugagacaggaagcuuaccauggagcugcccauccugaagaccaacgccaucaccaccauccuggccgccgugacccugugcuucgccagcagccagaacaucaccgaggaguucuaccagagcaccugcagcgccgugagcaagggcuaccugagcgcccugagaaccggcugguacaccagcgugaucaccaucgagcugagcaacaucaaggagaacaagugcaacggcaccgacgccaaggugaagcugaucaagcaggagcuggacaaguacaagaacgccgugaccgagcugcagcugcugaugcagagcacccccgccgccggcagcggcagcgccaucgccagcggcaucgccgugugcaaggugcugcaccuggagggcgaggugaacaagaucaagaacgcccugcugagcaccaacaaggccguggugagccugagcaacggcgugagcgugcugaccuucaaggugcuggaccugaagaacuacaucgacaagcagcugcugcccauccugaacaagcagagcugcagcaucagcaacaucgagaccgugaucgaguuccagcagaagaacaacagacugcuggagaucaccagagaguucagcgugaacgccggcgugaccacccccgugagcaccuacaugcugaccaacagcgagcugcugagccugaucaacgacaugcccaucaccaacgaccagaagaagcugaugagcaacaacgugcagaucgugagacagcagagcuacagcaucaugugcaucaucaaggaggaggugcuggccuacguggugcagcugccccuguacggcgugaucgacacccccugcuggaagcugcacaccagcccccugugcaccaccaacaccaaggagggcagcaacaucugccugaccagaaccgacagaggcugguacugcgacaacgccggcagcgugagcuucuucccccaggccgagaccugcaaggugcagagcaacagaguguucugcgacaccaugaacagcagaacccugcccagcgaggugaaccugugcaacaucgacaucuucaaccccaaguacgacugcaagaucaugaccagcaagaccgacgugagcagcagcgugaucaccagccugggcgccaucgugagcugcuacggcaagaccaagugcaccgccagcaacaagaacagaggcaucaucaagaccuucagcaacggcugcgacuacgugagcaacaagggcguggacaccgugagcgugggcaacacccuguacuacgugaacaagcaggagggcaagagccuguacgugaagggcgagcccaucaucaacuucuacgacccccugguguuccccagcgacgaguucgacgccagcaucagccaggugaacgagaagaucaaccagagccuggccuucaucagaaagagcgacgagcugcugcacaacgugaacgugggcaagagcaccaccaacaucaugaucaccaccaucaucaucgugaucaucgugauccugcugcugcugaucgccgugggccuguuccuguacugcaaggccagaagcacccccgugacccugagcaaggaccagcugagcggcaucaacaacaucgccuucagcaacugaggacuagucccuguucccagagcccacuuuuuuuucuuuuuuugaaauaaaauagccugucuuucagaucuaaaaaaaaaaaaaaaaaaaaaaaaaaaaaaaaaaaaaaaaaaaaaaaaaaaaaaaaaaaaaaaaugcaucccccccccccccccccccccccccccccccaaaggcucuuuucagagccaccagaauu

SEQ ID NO: 13240 - RNA, 1930 nt, Artificial Sequence
  mRNA product Design a-4 comprising derived and/or modified sequence from HRSV(Memphis-37)__AIY60640.1__F_DSCav1_mut0 (opt5)
gggagacuccugucgggcggaaguaggaggaguagaguuuaaaaacaguacucuuuuuccgguucgggacguaguugaagcaacgacaagccggauaaccgcucuugagacaggaagcuuaccauggagcugcccauccucaagaccaacgccauuacaacgauccuggcugccgugacccuuugcuucgcgagcucccagaauauuacagaagaguuuuaccaaucuaccuguagcgcugucuccaaaggcuaucugucugcccucagaacagggugguacaccagcguuaucacaauugaacuguccaacaucaaggagaauaaaugcaacggaaccgacgccaaggugaaacuuaucaagcaggaacuggauaaguauaaaaaugcugugacggagcuccagcugcugaugcagucuaccccugccgcuggcagcggguccgccauugcgagcggaaucgccgucuguaaggugcuccaccuggagggcgaaguuaacaaaauuaagaaugcccuucugucuacaaacaaagcuguggucucccucagcaauggggugucuguucugaccuucaaggugcuugaccugaagaacuacaucgauaaacaacuccugccgauucugaauaagcaguccugcagcaucucuaacauugagacagucaucgaauuucagcagaaaaauaaccggcuccuggagaucacccgcgaguucuccgugaaugcuggagugacgacacccgucagcaccuauaugcuuacaaacuccgaacugcucucucugauuaacgacaugccuaucaccaaugaucaaaagaaacuuaugagcaacaauguucagauugugagacagcaguccuacagcaucauguguauuaucaaggaggaagugcuggccuaugucgugcaacucccccuguacggcguuaucgacaccccuugcuggaaacugcauacaucuccccucuguacgaccaacacaaaggagggcuccaauauuugccugacccggacagaucgcgggugguacugugacaacgcgggaagcgugagcuuuuucccucaggccgaaaccugcaagguccagucuaauagaguguuuugugauacgaugaacuccagaacacugccgucugagguuaaucucugcaacaucgacauuuucaaucccaaauaugauugcaagaucaugaccagcaaaaccgacguguccagcucugucauuacaucccugggcgcuaucgugagcuguuacgggaagaccaaaugcacagccucuaacaagaaucggggaaucauuaagacguuuuccaacggcugugauuaugucagcaauaaagggguggacaccguuuccgugggaaacacacuuuacuaugucaacaagcaagagggcaaaucucuguacgugaagggcgaaccuaucauuaauuucuaugacccccucguuuuuccuagcgaugaguucgacgcuuccaucucucaggugaacgaaaagauuaaucagagccuggccuuuauccgcaaguccgaugagcugcuccacaacgucaauguggggaaaagcaccacaaacauuaugaucaccacgaucauuaucgugauuaucguuauucugcuucugcucaucgccgucggacuguuccuguacugcaaagcuagaucuacccccgugacacuuuccaaggaccagcucagcggcaucaauaacauugcguucucuaauugaggacuagucccuguucccagagcccacuuuuuuuucuuuuuuugaaauaaaauagccugucuuucagaucuaaaaaaaaaaaaaaaaaaaaaaaaaaaaaaaaaaaaaaaaaaaaaaaaaaaaaaaaaaaaaaaaugcaucccccccccccccccccccccccccccccccaaaggcucuuuucagagccaccagaauu

SEQ ID NO: 13241 - RNA, 1930 nt, Artificial Sequence
  mRNA product Design a-4 comprising derived and/or modified sequence from HRSV(Memphis-37)__AIY60640.1__F_DSCav1_mut0 (opt6)
gggagacuccugucgggcggaaguaggaggaguagaguuuaaaaacaguacucuuuuuccgguucgggacguaguugaagcaacgacaagccggauaaccgcucuugagacaggaagcuuaccauggaauuaccaaucuuaaaaacaaacgccauaacaaccauccucgcagcaguaacccuaugcuuugcauccucacaaaacauaacugaagaauuuuaccaaucaacaugcucagcaguaucaaaaggauaucuaucagcccucagaacaggaugguacacaucagucauuacaaucgaacuuucaaacauaaaagaaaauaaauguaacggcacagaugccaaaguaaaauuaauuaaacaagaacuugacaaauacaaaaaugccguaacagaacuacaacuacuaaugcaaaguacuccugcugcaggaagcggaucugcaauagcaucagguauagcaguauguaaaguucuacaccuagaaggcgaaguaaacaaaauuaaaaacgcacuacucucaacaaauaaagcaguugucucccuaucaaacggaguaucaguauuaacuuucaaaguacuagaccucaaaaacuauauagacaaacaacuauuaccaauacuaaacaaacaaagcugcucuaucuccaacaucgaaacaguaauagaauuucaacaaaaaaauaauagacuacuugaaauaaccagagaauuuucaguaaacgccggaguaacaacaccaguaucaacuuacaugcuaacaaacuccgaacuacuaucauuaauaaacgacaugcccauaacaaacgaccaaaaaaaauuaaugucaaacaacguccaaaucguacgacaacaauccuauuccauaauguguauaauaaaagaagaaguacuagcauacguaguacaauuaccauuauauggaguaauagauaccccuugcuggaaacuacacacaucaccccuaugcacuacaaauacgaaagaagguucaaauauaugcuuaacuagaaccgauagagguugguauugugacaacgcuggaucaguaucauuuuucccacaagcagaaacaugcaaaguacaaucaaacagaguauuuugcgacacuaugaacucaagaacuuuaccauccgaaguuaaucuauguaacauagauauauuuaacccaaaauacgacugcaaaauaaugacaucaaaaacagauguaucaucaucaguuauaaccucccucggagcaauaguaucaugcuauggaaaaacaaaaugcacagcaucaaacaaaaaucguggaauuauaaaaacauucucaaacggcugugacuacgucagcaauaaaggaguagacacagucucaguaggaaacacuuuauacuauguuaacaaacaagaaggaaaaucacucuacgucaaaggcgaaccaauaauaaauuucuaugacccacucguauucccauccgacgaauuugacgcaucaauaucacaaguaaaugaaaaaauaaaccaaagccuagcauuuauacgaaaaucagacgaacuacuacacaacguaaacguagguaaaagcacaaccaauauaaugauaacaacaauaaucauaguaauaaucguaauauuacuauuacuaauagcuguaggauuguuccuauacugcaaagcaagaucaacaccaguaaccuuaucuaaggaccaacuaucaggaaucaauaacauugccuucucaaacuaaggacuagucccuguucccagagcccacuuuuuuuucuuuuuuugaaauaaaauagccugucuuucagaucuaaaaaaaaaaaaaaaaaaaaaaaaaaaaaaaaaaaaaaaaaaaaaaaaaaaaaaaaaaaaaaaaugcaucccccccccccccccccccccccccccccccaaaggcucuuuucagagccaccagaauu

SEQ ID NO: 13242 - RNA, 1930 nt, Artificial Sequence
  mRNA product Design a-4 comprising derived and/or modified sequence from HRSV(Memphis-37)__AIY60640.1__F_DSCav1_mut0 (opt11)
gggagacuccugucgggcggaaguaggaggaguagaguuuaaaaacaguacucuuuuuccgguucgggacguaguugaagcaacgacaagccggauaaccgcucuugagacaggaagcuuaccauggaacuaccuauccuuaaaaccaacgcaaucaccaccauccuugccgcagucacacucugcuucgcauccucacagaacaucaccgaagaguucuaucaaucaaccugcuccgccguauccaaaggauaccucucagcccuccgcaccggcugguauaccucagucauaacaaucgaauuaucaaauaucaaggagaacaaaugcaacggcaccgacgccaaagucaaacucauaaaacaagaacuagacaaauacaaaaacgccgugacagaacuccaacuccucaugcaguccacccccgcagccggauccggcucagcaaucgccucgggcauugcaguaugcaaaguccuccaccucgaaggcgaagucaacaaaaucaaaaacgcccuccucuccaccaacaaagccgucgucucccucuccaacggcguaucuguccucacuuucaagguccucgaccucaaaaacuacaucgacaagcaacuacuuccaauccucaacaagcaauccugcucaaucucaaacaucgaaaccguaauagaguuccaacaaaagaacaaccgccuccucgaaaucacccgcgaguucuccguuaacgccggugucacuaccccagucagcaccuacaugcucaccaacuccgaacuccuuucucugaucaacgacaugccaaucaccaacgaucaaaagaaauuaauguccaacaacguccagaucguccgccaacaaagcuacagcaucaugugcaucauaaaagaagaaguacuugcguacguaguucaacuaccccuuuacggcguaaucgacaccccaugcuggaaacuccacaccuccccacuaugcaccaccaacaccaaagaaggauccaacaucugccuaacccgcaccgaccgcggcugguacugcgacaacgcugggagcgucucauucuucccacaagcagaaaccugcaaaguccaaucgaaccgcguauucugcgacaccaugaacuccagaacccuaccaagcgaagucaaucuuugcaacaucgacauauuuaaccccaaauacgacugcaaaaucaugacaucaaagaccgacgucucaucuucagucauuaccucacucggcgcaauugucagcugcuacggaaagaccaaauguaccgccuccaauaaaaaccguggaaucauaaaaaccuuuagcaacggcugcgacuacgucuccaacaaaggagucgacaccgucuccgucggcaacacccucuacuacgucaacaaacaagaaggaaaaucccucuacgugaaaggcgaacccauaauaaacuucuacgacccccuagucuuccccucugacgaguucgacgccuccaucucccaagucaacgaaaagauaaaucaaucacuagccuucauacgcaaaucugacgaacuucuccacaacgucaacgucggcaaauccaccaccaacauaaugaucacaacgauaauaaucgugaucauaguaauccuacuucuccucaucgcaguaggucuauuccuauacugcaaagcccgcagcacccccgucacccuaucaaaagaccaacucuccggcaucaacaacaucgccuucucaaacuaaggacuagucccuguucccagagcccacuuuuuuuucuuuuuuugaaauaaaauagccugucuuucagaucuaaaaaaaaaaaaaaaaaaaaaaaaaaaaaaaaaaaaaaaaaaaaaaaaaaaaaaaaaaaaaaaaugcaucccccccccccccccccccccccccccccccaaaggcucuuuucagagccaccagaauu

SEQ ID NO: 13243 - RNA, 1876 nt, Artificial Sequence
  mRNA product Design a-5 comprising derived and/or modified sequence from HRSV(Memphis-37)__AIY60640.1__F_DSCav1_mut0 (opt1)
gggagacuuucccauucuguagcagaauuugguguugccuguggucuuggucccgcggagaagcuuaccauggagcugcccauccucaagaccaacgccaucaccacgauccuggccgcggugacccugugcuucgccagcucccagaacaucaccgaggaguucuaccagagcacgugcuccgccgucagcaagggcuaccucuccgcccugcgcaccgggugguacaccagcgugaucaccaucgagcuguccaacaucaaggagaacaagugcaacggcaccgacgccaaggugaagcucaucaagcaggagcuggacaaguacaagaacgcggucacggagcugcagcuccugaugcagagcaccccggccgccggcuccgggagcgcgaucgccuccggcaucgccgucugcaaggugcugcaccucgagggcgaggugaacaagaucaagaacgcccugcuguccaccaacaaggccgucgugagccucuccaacggggugagcguccugaccuucaaggugcuggaccucaagaacuacaucgacaagcagcugcugcccauccugaacaagcagagcugcuccaucagcaacaucgagaccgucaucgaguuccagcagaagaacaaccgccuccuggagaucacgcgggaguucagcgugaacgcgggcgugaccacccccgucuccaccuacaugcugacgaacagcgagcuccugucccugaucaacgacaugccgaucaccaacgaccagaagaagcucaugagcaacaacgugcagaucgugcgccagcaguccuacagcaucaugugcaucaucaaggaggagguccuggccuacguggugcagcugccccucuacggggucaucgacacccccugcuggaagcugcacaccagcccccugugcacgaccaacaccaaggagggcuccaacaucugccucacccggacggaccgcgggugguacugcgacaacgccggcagcguguccuucuucccgcaggccgagaccugcaagguccagagcaaccggguguucugcgacaccaugaacucccggacccugcccagcgaggugaaccucugcaacaucgacaucuucaaccccaaguacgacugcaagaucaugacguccaagaccgacgucagcuccagcgugaucaccucccugggcgccaucgugagcugcuacgggaagaccaagugcacggcgagcaacaagaaccgcggcaucaucaagaccuucuccaacgggugcgacuacgucagcaacaagggcguggacaccguguccgucggcaacacccuguacuacgugaacaagcaggagggcaagagccucuacgugaagggggagcccaucaucaacuucuacgacccgcuggucuuccccuccgacgaguucgacgccagcaucucccaggugaacgagaagaucaaccagagccuggccuucauccggaaguccgacgagcuccugcacaacgugaacgucggcaagagcaccacgaacaucaugaucaccaccaucaucaucgugaucaucgugauccugcugcuccugaucgccgucgggcuguuccucuacugcaaggcccgcuccacccccgugacgcugagcaaggaccagcuguccgggaucaacaacaucgcguucagcaacugaggacuagucccuguucccagagcccacuuuuuuuucuuuuuuugaaauaaaauagccugucuuucagaucuaaaaaaaaaaaaaaaaaaaaaaaaaaaaaaaaaaaaaaaaaaaaaaaaaaaaaaaaaaaaaaaaugcaucccccccccccccccccccccccccccccccaaaggcucuuuucagagccaccagaauu

SEQ ID NO: 13244 - RNA, 1876 nt, Artificial Sequence
  mRNA product Design a-5 comprising derived and/or modified sequence from HRSV(Memphis-37)__AIY60640.1__F_DSCav1_mut0 (opt1)
gggagacuuucccauucuguagcagaauuugguguugccuguggucuuggucccgcggagaagcuuaccauggagcugcccauccucaagaccaacgccaucaccacgauccuggccgcggugacccugugcuucgccagcucccagaacaucaccgaggaguucuaccagagcacgugcuccgccgucagcaagggcuaccucuccgcccugcgcaccgggugguacaccagcgugaucaccaucgagcuguccaacaucaaggagaacaagugcaacggcaccgacgccaaggugaagcucaucaagcaggagcuggacaaguacaagaacgcggucacggagcugcagcuccugaugcagagcaccccggccgccggguccggcagcgccaucgcguccgggaucgccgugugcaaggugcugcaccucgagggcgaggucaacaagaucaagaacgcccugcugagcaccaacaaggccguggugucccucagcaacggcgucuccgugcugaccuucaaggugcuggaccucaagaacuacaucgacaagcagcugcugcccauccucaacaagcagagcugcuccaucagcaacaucgagacggucaucgaguuccagcagaagaacaaccggcugcuggagaucacccgcgaguucuccgugaacgccggggugaccacccccgucagcacguacaugcucaccaacagcgagcugcugucccucaucaacgacaugcccaucaccaacgaccagaagaagcugaugagcaacaacgugcagaucgugcggcagcaguccuacagcaucaugugcaucaucaaggaggagguccuggcguacguggugcagcucccgcuguacggcgucaucgacacccccugcuggaagcugcacacgagcccccucugcaccaccaacaccaaggagggguccaacaucugccugacgcgcaccgaccggggcugguacugcgacaacgccggguccgugagcuucuucccccaggccgagaccugcaaggugcaguccaaccgcgucuucugcgacaccaugaacagccggacgcucccguccgaggugaaccugugcaacaucgacaucuucaaccccaaguacgacugcaagaucaugaccagcaagaccgacgucuccagcuccgugaucaccagccugggcgccaucguguccugcuacggcaagacgaagugcaccgccagcaacaagaaccgggggaucaucaagaccuucuccaacggcugcgacuacgucagcaacaaggggguggacaccgugagcgucggcaacacgcucuacuacgugaacaagcaggagggcaagucccuguacgugaagggggagcccaucaucaacuucuacgacccccuggucuucccgagcgacgaguucgacgcguccaucagccaggugaacgagaagaucaaccagucccucgccuucauccgcaagagcgacgagcugcugcacaacgugaacgucggcaaguccaccaccaacaucaugaucaccaccaucaucaucgugaucaucgugauccuccugcugcucaucgccgucgggcuguuccuguacugcaaggcccggagcacgcccgugacccuguccaaggaccagcucagcggcaucaacaacaucgccuucuccaacugaggacuagucccuguucccagagcccacuuuuuuuucuuuuuuugaaauaaaauagccugucuuucagaucuaaaaaaaaaaaaaaaaaaaaaaaaaaaaaaaaaaaaaaaaaaaaaaaaaaaaaaaaaaaaaaaaugcaucccccccccccccccccccccccccccccccaaaggcucuuuucagagccaccagaauu

SEQ ID NO: 13245 - RNA, 1876 nt, Artificial Sequence
  mRNA product Design a-5 comprising derived and/or modified sequence from HRSV(Memphis-37)__AIY60640.1__F_DSCav1_mut0 (opt2)
gggagacuuucccauucuguagcagaauuugguguugccuguggucuuggucccgcggagaagcuuaccauggagcuccccauccucaagaccaacgccaucaccaccauccucgccgccgucacccucugcuucgccuccucccagaacaucaccgaggaguucuaccaguccaccugcuccgccgucuccaagggcuaccucuccgcccuccgcaccggcugguacaccuccgucaucaccaucgagcucuccaacaucaaggagaacaagugcaacggcaccgacgccaaggucaagcucaucaagcaggagcucgacaaguacaagaacgccgucaccgagcuccagcuccucaugcaguccacccccgccgccggcuccggcuccgccaucgccuccggcaucgccgucugcaagguccuccaccucgagggcgaggucaacaagaucaagaacgcccuccucuccaccaacaaggccgucgucucccucuccaacggcgucuccguccucaccuucaagguccucgaccucaagaacuacaucgacaagcagcuccuccccauccucaacaagcaguccugcuccaucuccaacaucgagaccgucaucgaguuccagcagaagaacaaccgccuccucgagaucacccgcgaguucuccgucaacgccggcgucaccacccccgucuccaccuacaugcucaccaacuccgagcuccucucccucaucaacgacaugcccaucaccaacgaccagaagaagcucauguccaacaacguccagaucguccgccagcaguccuacuccaucaugugcaucaucaaggaggagguccucgccuacgucguccagcucccccucuacggcgucaucgacacccccugcuggaagcuccacaccuccccccucugcaccaccaacaccaaggagggcuccaacaucugccucacccgcaccgaccgcggcugguacugcgacaacgccggcuccgucuccuucuucccccaggccgagaccugcaagguccaguccaaccgcgucuucugcgacaccaugaacucccgcacccuccccuccgaggucaaccucugcaacaucgacaucuucaaccccaaguacgacugcaagaucaugaccuccaagaccgacgucuccuccuccgucaucaccucccucggcgccaucgucuccugcuacggcaagaccaagugcaccgccuccaacaagaaccgcggcaucaucaagaccuucuccaacggcugcgacuacgucuccaacaagggcgucgacaccgucuccgucggcaacacccucuacuacgucaacaagcaggagggcaagucccucuacgucaagggcgagcccaucaucaacuucuacgacccccucgucuuccccuccgacgaguucgacgccuccaucucccaggucaacgagaagaucaaccagucccucgccuucauccgcaaguccgacgagcuccuccacaacgucaacgucggcaaguccaccaccaacaucaugaucaccaccaucaucaucgucaucaucgucauccuccuccuccucaucgccgucggccucuuccucuacugcaaggcccgcuccacccccgucacccucuccaaggaccagcucuccggcaucaacaacaucgccuucuccaacugaggacuagucccuguucccagagcccacuuuuuuuucuuuuuuugaaauaaaauagccugucuuucagaucuaaaaaaaaaaaaaaaaaaaaaaaaaaaaaaaaaaaaaaaaaaaaaaaaaaaaaaaaaaaaaaaaugcaucccccccccccccccccccccccccccccccaaaggcucuuuucagagccaccagaauu

SEQ ID NO: 13246 - RNA, 1876 nt, Artificial Sequence
  mRNA product Design a-5 comprising derived and/or modified sequence from HRSV(Memphis-37)__AIY60640.1__F_DSCav1_mut0 (opt3)
gggagacuuucccauucuguagcagaauuugguguugccuguggucuuggucccgcggagaagcuuaccauggagcugcccauccucaagaccaacgccauuacaacuauacuugcugcagugacgcugugcuucgccagcucccagaauaucaccgaagaguuuuaccaaucuacauguucagcggucaguaaaggcuauuugagcgcuuuaagaacugggugguacaccuccguuauuacaaucgaacugucuaacauuaaggagaauaaaugcaacggaaccgacgccaaggugaaacuaaucaagcaggaacucgauaaguauaaaaaugcaguaacugagcugcagcuucugaugcagucgaccccugccgcugguucaggcagcgcaauagccagugggaucgcuguguguaaggucuugcaccucgagggagaagugaacaaaauuaagaaugcccugcuguccacaaacaaagcgguugugucucucagcaauggcgucuccguguuaacguucaagguacuggaccuuaagaacuacaucgauaaacaauugcugccaauucuaaauaagcagucaugcaguaucagcaacauagagacuguuauugaauuucagcagaaaaauaacaggcuccuggagaucacccgggaguucucugugaaugccggugucacaacuccgguguccaccuauaugcuuacaaacucagaacuguugagccucauuaacgacaugcccaucaccaaugaucaaaagaaacugaugaguaacaaugugcagaucguccgccagcagucuuacuccauuauguguauaaucaaggaggaaguuuuagcauaugugguacaacugccucucuacggggugauugacacgccaugcuggaaacuucauacuagcccccuguguacaaccaacacuaaggagggaucgaauaucugcuugacacgaaccgaucguggcugguacugugacaacgcuggcucugucuccuuuuucccucaggccgaaacgugcaaggugcagucaaauagaguguuuugugauaccaugaacaguagaacacugccaagcgaggugaaucucugcaacauagacauuuucaaucccaaauaugauugcaagaucaugacuuccaaaaccgacgucucuagcucagugaucacaagucugggggcaauuguauccuguuacggaaagacuaaaugcaccgcuagcaacaagaauagggguaucauuaagacauuuucuaacggcugugauuauguuucaaauaaagggguggacaccgucagugugggaaacacucuuuacuaugucaacaagcaagagggcaaaagccuguacgugaagggugaaccuauaaucaauuucuaugacccauugguuuuuccguccgaugaguucgacgccucuauuucgcagguuaacgagaaaaucaaucagagccucgcguuuauccggaaguccgaugaacuguuacacaacguaaaugucgggaagucaacgacaaacauuaugauaaccacuaucauuaucgugauuaucguuauacugcuacuccugaucgccgugggacuuuucuuguacugcaaagcacgcaguacccccgucacacugucuaaggaccagcucagcggcauuaauaacaucgcuuucuccaauugaggacuagucccuguucccagagcccacuuuuuuuucuuuuuuugaaauaaaauagccugucuuucagaucuaaaaaaaaaaaaaaaaaaaaaaaaaaaaaaaaaaaaaaaaaaaaaaaaaaaaaaaaaaaaaaaaugcaucccccccccccccccccccccccccccccccaaaggcucuuuucagagccaccagaauu

SEQ ID NO: 13247 - RNA, 1876 nt, Artificial Sequence
  mRNA product Design a-5 comprising derived and/or modified sequence from HRSV(Memphis-37)__AIY60640.1__F_DSCav1_mut0 (opt4)
gggagacuuucccauucuguagcagaauuugguguugccuguggucuuggucccgcggagaagcuuaccauggagcugcccauccugaagaccaacgccaucaccaccauccuggccgccgugacccugugcuucgccagcagccagaacaucaccgaggaguucuaccagagcaccugcagcgccgugagcaagggcuaccugagcgcccugagaaccggcugguacaccagcgugaucaccaucgagcugagcaacaucaaggagaacaagugcaacggcaccgacgccaaggugaagcugaucaagcaggagcuggacaaguacaagaacgccgugaccgagcugcagcugcugaugcagagcacccccgccgccggcagcggcagcgccaucgccagcggcaucgccgugugcaaggugcugcaccuggagggcgaggugaacaagaucaagaacgcccugcugagcaccaacaaggccguggugagccugagcaacggcgugagcgugcugaccuucaaggugcuggaccugaagaacuacaucgacaagcagcugcugcccauccugaacaagcagagcugcagcaucagcaacaucgagaccgugaucgaguuccagcagaagaacaacagacugcuggagaucaccagagaguucagcgugaacgccggcgugaccacccccgugagcaccuacaugcugaccaacagcgagcugcugagccugaucaacgacaugcccaucaccaacgaccagaagaagcugaugagcaacaacgugcagaucgugagacagcagagcuacagcaucaugugcaucaucaaggaggaggugcuggccuacguggugcagcugccccuguacggcgugaucgacacccccugcuggaagcugcacaccagcccccugugcaccaccaacaccaaggagggcagcaacaucugccugaccagaaccgacagaggcugguacugcgacaacgccggcagcgugagcuucuucccccaggccgagaccugcaaggugcagagcaacagaguguucugcgacaccaugaacagcagaacccugcccagcgaggugaaccugugcaacaucgacaucuucaaccccaaguacgacugcaagaucaugaccagcaagaccgacgugagcagcagcgugaucaccagccugggcgccaucgugagcugcuacggcaagaccaagugcaccgccagcaacaagaacagaggcaucaucaagaccuucagcaacggcugcgacuacgugagcaacaagggcguggacaccgugagcgugggcaacacccuguacuacgugaacaagcaggagggcaagagccuguacgugaagggcgagcccaucaucaacuucuacgacccccugguguuccccagcgacgaguucgacgccagcaucagccaggugaacgagaagaucaaccagagccuggccuucaucagaaagagcgacgagcugcugcacaacgugaacgugggcaagagcaccaccaacaucaugaucaccaccaucaucaucgugaucaucgugauccugcugcugcugaucgccgugggccuguuccuguacugcaaggccagaagcacccccgugacccugagcaaggaccagcugagcggcaucaacaacaucgccuucagcaacugaggacuagucccuguucccagagcccacuuuuuuuucuuuuuuugaaauaaaauagccugucuuucagaucuaaaaaaaaaaaaaaaaaaaaaaaaaaaaaaaaaaaaaaaaaaaaaaaaaaaaaaaaaaaaaaaaugcaucccccccccccccccccccccccccccccccaaaggcucuuuucagagccaccagaauu

SEQ ID NO: 13248 - RNA, 1876 nt, Artificial Sequence
  mRNA product Design a-5 comprising derived and/or modified sequence from HRSV(Memphis-37)__AIY60640.1__F_DSCav1_mut0 (opt5)
gggagacuuucccauucuguagcagaauuugguguugccuguggucuuggucccgcggagaagcuuaccauggagcugcccauccucaagaccaacgccauuacaacgauccuggcugccgugacccuuugcuucgcgagcucccagaauauuacagaagaguuuuaccaaucuaccuguagcgcugucuccaaaggcuaucugucugcccucagaacagggugguacaccagcguuaucacaauugaacuguccaacaucaaggagaauaaaugcaacggaaccgacgccaaggugaaacuuaucaagcaggaacuggauaaguauaaaaaugcugugacggagcuccagcugcugaugcagucuaccccugccgcuggcagcggguccgccauugcgagcggaaucgccgucuguaaggugcuccaccuggagggcgaaguuaacaaaauuaagaaugcccuucugucuacaaacaaagcuguggucucccucagcaauggggugucuguucugaccuucaaggugcuugaccugaagaacuacaucgauaaacaacuccugccgauucugaauaagcaguccugcagcaucucuaacauugagacagucaucgaauuucagcagaaaaauaaccggcuccuggagaucacccgcgaguucuccgugaaugcuggagugacgacacccgucagcaccuauaugcuuacaaacuccgaacugcucucucugauuaacgacaugccuaucaccaaugaucaaaagaaacuuaugagcaacaauguucagauugugagacagcaguccuacagcaucauguguauuaucaaggaggaagugcuggccuaugucgugcaacucccccuguacggcguuaucgacaccccuugcuggaaacugcauacaucuccccucuguacgaccaacacaaaggagggcuccaauauuugccugacccggacagaucgcgggugguacugugacaacgcgggaagcgugagcuuuuucccucaggccgaaaccugcaagguccagucuaauagaguguuuugugauacgaugaacuccagaacacugccgucugagguuaaucucugcaacaucgacauuuucaaucccaaauaugauugcaagaucaugaccagcaaaaccgacguguccagcucugucauuacaucccugggcgcuaucgugagcuguuacgggaagaccaaaugcacagccucuaacaagaaucggggaaucauuaagacguuuuccaacggcugugauuaugucagcaauaaagggguggacaccguuuccgugggaaacacacuuuacuaugucaacaagcaagagggcaaaucucuguacgugaagggcgaaccuaucauuaauuucuaugacccccucguuuuuccuagcgaugaguucgacgcuuccaucucucaggugaacgaaaagauuaaucagagccuggccuuuauccgcaaguccgaugagcugcuccacaacgucaauguggggaaaagcaccacaaacauuaugaucaccacgaucauuaucgugauuaucguuauucugcuucugcucaucgccgucggacuguuccuguacugcaaagcuagaucuacccccgugacacuuuccaaggaccagcucagcggcaucaauaacauugcguucucuaauugaggacuagucccuguucccagagcccacuuuuuuuucuuuuuuugaaauaaaauagccugucuuucagaucuaaaaaaaaaaaaaaaaaaaaaaaaaaaaaaaaaaaaaaaaaaaaaaaaaaaaaaaaaaaaaaaaugcaucccccccccccccccccccccccccccccccaaaggcucuuuucagagccaccagaauu

SEQ ID NO: 13249 - RNA, 1876 nt, Artificial Sequence
  mRNA product Design a-5 comprising derived and/or modified sequence from HRSV(Memphis-37)__AIY60640.1__F_DSCav1_mut0 (opt6)
gggagacuuucccauucuguagcagaauuugguguugccuguggucuuggucccgcggagaagcuuaccauggaauuaccaaucuuaaaaacaaacgccauaacaaccauccucgcagcaguaacccuaugcuuugcauccucacaaaacauaacugaagaauuuuaccaaucaacaugcucagcaguaucaaaaggauaucuaucagcccucagaacaggaugguacacaucagucauuacaaucgaacuuucaaacauaaaagaaaauaaauguaacggcacagaugccaaaguaaaauuaauuaaacaagaacuugacaaauacaaaaaugccguaacagaacuacaacuacuaaugcaaaguacuccugcugcaggaagcggaucugcaauagcaucagguauagcaguauguaaaguucuacaccuagaaggcgaaguaaacaaaauuaaaaacgcacuacucucaacaaauaaagcaguugucucccuaucaaacggaguaucaguauuaacuuucaaaguacuagaccucaaaaacuauauagacaaacaacuauuaccaauacuaaacaaacaaagcugcucuaucuccaacaucgaaacaguaauagaauuucaacaaaaaaauaauagacuacuugaaauaaccagagaauuuucaguaaacgccggaguaacaacaccaguaucaacuuacaugcuaacaaacuccgaacuacuaucauuaauaaacgacaugcccauaacaaacgaccaaaaaaaauuaaugucaaacaacguccaaaucguacgacaacaauccuauuccauaauguguauaauaaaagaagaaguacuagcauacguaguacaauuaccauuauauggaguaauagauaccccuugcuggaaacuacacacaucaccccuaugcacuacaaauacgaaagaagguucaaauauaugcuuaacuagaaccgauagagguugguauugugacaacgcuggaucaguaucauuuuucccacaagcagaaacaugcaaaguacaaucaaacagaguauuuugcgacacuaugaacucaagaacuuuaccauccgaaguuaaucuauguaacauagauauauuuaacccaaaauacgacugcaaaauaaugacaucaaaaacagauguaucaucaucaguuauaaccucccucggagcaauaguaucaugcuauggaaaaacaaaaugcacagcaucaaacaaaaaucguggaauuauaaaaacauucucaaacggcugugacuacgucagcaauaaaggaguagacacagucucaguaggaaacacuuuauacuauguuaacaaacaagaaggaaaaucacucuacgucaaaggcgaaccaauaauaaauuucuaugacccacucguauucccauccgacgaauuugacgcaucaauaucacaaguaaaugaaaaaauaaaccaaagccuagcauuuauacgaaaaucagacgaacuacuacacaacguaaacguagguaaaagcacaaccaauauaaugauaacaacaauaaucauaguaauaaucguaauauuacuauuacuaauagcuguaggauuguuccuauacugcaaagcaagaucaacaccaguaaccuuaucuaaggaccaacuaucaggaaucaauaacauugccuucucaaacuaaggacuagucccuguucccagagcccacuuuuuuuucuuuuuuugaaauaaaauagccugucuuucagaucuaaaaaaaaaaaaaaaaaaaaaaaaaaaaaaaaaaaaaaaaaaaaaaaaaaaaaaaaaaaaaaaaugcaucccccccccccccccccccccccccccccccaaaggcucuuuucagagccaccagaauu

SEQ ID NO: 13250 - RNA, 1876 nt, Artificial Sequence
  mRNA product Design a-5 comprising derived and/or modified sequence from HRSV(Memphis-37)__AIY60640.1__F_DSCav1_mut0 (opt11)
gggagacuuucccauucuguagcagaauuugguguugccuguggucuuggucccgcggagaagcuuaccauggaacuaccuauccuuaaaaccaacgcaaucaccaccauccuugccgcagucacacucugcuucgcauccucacagaacaucaccgaagaguucuaucaaucaaccugcuccgccguauccaaaggauaccucucagcccuccgcaccggcugguauaccucagucauaacaaucgaauuaucaaauaucaaggagaacaaaugcaacggcaccgacgccaaagucaaacucauaaaacaagaacuagacaaauacaaaaacgccgugacagaacuccaacuccucaugcaguccacccccgcagccggauccggcucagcaaucgccucgggcauugcaguaugcaaaguccuccaccucgaaggcgaagucaacaaaaucaaaaacgcccuccucuccaccaacaaagccgucgucucccucuccaacggcguaucuguccucacuuucaagguccucgaccucaaaaacuacaucgacaagcaacuacuuccaauccucaacaagcaauccugcucaaucucaaacaucgaaaccguaauagaguuccaacaaaagaacaaccgccuccucgaaaucacccgcgaguucuccguuaacgccggugucacuaccccagucagcaccuacaugcucaccaacuccgaacuccuuucucugaucaacgacaugccaaucaccaacgaucaaaagaaauuaauguccaacaacguccagaucguccgccaacaaagcuacagcaucaugugcaucauaaaagaagaaguacuugcguacguaguucaacuaccccuuuacggcguaaucgacaccccaugcuggaaacuccacaccuccccacuaugcaccaccaacaccaaagaaggauccaacaucugccuaacccgcaccgaccgcggcugguacugcgacaacgcugggagcgucucauucuucccacaagcagaaaccugcaaaguccaaucgaaccgcguauucugcgacaccaugaacuccagaacccuaccaagcgaagucaaucuuugcaacaucgacauauuuaaccccaaauacgacugcaaaaucaugacaucaaagaccgacgucucaucuucagucauuaccucacucggcgcaauugucagcugcuacggaaagaccaaauguaccgccuccaauaaaaaccguggaaucauaaaaaccuuuagcaacggcugcgacuacgucuccaacaaaggagucgacaccgucuccgucggcaacacccucuacuacgucaacaaacaagaaggaaaaucccucuacgugaaaggcgaacccauaauaaacuucuacgacccccuagucuuccccucugacgaguucgacgccuccaucucccaagucaacgaaaagauaaaucaaucacuagccuucauacgcaaaucugacgaacuucuccacaacgucaacgucggcaaauccaccaccaacauaaugaucacaacgauaauaaucgugaucauaguaauccuacuucuccucaucgcaguaggucuauuccuauacugcaaagcccgcagcacccccgucacccuaucaaaagaccaacucuccggcaucaacaacaucgccuucucaaacuaaggacuagucccuguucccagagcccacuuuuuuuucuuuuuuugaaauaaaauagccugucuuucagaucuaaaaaaaaaaaaaaaaaaaaaaaaaaaaaaaaaaaaaaaaaaaaaaaaaaaaaaaaaaaaaaaaugcaucccccccccccccccccccccccccccccccaaaggcucuuuucagagccaccagaauu

SEQ ID NO: 13251 - RNA, 2057 nt, Artificial Sequence
  mRNA product Design b-1 comprising derived and/or modified sequence from HRSV(Memphis-37)__AIY60640.1__F_DSCav1_mut0 (opt1)
gggagacggagacggccugcaggaccugcucucucagcccucagccgaggccuacgccgagccgagugcgcagccgacgaccgggaggagccgcagccuucaacucugagguacugugauccgcgcugcccgccgggccgccccaguccgcugcugcggcaccuccuucccucgcgcccucuucgcucgccagcgccuucccugugagccugcgucaccgcggccgccaagcuuaccauggagcugcccauccucaagaccaacgccaucaccacgauccuggccgcggugacccugugcuucgccagcucccagaacaucaccgaggaguucuaccagagcacgugcuccgccgucagcaagggcuaccucuccgcccugcgcaccgggugguacaccagcgugaucaccaucgagcuguccaacaucaaggagaacaagugcaacggcaccgacgccaaggugaagcucaucaagcaggagcuggacaaguacaagaacgcggucacggagcugcagcuccugaugcagagcaccccggccgccggcuccgggagcgcgaucgccuccggcaucgccgucugcaaggugcugcaccucgagggcgaggugaacaagaucaagaacgcccugcuguccaccaacaaggccgucgugagccucuccaacggggugagcguccugaccuucaaggugcuggaccucaagaacuacaucgacaagcagcugcugcccauccugaacaagcagagcugcuccaucagcaacaucgagaccgucaucgaguuccagcagaagaacaaccgccuccuggagaucacgcgggaguucagcgugaacgcgggcgugaccacccccgucuccaccuacaugcugacgaacagcgagcuccugucccugaucaacgacaugccgaucaccaacgaccagaagaagcucaugagcaacaacgugcagaucgugcgccagcaguccuacagcaucaugugcaucaucaaggaggagguccuggccuacguggugcagcugccccucuacggggucaucgacacccccugcuggaagcugcacaccagcccccugugcacgaccaacaccaaggagggcuccaacaucugccucacccggacggaccgcgggugguacugcgacaacgccggcagcguguccuucuucccgcaggccgagaccugcaagguccagagcaaccggguguucugcgacaccaugaacucccggacccugcccagcgaggugaaccucugcaacaucgacaucuucaaccccaaguacgacugcaagaucaugacguccaagaccgacgucagcuccagcgugaucaccucccugggcgccaucgugagcugcuacgggaagaccaagugcacggcgagcaacaagaaccgcggcaucaucaagaccuucuccaacgggugcgacuacgucagcaacaagggcguggacaccguguccgucggcaacacccuguacuacgugaacaagcaggagggcaagagccucuacgugaagggggagcccaucaucaacuucuacgacccgcuggucuuccccuccgacgaguucgacgccagcaucucccaggugaacgagaagaucaaccagagccuggccuucauccggaaguccgacgagcuccugcacaacgugaacgucggcaagagcaccacgaacaucaugaucaccaccaucaucaucgugaucaucgugauccugcugcuccugaucgccgucgggcuguuccucuacugcaaggcccgcuccacccccgugacgcugagcaaggaccagcuguccgggaucaacaacaucgcguucagcaacugaggacuaguguccaccugucccuccugggcugcuggauugucucguuuuccugccaaauaaacaggaucagcgcuuuacagaucuaaaaaaaaaaaaaaaaaaaaaaaaaaaaaaaaaaaaaaaaaaaaaaaaaaaaaaaaaaaaaaaaugcaucccccccccccccccccccccccccccccccaaaggcucuuuucagagccaccagaauu

SEQ ID NO: 13252 - RNA, 2057 nt, Artificial Sequence
  mRNA product Design b-1 comprising derived and/or modified sequence from HRSV(Memphis-37)__AIY60640.1__F_DSCav1_mut0 (opt1)
gggagacggagacggccugcaggaccugcucucucagcccucagccgaggccuacgccgagccgagugcgcagccgacgaccgggaggagccgcagccuucaacucugagguacugugauccgcgcugcccgccgggccgccccaguccgcugcugcggcaccuccuucccucgcgcccucuucgcucgccagcgccuucccugugagccugcgucaccgcggccgccaagcuuaccauggagcugcccauccucaagaccaacgccaucaccacgauccuggccgcggugacccugugcuucgccagcucccagaacaucaccgaggaguucuaccagagcacgugcuccgccgucagcaagggcuaccucuccgcccugcgcaccgggugguacaccagcgugaucaccaucgagcuguccaacaucaaggagaacaagugcaacggcaccgacgccaaggugaagcucaucaagcaggagcuggacaaguacaagaacgcggucacggagcugcagcuccugaugcagagcaccccggccgccggguccggcagcgccaucgcguccgggaucgccgugugcaaggugcugcaccucgagggcgaggucaacaagaucaagaacgcccugcugagcaccaacaaggccguggugucccucagcaacggcgucuccgugcugaccuucaaggugcuggaccucaagaacuacaucgacaagcagcugcugcccauccucaacaagcagagcugcuccaucagcaacaucgagacggucaucgaguuccagcagaagaacaaccggcugcuggagaucacccgcgaguucuccgugaacgccggggugaccacccccgucagcacguacaugcucaccaacagcgagcugcugucccucaucaacgacaugcccaucaccaacgaccagaagaagcugaugagcaacaacgugcagaucgugcggcagcaguccuacagcaucaugugcaucaucaaggaggagguccuggcguacguggugcagcucccgcuguacggcgucaucgacacccccugcuggaagcugcacacgagcccccucugcaccaccaacaccaaggagggguccaacaucugccugacgcgcaccgaccggggcugguacugcgacaacgccggguccgugagcuucuucccccaggccgagaccugcaaggugcaguccaaccgcgucuucugcgacaccaugaacagccggacgcucccguccgaggugaaccugugcaacaucgacaucuucaaccccaaguacgacugcaagaucaugaccagcaagaccgacgucuccagcuccgugaucaccagccugggcgccaucguguccugcuacggcaagacgaagugcaccgccagcaacaagaaccgggggaucaucaagaccuucuccaacggcugcgacuacgucagcaacaaggggguggacaccgugagcgucggcaacacgcucuacuacgugaacaagcaggagggcaagucccuguacgugaagggggagcccaucaucaacuucuacgacccccuggucuucccgagcgacgaguucgacgcguccaucagccaggugaacgagaagaucaaccagucccucgccuucauccgcaagagcgacgagcugcugcacaacgugaacgucggcaaguccaccaccaacaucaugaucaccaccaucaucaucgugaucaucgugauccuccugcugcucaucgccgucgggcuguuccuguacugcaaggcccggagcacgcccgugacccuguccaaggaccagcucagcggcaucaacaacaucgccuucuccaacugaggacuaguguccaccugucccuccugggcugcuggauugucucguuuuccugccaaauaaacaggaucagcgcuuuacagaucuaaaaaaaaaaaaaaaaaaaaaaaaaaaaaaaaaaaaaaaaaaaaaaaaaaaaaaaaaaaaaaaaugcaucccccccccccccccccccccccccccccccaaaggcucuuuucagagccaccagaauu

SEQ ID NO: 13253 - RNA, 2057 nt, Artificial Sequence
  mRNA product Design b-1 comprising derived and/or modified sequence from HRSV(Memphis-37)__AIY60640.1__F_DSCav1_mut0 (opt2)
gggagacggagacggccugcaggaccugcucucucagcccucagccgaggccuacgccgagccgagugcgcagccgacgaccgggaggagccgcagccuucaacucugagguacugugauccgcgcugcccgccgggccgccccaguccgcugcugcggcaccuccuucccucgcgcccucuucgcucgccagcgccuucccugugagccugcgucaccgcggccgccaagcuuaccauggagcuccccauccucaagaccaacgccaucaccaccauccucgccgccgucacccucugcuucgccuccucccagaacaucaccgaggaguucuaccaguccaccugcuccgccgucuccaagggcuaccucuccgcccuccgcaccggcugguacaccuccgucaucaccaucgagcucuccaacaucaaggagaacaagugcaacggcaccgacgccaaggucaagcucaucaagcaggagcucgacaaguacaagaacgccgucaccgagcuccagcuccucaugcaguccacccccgccgccggcuccggcuccgccaucgccuccggcaucgccgucugcaagguccuccaccucgagggcgaggucaacaagaucaagaacgcccuccucuccaccaacaaggccgucgucucccucuccaacggcgucuccguccucaccuucaagguccucgaccucaagaacuacaucgacaagcagcuccuccccauccucaacaagcaguccugcuccaucuccaacaucgagaccgucaucgaguuccagcagaagaacaaccgccuccucgagaucacccgcgaguucuccgucaacgccggcgucaccacccccgucuccaccuacaugcucaccaacuccgagcuccucucccucaucaacgacaugcccaucaccaacgaccagaagaagcucauguccaacaacguccagaucguccgccagcaguccuacuccaucaugugcaucaucaaggaggagguccucgccuacgucguccagcucccccucuacggcgucaucgacacccccugcuggaagcuccacaccuccccccucugcaccaccaacaccaaggagggcuccaacaucugccucacccgcaccgaccgcggcugguacugcgacaacgccggcuccgucuccuucuucccccaggccgagaccugcaagguccaguccaaccgcgucuucugcgacaccaugaacucccgcacccuccccuccgaggucaaccucugcaacaucgacaucuucaaccccaaguacgacugcaagaucaugaccuccaagaccgacgucuccuccuccgucaucaccucccucggcgccaucgucuccugcuacggcaagaccaagugcaccgccuccaacaagaaccgcggcaucaucaagaccuucuccaacggcugcgacuacgucuccaacaagggcgucgacaccgucuccgucggcaacacccucuacuacgucaacaagcaggagggcaagucccucuacgucaagggcgagcccaucaucaacuucuacgacccccucgucuuccccuccgacgaguucgacgccuccaucucccaggucaacgagaagaucaaccagucccucgccuucauccgcaaguccgacgagcuccuccacaacgucaacgucggcaaguccaccaccaacaucaugaucaccaccaucaucaucgucaucaucgucauccuccuccuccucaucgccgucggccucuuccucuacugcaaggcccgcuccacccccgucacccucuccaaggaccagcucuccggcaucaacaacaucgccuucuccaacugaggacuaguguccaccugucccuccugggcugcuggauugucucguuuuccugccaaauaaacaggaucagcgcuuuacagaucuaaaaaaaaaaaaaaaaaaaaaaaaaaaaaaaaaaaaaaaaaaaaaaaaaaaaaaaaaaaaaaaaugcaucccccccccccccccccccccccccccccccaaaggcucuuuucagagccaccagaauu

SEQ ID NO: 13254 - RNA, 2057 nt, Artificial Sequence
  mRNA product Design b-1 comprising derived and/or modified sequence from HRSV(Memphis-37)__AIY60640.1__F_DSCav1_mut0 (opt3)
gggagacggagacggccugcaggaccugcucucucagcccucagccgaggccuacgccgagccgagugcgcagccgacgaccgggaggagccgcagccuucaacucugagguacugugauccgcgcugcccgccgggccgccccaguccgcugcugcggcaccuccuucccucgcgcccucuucgcucgccagcgccuucccugugagccugcgucaccgcggccgccaagcuuaccauggagcugcccauccucaagaccaacgccauuacaacuauacuugcugcagugacgcugugcuucgccagcucccagaauaucaccgaagaguuuuaccaaucuacauguucagcggucaguaaaggcuauuugagcgcuuuaagaacugggugguacaccuccguuauuacaaucgaacugucuaacauuaaggagaauaaaugcaacggaaccgacgccaaggugaaacuaaucaagcaggaacucgauaaguauaaaaaugcaguaacugagcugcagcuucugaugcagucgaccccugccgcugguucaggcagcgcaauagccagugggaucgcuguguguaaggucuugcaccucgagggagaagugaacaaaauuaagaaugcccugcuguccacaaacaaagcgguugugucucucagcaauggcgucuccguguuaacguucaagguacuggaccuuaagaacuacaucgauaaacaauugcugccaauucuaaauaagcagucaugcaguaucagcaacauagagacuguuauugaauuucagcagaaaaauaacaggcuccuggagaucacccgggaguucucugugaaugccggugucacaacuccgguguccaccuauaugcuuacaaacucagaacuguugagccucauuaacgacaugcccaucaccaaugaucaaaagaaacugaugaguaacaaugugcagaucguccgccagcagucuuacuccauuauguguauaaucaaggaggaaguuuuagcauaugugguacaacugccucucuacggggugauugacacgccaugcuggaaacuucauacuagcccccuguguacaaccaacacuaaggagggaucgaauaucugcuugacacgaaccgaucguggcugguacugugacaacgcuggcucugucuccuuuuucccucaggccgaaacgugcaaggugcagucaaauagaguguuuugugauaccaugaacaguagaacacugccaagcgaggugaaucucugcaacauagacauuuucaaucccaaauaugauugcaagaucaugacuuccaaaaccgacgucucuagcucagugaucacaagucugggggcaauuguauccuguuacggaaagacuaaaugcaccgcuagcaacaagaauagggguaucauuaagacauuuucuaacggcugugauuauguuucaaauaaagggguggacaccgucagugugggaaacacucuuuacuaugucaacaagcaagagggcaaaagccuguacgugaagggugaaccuauaaucaauuucuaugacccauugguuuuuccguccgaugaguucgacgccucuauuucgcagguuaacgagaaaaucaaucagagccucgcguuuauccggaaguccgaugaacuguuacacaacguaaaugucgggaagucaacgacaaacauuaugauaaccacuaucauuaucgugauuaucguuauacugcuacuccugaucgccgugggacuuuucuuguacugcaaagcacgcaguacccccgucacacugucuaaggaccagcucagcggcauuaauaacaucgcuuucuccaauugaggacuaguguccaccugucccuccugggcugcuggauugucucguuuuccugccaaauaaacaggaucagcgcuuuacagaucuaaaaaaaaaaaaaaaaaaaaaaaaaaaaaaaaaaaaaaaaaaaaaaaaaaaaaaaaaaaaaaaaugcaucccccccccccccccccccccccccccccccaaaggcucuuuucagagccaccagaauu

SEQ ID NO: 13255 - RNA, 2057 nt, Artificial Sequence
  mRNA product Design b-1 comprising derived and/or modified sequence from HRSV(Memphis-37)__AIY60640.1__F_DSCav1_mut0 (opt4)
gggagacggagacggccugcaggaccugcucucucagcccucagccgaggccuacgccgagccgagugcgcagccgacgaccgggaggagccgcagccuucaacucugagguacugugauccgcgcugcccgccgggccgccccaguccgcugcugcggcaccuccuucccucgcgcccucuucgcucgccagcgccuucccugugagccugcgucaccgcggccgccaagcuuaccauggagcugcccauccugaagaccaacgccaucaccaccauccuggccgccgugacccugugcuucgccagcagccagaacaucaccgaggaguucuaccagagcaccugcagcgccgugagcaagggcuaccugagcgcccugagaaccggcugguacaccagcgugaucaccaucgagcugagcaacaucaaggagaacaagugcaacggcaccgacgccaaggugaagcugaucaagcaggagcuggacaaguacaagaacgccgugaccgagcugcagcugcugaugcagagcacccccgccgccggcagcggcagcgccaucgccagcggcaucgccgugugcaaggugcugcaccuggagggcgaggugaacaagaucaagaacgcccugcugagcaccaacaaggccguggugagccugagcaacggcgugagcgugcugaccuucaaggugcuggaccugaagaacuacaucgacaagcagcugcugcccauccugaacaagcagagcugcagcaucagcaacaucgagaccgugaucgaguuccagcagaagaacaacagacugcuggagaucaccagagaguucagcgugaacgccggcgugaccacccccgugagcaccuacaugcugaccaacagcgagcugcugagccugaucaacgacaugcccaucaccaacgaccagaagaagcugaugagcaacaacgugcagaucgugagacagcagagcuacagcaucaugugcaucaucaaggaggaggugcuggccuacguggugcagcugccccuguacggcgugaucgacacccccugcuggaagcugcacaccagcccccugugcaccaccaacaccaaggagggcagcaacaucugccugaccagaaccgacagaggcugguacugcgacaacgccggcagcgugagcuucuucccccaggccgagaccugcaaggugcagagcaacagaguguucugcgacaccaugaacagcagaacccugcccagcgaggugaaccugugcaacaucgacaucuucaaccccaaguacgacugcaagaucaugaccagcaagaccgacgugagcagcagcgugaucaccagccugggcgccaucgugagcugcuacggcaagaccaagugcaccgccagcaacaagaacagaggcaucaucaagaccuucagcaacggcugcgacuacgugagcaacaagggcguggacaccgugagcgugggcaacacccuguacuacgugaacaagcaggagggcaagagccuguacgugaagggcgagcccaucaucaacuucuacgacccccugguguuccccagcgacgaguucgacgccagcaucagccaggugaacgagaagaucaaccagagccuggccuucaucagaaagagcgacgagcugcugcacaacgugaacgugggcaagagcaccaccaacaucaugaucaccaccaucaucaucgugaucaucgugauccugcugcugcugaucgccgugggccuguuccuguacugcaaggccagaagcacccccgugacccugagcaaggaccagcugagcggcaucaacaacaucgccuucagcaacugaggacuaguguccaccugucccuccugggcugcuggauugucucguuuuccugccaaauaaacaggaucagcgcuuuacagaucuaaaaaaaaaaaaaaaaaaaaaaaaaaaaaaaaaaaaaaaaaaaaaaaaaaaaaaaaaaaaaaaaugcaucccccccccccccccccccccccccccccccaaaggcucuuuucagagccaccagaauu

SEQ ID NO: 13256 - RNA, 2057 nt, Artificial Sequence
  mRNA product Design b-1 comprising derived and/or modified sequence from HRSV(Memphis-37)__AIY60640.1__F_DSCav1_mut0 (opt5)
gggagacggagacggccugcaggaccugcucucucagcccucagccgaggccuacgccgagccgagugcgcagccgacgaccgggaggagccgcagccuucaacucugagguacugugauccgcgcugcccgccgggccgccccaguccgcugcugcggcaccuccuucccucgcgcccucuucgcucgccagcgccuucccugugagccugcgucaccgcggccgccaagcuuaccauggagcugcccauccucaagaccaacgccauuacaacgauccuggcugccgugacccuuugcuucgcgagcucccagaauauuacagaagaguuuuaccaaucuaccuguagcgcugucuccaaaggcuaucugucugcccucagaacagggugguacaccagcguuaucacaauugaacuguccaacaucaaggagaauaaaugcaacggaaccgacgccaaggugaaacuuaucaagcaggaacuggauaaguauaaaaaugcugugacggagcuccagcugcugaugcagucuaccccugccgcuggcagcggguccgccauugcgagcggaaucgccgucuguaaggugcuccaccuggagggcgaaguuaacaaaauuaagaaugcccuucugucuacaaacaaagcuguggucucccucagcaauggggugucuguucugaccuucaaggugcuugaccugaagaacuacaucgauaaacaacuccugccgauucugaauaagcaguccugcagcaucucuaacauugagacagucaucgaauuucagcagaaaaauaaccggcuccuggagaucacccgcgaguucuccgugaaugcuggagugacgacacccgucagcaccuauaugcuuacaaacuccgaacugcucucucugauuaacgacaugccuaucaccaaugaucaaaagaaacuuaugagcaacaauguucagauugugagacagcaguccuacagcaucauguguauuaucaaggaggaagugcuggccuaugucgugcaacucccccuguacggcguuaucgacaccccuugcuggaaacugcauacaucuccccucuguacgaccaacacaaaggagggcuccaauauuugccugacccggacagaucgcgggugguacugugacaacgcgggaagcgugagcuuuuucccucaggccgaaaccugcaagguccagucuaauagaguguuuugugauacgaugaacuccagaacacugccgucugagguuaaucucugcaacaucgacauuuucaaucccaaauaugauugcaagaucaugaccagcaaaaccgacguguccagcucugucauuacaucccugggcgcuaucgugagcuguuacgggaagaccaaaugcacagccucuaacaagaaucggggaaucauuaagacguuuuccaacggcugugauuaugucagcaauaaagggguggacaccguuuccgugggaaacacacuuuacuaugucaacaagcaagagggcaaaucucuguacgugaagggcgaaccuaucauuaauuucuaugacccccucguuuuuccuagcgaugaguucgacgcuuccaucucucaggugaacgaaaagauuaaucagagccuggccuuuauccgcaaguccgaugagcugcuccacaacgucaauguggggaaaagcaccacaaacauuaugaucaccacgaucauuaucgugauuaucguuauucugcuucugcucaucgccgucggacuguuccuguacugcaaagcuagaucuacccccgugacacuuuccaaggaccagcucagcggcaucaauaacauugcguucucuaauugaggacuaguguccaccugucccuccugggcugcuggauugucucguuuuccugccaaauaaacaggaucagcgcuuuacagaucuaaaaaaaaaaaaaaaaaaaaaaaaaaaaaaaaaaaaaaaaaaaaaaaaaaaaaaaaaaaaaaaaugcaucccccccccccccccccccccccccccccccaaaggcucuuuucagagccaccagaauu

SEQ ID NO: 13257 - RNA, 2057 nt, Artificial Sequence
  mRNA product Design b-1 comprising derived and/or modified sequence from HRSV(Memphis-37)__AIY60640.1__F_DSCav1_mut0 (opt6)
gggagacggagacggccugcaggaccugcucucucagcccucagccgaggccuacgccgagccgagugcgcagccgacgaccgggaggagccgcagccuucaacucugagguacugugauccgcgcugcccgccgggccgccccaguccgcugcugcggcaccuccuucccucgcgcccucuucgcucgccagcgccuucccugugagccugcgucaccgcggccgccaagcuuaccauggaauuaccaaucuuaaaaacaaacgccauaacaaccauccucgcagcaguaacccuaugcuuugcauccucacaaaacauaacugaagaauuuuaccaaucaacaugcucagcaguaucaaaaggauaucuaucagcccucagaacaggaugguacacaucagucauuacaaucgaacuuucaaacauaaaagaaaauaaauguaacggcacagaugccaaaguaaaauuaauuaaacaagaacuugacaaauacaaaaaugccguaacagaacuacaacuacuaaugcaaaguacuccugcugcaggaagcggaucugcaauagcaucagguauagcaguauguaaaguucuacaccuagaaggcgaaguaaacaaaauuaaaaacgcacuacucucaacaaauaaagcaguugucucccuaucaaacggaguaucaguauuaacuuucaaaguacuagaccucaaaaacuauauagacaaacaacuauuaccaauacuaaacaaacaaagcugcucuaucuccaacaucgaaacaguaauagaauuucaacaaaaaaauaauagacuacuugaaauaaccagagaauuuucaguaaacgccggaguaacaacaccaguaucaacuuacaugcuaacaaacuccgaacuacuaucauuaauaaacgacaugcccauaacaaacgaccaaaaaaaauuaaugucaaacaacguccaaaucguacgacaacaauccuauuccauaauguguauaauaaaagaagaaguacuagcauacguaguacaauuaccauuauauggaguaauagauaccccuugcuggaaacuacacacaucaccccuaugcacuacaaauacgaaagaagguucaaauauaugcuuaacuagaaccgauagagguugguauugugacaacgcuggaucaguaucauuuuucccacaagcagaaacaugcaaaguacaaucaaacagaguauuuugcgacacuaugaacucaagaacuuuaccauccgaaguuaaucuauguaacauagauauauuuaacccaaaauacgacugcaaaauaaugacaucaaaaacagauguaucaucaucaguuauaaccucccucggagcaauaguaucaugcuauggaaaaacaaaaugcacagcaucaaacaaaaaucguggaauuauaaaaacauucucaaacggcugugacuacgucagcaauaaaggaguagacacagucucaguaggaaacacuuuauacuauguuaacaaacaagaaggaaaaucacucuacgucaaaggcgaaccaauaauaaauuucuaugacccacucguauucccauccgacgaauuugacgcaucaauaucacaaguaaaugaaaaaauaaaccaaagccuagcauuuauacgaaaaucagacgaacuacuacacaacguaaacguagguaaaagcacaaccaauauaaugauaacaacaauaaucauaguaauaaucguaauauuacuauuacuaauagcuguaggauuguuccuauacugcaaagcaagaucaacaccaguaaccuuaucuaaggaccaacuaucaggaaucaauaacauugccuucucaaacuaaggacuaguguccaccugucccuccugggcugcuggauugucucguuuuccugccaaauaaacaggaucagcgcuuuacagaucuaaaaaaaaaaaaaaaaaaaaaaaaaaaaaaaaaaaaaaaaaaaaaaaaaaaaaaaaaaaaaaaaugcaucccccccccccccccccccccccccccccccaaaggcucuuuucagagccaccagaauu

SEQ ID NO: 13258 - RNA, 2057 nt, Artificial Sequence
  mRNA product Design b-1 comprising derived and/or modified sequence from HRSV(Memphis-37)__AIY60640.1__F_DSCav1_mut0 (opt11)
gggagacggagacggccugcaggaccugcucucucagcccucagccgaggccuacgccgagccgagugcgcagccgacgaccgggaggagccgcagccuucaacucugagguacugugauccgcgcugcccgccgggccgccccaguccgcugcugcggcaccuccuucccucgcgcccucuucgcucgccagcgccuucccugugagccugcgucaccgcggccgccaagcuuaccauggaacuaccuauccuuaaaaccaacgcaaucaccaccauccuugccgcagucacacucugcuucgcauccucacagaacaucaccgaagaguucuaucaaucaaccugcuccgccguauccaaaggauaccucucagcccuccgcaccggcugguauaccucagucauaacaaucgaauuaucaaauaucaaggagaacaaaugcaacggcaccgacgccaaagucaaacucauaaaacaagaacuagacaaauacaaaaacgccgugacagaacuccaacuccucaugcaguccacccccgcagccggauccggcucagcaaucgccucgggcauugcaguaugcaaaguccuccaccucgaaggcgaagucaacaaaaucaaaaacgcccuccucuccaccaacaaagccgucgucucccucuccaacggcguaucuguccucacuuucaagguccucgaccucaaaaacuacaucgacaagcaacuacuuccaauccucaacaagcaauccugcucaaucucaaacaucgaaaccguaauagaguuccaacaaaagaacaaccgccuccucgaaaucacccgcgaguucuccguuaacgccggugucacuaccccagucagcaccuacaugcucaccaacuccgaacuccuuucucugaucaacgacaugccaaucaccaacgaucaaaagaaauuaauguccaacaacguccagaucguccgccaacaaagcuacagcaucaugugcaucauaaaagaagaaguacuugcguacguaguucaacuaccccuuuacggcguaaucgacaccccaugcuggaaacuccacaccuccccacuaugcaccaccaacaccaaagaaggauccaacaucugccuaacccgcaccgaccgcggcugguacugcgacaacgcugggagcgucucauucuucccacaagcagaaaccugcaaaguccaaucgaaccgcguauucugcgacaccaugaacuccagaacccuaccaagcgaagucaaucuuugcaacaucgacauauuuaaccccaaauacgacugcaaaaucaugacaucaaagaccgacgucucaucuucagucauuaccucacucggcgcaauugucagcugcuacggaaagaccaaauguaccgccuccaauaaaaaccguggaaucauaaaaaccuuuagcaacggcugcgacuacgucuccaacaaaggagucgacaccgucuccgucggcaacacccucuacuacgucaacaaacaagaaggaaaaucccucuacgugaaaggcgaacccauaauaaacuucuacgacccccuagucuuccccucugacgaguucgacgccuccaucucccaagucaacgaaaagauaaaucaaucacuagccuucauacgcaaaucugacgaacuucuccacaacgucaacgucggcaaauccaccaccaacauaaugaucacaacgauaauaaucgugaucauaguaauccuacuucuccucaucgcaguaggucuauuccuauacugcaaagcccgcagcacccccgucacccuaucaaaagaccaacucuccggcaucaacaacaucgccuucucaaacuaaggacuaguguccaccugucccuccugggcugcuggauugucucguuuuccugccaaauaaacaggaucagcgcuuuacagaucuaaaaaaaaaaaaaaaaaaaaaaaaaaaaaaaaaaaaaaaaaaaaaaaaaaaaaaaaaaaaaaaaugcaucccccccccccccccccccccccccccccccaaaggcucuuuucagagccaccagaauu

SEQ ID NO: 13259 - RNA, 1877 nt, Artificial Sequence
  mRNA product Design b-2 comprising derived and/or modified sequence from HRSV(Memphis-37)__AIY60640.1__F_DSCav1_mut0 (opt1)
gggagagccucugcuggaguccggggaguggcguuggcugcuagagcgaagcuuaccauggagcugcccauccucaagaccaacgccaucaccacgauccuggccgcggugacccugugcuucgccagcucccagaacaucaccgaggaguucuaccagagcacgugcuccgccgucagcaagggcuaccucuccgcccugcgcaccgggugguacaccagcgugaucaccaucgagcuguccaacaucaaggagaacaagugcaacggcaccgacgccaaggugaagcucaucaagcaggagcuggacaaguacaagaacgcggucacggagcugcagcuccugaugcagagcaccccggccgccggcuccgggagcgcgaucgccuccggcaucgccgucugcaaggugcugcaccucgagggcgaggugaacaagaucaagaacgcccugcuguccaccaacaaggccgucgugagccucuccaacggggugagcguccugaccuucaaggugcuggaccucaagaacuacaucgacaagcagcugcugcccauccugaacaagcagagcugcuccaucagcaacaucgagaccgucaucgaguuccagcagaagaacaaccgccuccuggagaucacgcgggaguucagcgugaacgcgggcgugaccacccccgucuccaccuacaugcugacgaacagcgagcuccugucccugaucaacgacaugccgaucaccaacgaccagaagaagcucaugagcaacaacgugcagaucgugcgccagcaguccuacagcaucaugugcaucaucaaggaggagguccuggccuacguggugcagcugccccucuacggggucaucgacacccccugcuggaagcugcacaccagcccccugugcacgaccaacaccaaggagggcuccaacaucugccucacccggacggaccgcgggugguacugcgacaacgccggcagcguguccuucuucccgcaggccgagaccugcaagguccagagcaaccggguguucugcgacaccaugaacucccggacccugcccagcgaggugaaccucugcaacaucgacaucuucaaccccaaguacgacugcaagaucaugacguccaagaccgacgucagcuccagcgugaucaccucccugggcgccaucgugagcugcuacgggaagaccaagugcacggcgagcaacaagaaccgcggcaucaucaagaccuucuccaacgggugcgacuacgucagcaacaagggcguggacaccguguccgucggcaacacccuguacuacgugaacaagcaggagggcaagagccucuacgugaagggggagcccaucaucaacuucuacgacccgcuggucuuccccuccgacgaguucgacgccagcaucucccaggugaacgagaagaucaaccagagccuggccuucauccggaaguccgacgagcuccugcacaacgugaacgucggcaagagcaccacgaacaucaugaucaccaccaucaucaucgugaucaucgugauccugcugcuccugaucgccgucgggcuguuccucuacugcaaggcccgcuccacccccgugacgcugagcaaggaccagcuguccgggaucaacaacaucgcguucagcaacugaggacuaguguccaccugucccuccugggcugcuggauugucucguuuuccugccaaauaaacaggaucagcgcuuuacagaucuaaaaaaaaaaaaaaaaaaaaaaaaaaaaaaaaaaaaaaaaaaaaaaaaaaaaaaaaaaaaaaaaugcaucccccccccccccccccccccccccccccccaaaggcucuuuucagagccaccagaauu

SEQ ID NO: 13260 - RNA, 1877 nt, Artificial Sequence
  mRNA product Design b-2 comprising derived and/or modified sequence from HRSV(Memphis-37)__AIY60640.1__F_DSCav1_mut0 (opt1)
gggagagccucugcuggaguccggggaguggcguuggcugcuagagcgaagcuuaccauggagcugcccauccucaagaccaacgccaucaccacgauccuggccgcggugacccugugcuucgccagcucccagaacaucaccgaggaguucuaccagagcacgugcuccgccgucagcaagggcuaccucuccgcccugcgcaccgggugguacaccagcgugaucaccaucgagcuguccaacaucaaggagaacaagugcaacggcaccgacgccaaggugaagcucaucaagcaggagcuggacaaguacaagaacgcggucacggagcugcagcuccugaugcagagcaccccggccgccggguccggcagcgccaucgcguccgggaucgccgugugcaaggugcugcaccucgagggcgaggucaacaagaucaagaacgcccugcugagcaccaacaaggccguggugucccucagcaacggcgucuccgugcugaccuucaaggugcuggaccucaagaacuacaucgacaagcagcugcugcccauccucaacaagcagagcugcuccaucagcaacaucgagacggucaucgaguuccagcagaagaacaaccggcugcuggagaucacccgcgaguucuccgugaacgccggggugaccacccccgucagcacguacaugcucaccaacagcgagcugcugucccucaucaacgacaugcccaucaccaacgaccagaagaagcugaugagcaacaacgugcagaucgugcggcagcaguccuacagcaucaugugcaucaucaaggaggagguccuggcguacguggugcagcucccgcuguacggcgucaucgacacccccugcuggaagcugcacacgagcccccucugcaccaccaacaccaaggagggguccaacaucugccugacgcgcaccgaccggggcugguacugcgacaacgccggguccgugagcuucuucccccaggccgagaccugcaaggugcaguccaaccgcgucuucugcgacaccaugaacagccggacgcucccguccgaggugaaccugugcaacaucgacaucuucaaccccaaguacgacugcaagaucaugaccagcaagaccgacgucuccagcuccgugaucaccagccugggcgccaucguguccugcuacggcaagacgaagugcaccgccagcaacaagaaccgggggaucaucaagaccuucuccaacggcugcgacuacgucagcaacaaggggguggacaccgugagcgucggcaacacgcucuacuacgugaacaagcaggagggcaagucccuguacgugaagggggagcccaucaucaacuucuacgacccccuggucuucccgagcgacgaguucgacgcguccaucagccaggugaacgagaagaucaaccagucccucgccuucauccgcaagagcgacgagcugcugcacaacgugaacgucggcaaguccaccaccaacaucaugaucaccaccaucaucaucgugaucaucgugauccuccugcugcucaucgccgucgggcuguuccuguacugcaaggcccggagcacgcccgugacccuguccaaggaccagcucagcggcaucaacaacaucgccuucuccaacugaggacuaguguccaccugucccuccugggcugcuggauugucucguuuuccugccaaauaaacaggaucagcgcuuuacagaucuaaaaaaaaaaaaaaaaaaaaaaaaaaaaaaaaaaaaaaaaaaaaaaaaaaaaaaaaaaaaaaaaugcaucccccccccccccccccccccccccccccccaaaggcucuuuucagagccaccagaauu

SEQ ID NO: 13261 - RNA, 1877 nt, Artificial Sequence
  mRNA product Design b-2 comprising derived and/or modified sequence from HRSV(Memphis-37)__AIY60640.1__F_DSCav1_mut0 (opt2)
gggagagccucugcuggaguccggggaguggcguuggcugcuagagcgaagcuuaccauggagcuccccauccucaagaccaacgccaucaccaccauccucgccgccgucacccucugcuucgccuccucccagaacaucaccgaggaguucuaccaguccaccugcuccgccgucuccaagggcuaccucuccgcccuccgcaccggcugguacaccuccgucaucaccaucgagcucuccaacaucaaggagaacaagugcaacggcaccgacgccaaggucaagcucaucaagcaggagcucgacaaguacaagaacgccgucaccgagcuccagcuccucaugcaguccacccccgccgccggcuccggcuccgccaucgccuccggcaucgccgucugcaagguccuccaccucgagggcgaggucaacaagaucaagaacgcccuccucuccaccaacaaggccgucgucucccucuccaacggcgucuccguccucaccuucaagguccucgaccucaagaacuacaucgacaagcagcuccuccccauccucaacaagcaguccugcuccaucuccaacaucgagaccgucaucgaguuccagcagaagaacaaccgccuccucgagaucacccgcgaguucuccgucaacgccggcgucaccacccccgucuccaccuacaugcucaccaacuccgagcuccucucccucaucaacgacaugcccaucaccaacgaccagaagaagcucauguccaacaacguccagaucguccgccagcaguccuacuccaucaugugcaucaucaaggaggagguccucgccuacgucguccagcucccccucuacggcgucaucgacacccccugcuggaagcuccacaccuccccccucugcaccaccaacaccaaggagggcuccaacaucugccucacccgcaccgaccgcggcugguacugcgacaacgccggcuccgucuccuucuucccccaggccgagaccugcaagguccaguccaaccgcgucuucugcgacaccaugaacucccgcacccuccccuccgaggucaaccucugcaacaucgacaucuucaaccccaaguacgacugcaagaucaugaccuccaagaccgacgucuccuccuccgucaucaccucccucggcgccaucgucuccugcuacggcaagaccaagugcaccgccuccaacaagaaccgcggcaucaucaagaccuucuccaacggcugcgacuacgucuccaacaagggcgucgacaccgucuccgucggcaacacccucuacuacgucaacaagcaggagggcaagucccucuacgucaagggcgagcccaucaucaacuucuacgacccccucgucuuccccuccgacgaguucgacgccuccaucucccaggucaacgagaagaucaaccagucccucgccuucauccgcaaguccgacgagcuccuccacaacgucaacgucggcaaguccaccaccaacaucaugaucaccaccaucaucaucgucaucaucgucauccuccuccuccucaucgccgucggccucuuccucuacugcaaggcccgcuccacccccgucacccucuccaaggaccagcucuccggcaucaacaacaucgccuucuccaacugaggacuaguguccaccugucccuccugggcugcuggauugucucguuuuccugccaaauaaacaggaucagcgcuuuacagaucuaaaaaaaaaaaaaaaaaaaaaaaaaaaaaaaaaaaaaaaaaaaaaaaaaaaaaaaaaaaaaaaaugcaucccccccccccccccccccccccccccccccaaaggcucuuuucagagccaccagaauu

SEQ ID NO: 13262 - RNA, 1877 nt, Artificial Sequence
  mRNA product Design b-2 comprising derived and/or modified sequence from HRSV(Memphis-37)__AIY60640.1__F_DSCav1_mut0 (opt3)
gggagagccucugcuggaguccggggaguggcguuggcugcuagagcgaagcuuaccauggagcugcccauccucaagaccaacgccauuacaacuauacuugcugcagugacgcugugcuucgccagcucccagaauaucaccgaagaguuuuaccaaucuacauguucagcggucaguaaaggcuauuugagcgcuuuaagaacugggugguacaccuccguuauuacaaucgaacugucuaacauuaaggagaauaaaugcaacggaaccgacgccaaggugaaacuaaucaagcaggaacucgauaaguauaaaaaugcaguaacugagcugcagcuucugaugcagucgaccccugccgcugguucaggcagcgcaauagccagugggaucgcuguguguaaggucuugcaccucgagggagaagugaacaaaauuaagaaugcccugcuguccacaaacaaagcgguugugucucucagcaauggcgucuccguguuaacguucaagguacuggaccuuaagaacuacaucgauaaacaauugcugccaauucuaaauaagcagucaugcaguaucagcaacauagagacuguuauugaauuucagcagaaaaauaacaggcuccuggagaucacccgggaguucucugugaaugccggugucacaacuccgguguccaccuauaugcuuacaaacucagaacuguugagccucauuaacgacaugcccaucaccaaugaucaaaagaaacugaugaguaacaaugugcagaucguccgccagcagucuuacuccauuauguguauaaucaaggaggaaguuuuagcauaugugguacaacugccucucuacggggugauugacacgccaugcuggaaacuucauacuagcccccuguguacaaccaacacuaaggagggaucgaauaucugcuugacacgaaccgaucguggcugguacugugacaacgcuggcucugucuccuuuuucccucaggccgaaacgugcaaggugcagucaaauagaguguuuugugauaccaugaacaguagaacacugccaagcgaggugaaucucugcaacauagacauuuucaaucccaaauaugauugcaagaucaugacuuccaaaaccgacgucucuagcucagugaucacaagucugggggcaauuguauccuguuacggaaagacuaaaugcaccgcuagcaacaagaauagggguaucauuaagacauuuucuaacggcugugauuauguuucaaauaaagggguggacaccgucagugugggaaacacucuuuacuaugucaacaagcaagagggcaaaagccuguacgugaagggugaaccuauaaucaauuucuaugacccauugguuuuuccguccgaugaguucgacgccucuauuucgcagguuaacgagaaaaucaaucagagccucgcguuuauccggaaguccgaugaacuguuacacaacguaaaugucgggaagucaacgacaaacauuaugauaaccacuaucauuaucgugauuaucguuauacugcuacuccugaucgccgugggacuuuucuuguacugcaaagcacgcaguacccccgucacacugucuaaggaccagcucagcggcauuaauaacaucgcuuucuccaauugaggacuaguguccaccugucccuccugggcugcuggauugucucguuuuccugccaaauaaacaggaucagcgcuuuacagaucuaaaaaaaaaaaaaaaaaaaaaaaaaaaaaaaaaaaaaaaaaaaaaaaaaaaaaaaaaaaaaaaaugcaucccccccccccccccccccccccccccccccaaaggcucuuuucagagccaccagaauu

SEQ ID NO: 13263 - RNA, 1877 nt, Artificial Sequence
  mRNA product Design b-2 comprising derived and/or modified sequence from HRSV(Memphis-37)__AIY60640.1__F_DSCav1_mut0 (opt4)
gggagagccucugcuggaguccggggaguggcguuggcugcuagagcgaagcuuaccauggagcugcccauccugaagaccaacgccaucaccaccauccuggccgccgugacccugugcuucgccagcagccagaacaucaccgaggaguucuaccagagcaccugcagcgccgugagcaagggcuaccugagcgcccugagaaccggcugguacaccagcgugaucaccaucgagcugagcaacaucaaggagaacaagugcaacggcaccgacgccaaggugaagcugaucaagcaggagcuggacaaguacaagaacgccgugaccgagcugcagcugcugaugcagagcacccccgccgccggcagcggcagcgccaucgccagcggcaucgccgugugcaaggugcugcaccuggagggcgaggugaacaagaucaagaacgcccugcugagcaccaacaaggccguggugagccugagcaacggcgugagcgugcugaccuucaaggugcuggaccugaagaacuacaucgacaagcagcugcugcccauccugaacaagcagagcugcagcaucagcaacaucgagaccgugaucgaguuccagcagaagaacaacagacugcuggagaucaccagagaguucagcgugaacgccggcgugaccacccccgugagcaccuacaugcugaccaacagcgagcugcugagccugaucaacgacaugcccaucaccaacgaccagaagaagcugaugagcaacaacgugcagaucgugagacagcagagcuacagcaucaugugcaucaucaaggaggaggugcuggccuacguggugcagcugccccuguacggcgugaucgacacccccugcuggaagcugcacaccagcccccugugcaccaccaacaccaaggagggcagcaacaucugccugaccagaaccgacagaggcugguacugcgacaacgccggcagcgugagcuucuucccccaggccgagaccugcaaggugcagagcaacagaguguucugcgacaccaugaacagcagaacccugcccagcgaggugaaccugugcaacaucgacaucuucaaccccaaguacgacugcaagaucaugaccagcaagaccgacgugagcagcagcgugaucaccagccugggcgccaucgugagcugcuacggcaagaccaagugcaccgccagcaacaagaacagaggcaucaucaagaccuucagcaacggcugcgacuacgugagcaacaagggcguggacaccgugagcgugggcaacacccuguacuacgugaacaagcaggagggcaagagccuguacgugaagggcgagcccaucaucaacuucuacgacccccugguguuccccagcgacgaguucgacgccagcaucagccaggugaacgagaagaucaaccagagccuggccuucaucagaaagagcgacgagcugcugcacaacgugaacgugggcaagagcaccaccaacaucaugaucaccaccaucaucaucgugaucaucgugauccugcugcugcugaucgccgugggccuguuccuguacugcaaggccagaagcacccccgugacccugagcaaggaccagcugagcggcaucaacaacaucgccuucagcaacugaggacuaguguccaccugucccuccugggcugcuggauugucucguuuuccugccaaauaaacaggaucagcgcuuuacagaucuaaaaaaaaaaaaaaaaaaaaaaaaaaaaaaaaaaaaaaaaaaaaaaaaaaaaaaaaaaaaaaaaugcaucccccccccccccccccccccccccccccccaaaggcucuuuucagagccaccagaauu

SEQ ID NO: 13264 - RNA, 1877 nt, Artificial Sequence
  mRNA product Design b-2 comprising derived and/or modified sequence from HRSV(Memphis-37)__AIY60640.1__F_DSCav1_mut0 (opt5)
gggagagccucugcuggaguccggggaguggcguuggcugcuagagcgaagcuuaccauggagcugcccauccucaagaccaacgccauuacaacgauccuggcugccgugacccuuugcuucgcgagcucccagaauauuacagaagaguuuuaccaaucuaccuguagcgcugucuccaaaggcuaucugucugcccucagaacagggugguacaccagcguuaucacaauugaacuguccaacaucaaggagaauaaaugcaacggaaccgacgccaaggugaaacuuaucaagcaggaacuggauaaguauaaaaaugcugugacggagcuccagcugcugaugcagucuaccccugccgcuggcagcggguccgccauugcgagcggaaucgccgucuguaaggugcuccaccuggagggcgaaguuaacaaaauuaagaaugcccuucugucuacaaacaaagcuguggucucccucagcaauggggugucuguucugaccuucaaggugcuugaccugaagaacuacaucgauaaacaacuccugccgauucugaauaagcaguccugcagcaucucuaacauugagacagucaucgaauuucagcagaaaaauaaccggcuccuggagaucacccgcgaguucuccgugaaugcuggagugacgacacccgucagcaccuauaugcuuacaaacuccgaacugcucucucugauuaacgacaugccuaucaccaaugaucaaaagaaacuuaugagcaacaauguucagauugugagacagcaguccuacagcaucauguguauuaucaaggaggaagugcuggccuaugucgugcaacucccccuguacggcguuaucgacaccccuugcuggaaacugcauacaucuccccucuguacgaccaacacaaaggagggcuccaauauuugccugacccggacagaucgcgggugguacugugacaacgcgggaagcgugagcuuuuucccucaggccgaaaccugcaagguccagucuaauagaguguuuugugauacgaugaacuccagaacacugccgucugagguuaaucucugcaacaucgacauuuucaaucccaaauaugauugcaagaucaugaccagcaaaaccgacguguccagcucugucauuacaucccugggcgcuaucgugagcuguuacgggaagaccaaaugcacagccucuaacaagaaucggggaaucauuaagacguuuuccaacggcugugauuaugucagcaauaaagggguggacaccguuuccgugggaaacacacuuuacuaugucaacaagcaagagggcaaaucucuguacgugaagggcgaaccuaucauuaauuucuaugacccccucguuuuuccuagcgaugaguucgacgcuuccaucucucaggugaacgaaaagauuaaucagagccuggccuuuauccgcaaguccgaugagcugcuccacaacgucaauguggggaaaagcaccacaaacauuaugaucaccacgaucauuaucgugauuaucguuauucugcuucugcucaucgccgucggacuguuccuguacugcaaagcuagaucuacccccgugacacuuuccaaggaccagcucagcggcaucaauaacauugcguucucuaauugaggacuaguguccaccugucccuccugggcugcuggauugucucguuuuccugccaaauaaacaggaucagcgcuuuacagaucuaaaaaaaaaaaaaaaaaaaaaaaaaaaaaaaaaaaaaaaaaaaaaaaaaaaaaaaaaaaaaaaaugcaucccccccccccccccccccccccccccccccaaaggcucuuuucagagccaccagaauu

SEQ ID NO: 13265 - RNA, 1877 nt, Artificial Sequence
  mRNA product Design b-2 comprising derived and/or modified sequence from HRSV(Memphis-37)__AIY60640.1__F_DSCav1_mut0 (opt6)
gggagagccucugcuggaguccggggaguggcguuggcugcuagagcgaagcuuaccauggaauuaccaaucuuaaaaacaaacgccauaacaaccauccucgcagcaguaacccuaugcuuugcauccucacaaaacauaacugaagaauuuuaccaaucaacaugcucagcaguaucaaaaggauaucuaucagcccucagaacaggaugguacacaucagucauuacaaucgaacuuucaaacauaaaagaaaauaaauguaacggcacagaugccaaaguaaaauuaauuaaacaagaacuugacaaauacaaaaaugccguaacagaacuacaacuacuaaugcaaaguacuccugcugcaggaagcggaucugcaauagcaucagguauagcaguauguaaaguucuacaccuagaaggcgaaguaaacaaaauuaaaaacgcacuacucucaacaaauaaagcaguugucucccuaucaaacggaguaucaguauuaacuuucaaaguacuagaccucaaaaacuauauagacaaacaacuauuaccaauacuaaacaaacaaagcugcucuaucuccaacaucgaaacaguaauagaauuucaacaaaaaaauaauagacuacuugaaauaaccagagaauuuucaguaaacgccggaguaacaacaccaguaucaacuuacaugcuaacaaacuccgaacuacuaucauuaauaaacgacaugcccauaacaaacgaccaaaaaaaauuaaugucaaacaacguccaaaucguacgacaacaauccuauuccauaauguguauaauaaaagaagaaguacuagcauacguaguacaauuaccauuauauggaguaauagauaccccuugcuggaaacuacacacaucaccccuaugcacuacaaauacgaaagaagguucaaauauaugcuuaacuagaaccgauagagguugguauugugacaacgcuggaucaguaucauuuuucccacaagcagaaacaugcaaaguacaaucaaacagaguauuuugcgacacuaugaacucaagaacuuuaccauccgaaguuaaucuauguaacauagauauauuuaacccaaaauacgacugcaaaauaaugacaucaaaaacagauguaucaucaucaguuauaaccucccucggagcaauaguaucaugcuauggaaaaacaaaaugcacagcaucaaacaaaaaucguggaauuauaaaaacauucucaaacggcugugacuacgucagcaauaaaggaguagacacagucucaguaggaaacacuuuauacuauguuaacaaacaagaaggaaaaucacucuacgucaaaggcgaaccaauaauaaauuucuaugacccacucguauucccauccgacgaauuugacgcaucaauaucacaaguaaaugaaaaaauaaaccaaagccuagcauuuauacgaaaaucagacgaacuacuacacaacguaaacguagguaaaagcacaaccaauauaaugauaacaacaauaaucauaguaauaaucguaauauuacuauuacuaauagcuguaggauuguuccuauacugcaaagcaagaucaacaccaguaaccuuaucuaaggaccaacuaucaggaaucaauaacauugccuucucaaacuaaggacuaguguccaccugucccuccugggcugcuggauugucucguuuuccugccaaauaaacaggaucagcgcuuuacagaucuaaaaaaaaaaaaaaaaaaaaaaaaaaaaaaaaaaaaaaaaaaaaaaaaaaaaaaaaaaaaaaaaugcaucccccccccccccccccccccccccccccccaaaggcucuuuucagagccaccagaauu

SEQ ID NO: 13266 - RNA, 1877 nt, Artificial Sequence
  mRNA product Design b-2 comprising derived and/or modified sequence from HRSV(Memphis-37)__AIY60640.1__F_DSCav1_mut0 (opt11)
gggagagccucugcuggaguccggggaguggcguuggcugcuagagcgaagcuuaccauggaacuaccuauccuuaaaaccaacgcaaucaccaccauccuugccgcagucacacucugcuucgcauccucacagaacaucaccgaagaguucuaucaaucaaccugcuccgccguauccaaaggauaccucucagcccuccgcaccggcugguauaccucagucauaacaaucgaauuaucaaauaucaaggagaacaaaugcaacggcaccgacgccaaagucaaacucauaaaacaagaacuagacaaauacaaaaacgccgugacagaacuccaacuccucaugcaguccacccccgcagccggauccggcucagcaaucgccucgggcauugcaguaugcaaaguccuccaccucgaaggcgaagucaacaaaaucaaaaacgcccuccucuccaccaacaaagccgucgucucccucuccaacggcguaucuguccucacuuucaagguccucgaccucaaaaacuacaucgacaagcaacuacuuccaauccucaacaagcaauccugcucaaucucaaacaucgaaaccguaauagaguuccaacaaaagaacaaccgccuccucgaaaucacccgcgaguucuccguuaacgccggugucacuaccccagucagcaccuacaugcucaccaacuccgaacuccuuucucugaucaacgacaugccaaucaccaacgaucaaaagaaauuaauguccaacaacguccagaucguccgccaacaaagcuacagcaucaugugcaucauaaaagaagaaguacuugcguacguaguucaacuaccccuuuacggcguaaucgacaccccaugcuggaaacuccacaccuccccacuaugcaccaccaacaccaaagaaggauccaacaucugccuaacccgcaccgaccgcggcugguacugcgacaacgcugggagcgucucauucuucccacaagcagaaaccugcaaaguccaaucgaaccgcguauucugcgacaccaugaacuccagaacccuaccaagcgaagucaaucuuugcaacaucgacauauuuaaccccaaauacgacugcaaaaucaugacaucaaagaccgacgucucaucuucagucauuaccucacucggcgcaauugucagcugcuacggaaagaccaaauguaccgccuccaauaaaaaccguggaaucauaaaaaccuuuagcaacggcugcgacuacgucuccaacaaaggagucgacaccgucuccgucggcaacacccucuacuacgucaacaaacaagaaggaaaaucccucuacgugaaaggcgaacccauaauaaacuucuacgacccccuagucuuccccucugacgaguucgacgccuccaucucccaagucaacgaaaagauaaaucaaucacuagccuucauacgcaaaucugacgaacuucuccacaacgucaacgucggcaaauccaccaccaacauaaugaucacaacgauaauaaucgugaucauaguaauccuacuucuccucaucgcaguaggucuauuccuauacugcaaagcccgcagcacccccgucacccuaucaaaagaccaacucuccggcaucaacaacaucgccuucucaaacuaaggacuaguguccaccugucccuccugggcugcuggauugucucguuuuccugccaaauaaacaggaucagcgcuuuacagaucuaaaaaaaaaaaaaaaaaaaaaaaaaaaaaaaaaaaaaaaaaaaaaaaaaaaaaaaaaaaaaaaaugcaucccccccccccccccccccccccccccccccaaaggcucuuuucagagccaccagaauu

SEQ ID NO: 13267 - RNA, 1897 nt, Artificial Sequence
  mRNA product Design b-3 comprising derived and/or modified sequence from HRSV(Memphis-37)__AIY60640.1__F_DSCav1_mut0 (opt1)
gggagagucccgcagucggcguccagcggcucugcuuguucgugugugugucguugcaggccuuauucaagcuuaccauggagcugcccauccucaagaccaacgccaucaccacgauccuggccgcggugacccugugcuucgccagcucccagaacaucaccgaggaguucuaccagagcacgugcuccgccgucagcaagggcuaccucuccgcccugcgcaccgggugguacaccagcgugaucaccaucgagcuguccaacaucaaggagaacaagugcaacggcaccgacgccaaggugaagcucaucaagcaggagcuggacaaguacaagaacgcggucacggagcugcagcuccugaugcagagcaccccggccgccggcuccgggagcgcgaucgccuccggcaucgccgucugcaaggugcugcaccucgagggcgaggugaacaagaucaagaacgcccugcuguccaccaacaaggccgucgugagccucuccaacggggugagcguccugaccuucaaggugcuggaccucaagaacuacaucgacaagcagcugcugcccauccugaacaagcagagcugcuccaucagcaacaucgagaccgucaucgaguuccagcagaagaacaaccgccuccuggagaucacgcgggaguucagcgugaacgcgggcgugaccacccccgucuccaccuacaugcugacgaacagcgagcuccugucccugaucaacgacaugccgaucaccaacgaccagaagaagcucaugagcaacaacgugcagaucgugcgccagcaguccuacagcaucaugugcaucaucaaggaggagguccuggccuacguggugcagcugccccucuacggggucaucgacacccccugcuggaagcugcacaccagcccccugugcacgaccaacaccaaggagggcuccaacaucugccucacccggacggaccgcgggugguacugcgacaacgccggcagcguguccuucuucccgcaggccgagaccugcaagguccagagcaaccggguguucugcgacaccaugaacucccggacccugcccagcgaggugaaccucugcaacaucgacaucuucaaccccaaguacgacugcaagaucaugacguccaagaccgacgucagcuccagcgugaucaccucccugggcgccaucgugagcugcuacgggaagaccaagugcacggcgagcaacaagaaccgcggcaucaucaagaccuucuccaacgggugcgacuacgucagcaacaagggcguggacaccguguccgucggcaacacccuguacuacgugaacaagcaggagggcaagagccucuacgugaagggggagcccaucaucaacuucuacgacccgcuggucuuccccuccgacgaguucgacgccagcaucucccaggugaacgagaagaucaaccagagccuggccuucauccggaaguccgacgagcuccugcacaacgugaacgucggcaagagcaccacgaacaucaugaucaccaccaucaucaucgugaucaucgugauccugcugcuccugaucgccgucgggcuguuccucuacugcaaggcccgcuccacccccgugacgcugagcaaggaccagcuguccgggaucaacaacaucgcguucagcaacugaggacuaguguccaccugucccuccugggcugcuggauugucucguuuuccugccaaauaaacaggaucagcgcuuuacagaucuaaaaaaaaaaaaaaaaaaaaaaaaaaaaaaaaaaaaaaaaaaaaaaaaaaaaaaaaaaaaaaaaugcaucccccccccccccccccccccccccccccccaaaggcucuuuucagagccaccagaauu

SEQ ID NO: 13268 - RNA, 1897 nt, Artificial Sequence
  mRNA product Design b-3 comprising derived and/or modified sequence from HRSV(Memphis-37)__AIY60640.1__F_DSCav1_mut0 (opt1)
gggagagucccgcagucggcguccagcggcucugcuuguucgugugugugucguugcaggccuuauucaagcuuaccauggagcugcccauccucaagaccaacgccaucaccacgauccuggccgcggugacccugugcuucgccagcucccagaacaucaccgaggaguucuaccagagcacgugcuccgccgucagcaagggcuaccucuccgcccugcgcaccgggugguacaccagcgugaucaccaucgagcuguccaacaucaaggagaacaagugcaacggcaccgacgccaaggugaagcucaucaagcaggagcuggacaaguacaagaacgcggucacggagcugcagcuccugaugcagagcaccccggccgccggguccggcagcgccaucgcguccgggaucgccgugugcaaggugcugcaccucgagggcgaggucaacaagaucaagaacgcccugcugagcaccaacaaggccguggugucccucagcaacggcgucuccgugcugaccuucaaggugcuggaccucaagaacuacaucgacaagcagcugcugcccauccucaacaagcagagcugcuccaucagcaacaucgagacggucaucgaguuccagcagaagaacaaccggcugcuggagaucacccgcgaguucuccgugaacgccggggugaccacccccgucagcacguacaugcucaccaacagcgagcugcugucccucaucaacgacaugcccaucaccaacgaccagaagaagcugaugagcaacaacgugcagaucgugcggcagcaguccuacagcaucaugugcaucaucaaggaggagguccuggcguacguggugcagcucccgcuguacggcgucaucgacacccccugcuggaagcugcacacgagcccccucugcaccaccaacaccaaggagggguccaacaucugccugacgcgcaccgaccggggcugguacugcgacaacgccggguccgugagcuucuucccccaggccgagaccugcaaggugcaguccaaccgcgucuucugcgacaccaugaacagccggacgcucccguccgaggugaaccugugcaacaucgacaucuucaaccccaaguacgacugcaagaucaugaccagcaagaccgacgucuccagcuccgugaucaccagccugggcgccaucguguccugcuacggcaagacgaagugcaccgccagcaacaagaaccgggggaucaucaagaccuucuccaacggcugcgacuacgucagcaacaaggggguggacaccgugagcgucggcaacacgcucuacuacgugaacaagcaggagggcaagucccuguacgugaagggggagcccaucaucaacuucuacgacccccuggucuucccgagcgacgaguucgacgcguccaucagccaggugaacgagaagaucaaccagucccucgccuucauccgcaagagcgacgagcugcugcacaacgugaacgucggcaaguccaccaccaacaucaugaucaccaccaucaucaucgugaucaucgugauccuccugcugcucaucgccgucgggcuguuccuguacugcaaggcccggagcacgcccgugacccuguccaaggaccagcucagcggcaucaacaacaucgccuucuccaacugaggacuaguguccaccugucccuccugggcugcuggauugucucguuuuccugccaaauaaacaggaucagcgcuuuacagaucuaaaaaaaaaaaaaaaaaaaaaaaaaaaaaaaaaaaaaaaaaaaaaaaaaaaaaaaaaaaaaaaaugcaucccccccccccccccccccccccccccccccaaaggcucuuuucagagccaccagaauu

SEQ ID NO: 13269 - RNA, 1897 nt, Artificial Sequence
  mRNA product Design b-3 comprising derived and/or modified sequence from HRSV(Memphis-37)__AIY60640.1__F_DSCav1_mut0 (opt2)
gggagagucccgcagucggcguccagcggcucugcuuguucgugugugugucguugcaggccuuauucaagcuuaccauggagcuccccauccucaagaccaacgccaucaccaccauccucgccgccgucacccucugcuucgccuccucccagaacaucaccgaggaguucuaccaguccaccugcuccgccgucuccaagggcuaccucuccgcccuccgcaccggcugguacaccuccgucaucaccaucgagcucuccaacaucaaggagaacaagugcaacggcaccgacgccaaggucaagcucaucaagcaggagcucgacaaguacaagaacgccgucaccgagcuccagcuccucaugcaguccacccccgccgccggcuccggcuccgccaucgccuccggcaucgccgucugcaagguccuccaccucgagggcgaggucaacaagaucaagaacgcccuccucuccaccaacaaggccgucgucucccucuccaacggcgucuccguccucaccuucaagguccucgaccucaagaacuacaucgacaagcagcuccuccccauccucaacaagcaguccugcuccaucuccaacaucgagaccgucaucgaguuccagcagaagaacaaccgccuccucgagaucacccgcgaguucuccgucaacgccggcgucaccacccccgucuccaccuacaugcucaccaacuccgagcuccucucccucaucaacgacaugcccaucaccaacgaccagaagaagcucauguccaacaacguccagaucguccgccagcaguccuacuccaucaugugcaucaucaaggaggagguccucgccuacgucguccagcucccccucuacggcgucaucgacacccccugcuggaagcuccacaccuccccccucugcaccaccaacaccaaggagggcuccaacaucugccucacccgcaccgaccgcggcugguacugcgacaacgccggcuccgucuccuucuucccccaggccgagaccugcaagguccaguccaaccgcgucuucugcgacaccaugaacucccgcacccuccccuccgaggucaaccucugcaacaucgacaucuucaaccccaaguacgacugcaagaucaugaccuccaagaccgacgucuccuccuccgucaucaccucccucggcgccaucgucuccugcuacggcaagaccaagugcaccgccuccaacaagaaccgcggcaucaucaagaccuucuccaacggcugcgacuacgucuccaacaagggcgucgacaccgucuccgucggcaacacccucuacuacgucaacaagcaggagggcaagucccucuacgucaagggcgagcccaucaucaacuucuacgacccccucgucuuccccuccgacgaguucgacgccuccaucucccaggucaacgagaagaucaaccagucccucgccuucauccgcaaguccgacgagcuccuccacaacgucaacgucggcaaguccaccaccaacaucaugaucaccaccaucaucaucgucaucaucgucauccuccuccuccucaucgccgucggccucuuccucuacugcaaggcccgcuccacccccgucacccucuccaaggaccagcucuccggcaucaacaacaucgccuucuccaacugaggacuaguguccaccugucccuccugggcugcuggauugucucguuuuccugccaaauaaacaggaucagcgcuuuacagaucuaaaaaaaaaaaaaaaaaaaaaaaaaaaaaaaaaaaaaaaaaaaaaaaaaaaaaaaaaaaaaaaaugcaucccccccccccccccccccccccccccccccaaaggcucuuuucagagccaccagaauu

SEQ ID NO: 13270 - RNA, 1897 nt, Artificial Sequence
  mRNA product Design b-3 comprising derived and/or modified sequence from HRSV(Memphis-37)__AIY60640.1__F_DSCav1_mut0 (opt3)
gggagagucccgcagucggcguccagcggcucugcuuguucgugugugugucguugcaggccuuauucaagcuuaccauggagcugcccauccucaagaccaacgccauuacaacuauacuugcugcagugacgcugugcuucgccagcucccagaauaucaccgaagaguuuuaccaaucuacauguucagcggucaguaaaggcuauuugagcgcuuuaagaacugggugguacaccuccguuauuacaaucgaacugucuaacauuaaggagaauaaaugcaacggaaccgacgccaaggugaaacuaaucaagcaggaacucgauaaguauaaaaaugcaguaacugagcugcagcuucugaugcagucgaccccugccgcugguucaggcagcgcaauagccagugggaucgcuguguguaaggucuugcaccucgagggagaagugaacaaaauuaagaaugcccugcuguccacaaacaaagcgguugugucucucagcaauggcgucuccguguuaacguucaagguacuggaccuuaagaacuacaucgauaaacaauugcugccaauucuaaauaagcagucaugcaguaucagcaacauagagacuguuauugaauuucagcagaaaaauaacaggcuccuggagaucacccgggaguucucugugaaugccggugucacaacuccgguguccaccuauaugcuuacaaacucagaacuguugagccucauuaacgacaugcccaucaccaaugaucaaaagaaacugaugaguaacaaugugcagaucguccgccagcagucuuacuccauuauguguauaaucaaggaggaaguuuuagcauaugugguacaacugccucucuacggggugauugacacgccaugcuggaaacuucauacuagcccccuguguacaaccaacacuaaggagggaucgaauaucugcuugacacgaaccgaucguggcugguacugugacaacgcuggcucugucuccuuuuucccucaggccgaaacgugcaaggugcagucaaauagaguguuuugugauaccaugaacaguagaacacugccaagcgaggugaaucucugcaacauagacauuuucaaucccaaauaugauugcaagaucaugacuuccaaaaccgacgucucuagcucagugaucacaagucugggggcaauuguauccuguuacggaaagacuaaaugcaccgcuagcaacaagaauagggguaucauuaagacauuuucuaacggcugugauuauguuucaaauaaagggguggacaccgucagugugggaaacacucuuuacuaugucaacaagcaagagggcaaaagccuguacgugaagggugaaccuauaaucaauuucuaugacccauugguuuuuccguccgaugaguucgacgccucuauuucgcagguuaacgagaaaaucaaucagagccucgcguuuauccggaaguccgaugaacuguuacacaacguaaaugucgggaagucaacgacaaacauuaugauaaccacuaucauuaucgugauuaucguuauacugcuacuccugaucgccgugggacuuuucuuguacugcaaagcacgcaguacccccgucacacugucuaaggaccagcucagcggcauuaauaacaucgcuuucuccaauugaggacuaguguccaccugucccuccugggcugcuggauugucucguuuuccugccaaauaaacaggaucagcgcuuuacagaucuaaaaaaaaaaaaaaaaaaaaaaaaaaaaaaaaaaaaaaaaaaaaaaaaaaaaaaaaaaaaaaaaugcaucccccccccccccccccccccccccccccccaaaggcucuuuucagagccaccagaauu

SEQ ID NO: 13271 - RNA, 1897 nt, Artificial Sequence
  mRNA product Design b-3 comprising derived and/or modified sequence from HRSV(Memphis-37)__AIY60640.1__F_DSCav1_mut0 (opt4)
gggagagucccgcagucggcguccagcggcucugcuuguucgugugugugucguugcaggccuuauucaagcuuaccauggagcugcccauccugaagaccaacgccaucaccaccauccuggccgccgugacccugugcuucgccagcagccagaacaucaccgaggaguucuaccagagcaccugcagcgccgugagcaagggcuaccugagcgcccugagaaccggcugguacaccagcgugaucaccaucgagcugagcaacaucaaggagaacaagugcaacggcaccgacgccaaggugaagcugaucaagcaggagcuggacaaguacaagaacgccgugaccgagcugcagcugcugaugcagagcacccccgccgccggcagcggcagcgccaucgccagcggcaucgccgugugcaaggugcugcaccuggagggcgaggugaacaagaucaagaacgcccugcugagcaccaacaaggccguggugagccugagcaacggcgugagcgugcugaccuucaaggugcuggaccugaagaacuacaucgacaagcagcugcugcccauccugaacaagcagagcugcagcaucagcaacaucgagaccgugaucgaguuccagcagaagaacaacagacugcuggagaucaccagagaguucagcgugaacgccggcgugaccacccccgugagcaccuacaugcugaccaacagcgagcugcugagccugaucaacgacaugcccaucaccaacgaccagaagaagcugaugagcaacaacgugcagaucgugagacagcagagcuacagcaucaugugcaucaucaaggaggaggugcuggccuacguggugcagcugccccuguacggcgugaucgacacccccugcuggaagcugcacaccagcccccugugcaccaccaacaccaaggagggcagcaacaucugccugaccagaaccgacagaggcugguacugcgacaacgccggcagcgugagcuucuucccccaggccgagaccugcaaggugcagagcaacagaguguucugcgacaccaugaacagcagaacccugcccagcgaggugaaccugugcaacaucgacaucuucaaccccaaguacgacugcaagaucaugaccagcaagaccgacgugagcagcagcgugaucaccagccugggcgccaucgugagcugcuacggcaagaccaagugcaccgccagcaacaagaacagaggcaucaucaagaccuucagcaacggcugcgacuacgugagcaacaagggcguggacaccgugagcgugggcaacacccuguacuacgugaacaagcaggagggcaagagccuguacgugaagggcgagcccaucaucaacuucuacgacccccugguguuccccagcgacgaguucgacgccagcaucagccaggugaacgagaagaucaaccagagccuggccuucaucagaaagagcgacgagcugcugcacaacgugaacgugggcaagagcaccaccaacaucaugaucaccaccaucaucaucgugaucaucgugauccugcugcugcugaucgccgugggccuguuccuguacugcaaggccagaagcacccccgugacccugagcaaggaccagcugagcggcaucaacaacaucgccuucagcaacugaggacuaguguccaccugucccuccugggcugcuggauugucucguuuuccugccaaauaaacaggaucagcgcuuuacagaucuaaaaaaaaaaaaaaaaaaaaaaaaaaaaaaaaaaaaaaaaaaaaaaaaaaaaaaaaaaaaaaaaugcaucccccccccccccccccccccccccccccccaaaggcucuuuucagagccaccagaauu

SEQ ID NO: 13272 - RNA, 1897 nt, Artificial Sequence
  mRNA product Design b-3 comprising derived and/or modified sequence from HRSV(Memphis-37)__AIY60640.1__F_DSCav1_mut0 (opt5)
gggagagucccgcagucggcguccagcggcucugcuuguucgugugugugucguugcaggccuuauucaagcuuaccauggagcugcccauccucaagaccaacgccauuacaacgauccuggcugccgugacccuuugcuucgcgagcucccagaauauuacagaagaguuuuaccaaucuaccuguagcgcugucuccaaaggcuaucugucugcccucagaacagggugguacaccagcguuaucacaauugaacuguccaacaucaaggagaauaaaugcaacggaaccgacgccaaggugaaacuuaucaagcaggaacuggauaaguauaaaaaugcugugacggagcuccagcugcugaugcagucuaccccugccgcuggcagcggguccgccauugcgagcggaaucgccgucuguaaggugcuccaccuggagggcgaaguuaacaaaauuaagaaugcccuucugucuacaaacaaagcuguggucucccucagcaauggggugucuguucugaccuucaaggugcuugaccugaagaacuacaucgauaaacaacuccugccgauucugaauaagcaguccugcagcaucucuaacauugagacagucaucgaauuucagcagaaaaauaaccggcuccuggagaucacccgcgaguucuccgugaaugcuggagugacgacacccgucagcaccuauaugcuuacaaacuccgaacugcucucucugauuaacgacaugccuaucaccaaugaucaaaagaaacuuaugagcaacaauguucagauugugagacagcaguccuacagcaucauguguauuaucaaggaggaagugcuggccuaugucgugcaacucccccuguacggcguuaucgacaccccuugcuggaaacugcauacaucuccccucuguacgaccaacacaaaggagggcuccaauauuugccugacccggacagaucgcgggugguacugugacaacgcgggaagcgugagcuuuuucccucaggccgaaaccugcaagguccagucuaauagaguguuuugugauacgaugaacuccagaacacugccgucugagguuaaucucugcaacaucgacauuuucaaucccaaauaugauugcaagaucaugaccagcaaaaccgacguguccagcucugucauuacaucccugggcgcuaucgugagcuguuacgggaagaccaaaugcacagccucuaacaagaaucggggaaucauuaagacguuuuccaacggcugugauuaugucagcaauaaagggguggacaccguuuccgugggaaacacacuuuacuaugucaacaagcaagagggcaaaucucuguacgugaagggcgaaccuaucauuaauuucuaugacccccucguuuuuccuagcgaugaguucgacgcuuccaucucucaggugaacgaaaagauuaaucagagccuggccuuuauccgcaaguccgaugagcugcuccacaacgucaauguggggaaaagcaccacaaacauuaugaucaccacgaucauuaucgugauuaucguuauucugcuucugcucaucgccgucggacuguuccuguacugcaaagcuagaucuacccccgugacacuuuccaaggaccagcucagcggcaucaauaacauugcguucucuaauugaggacuaguguccaccugucccuccugggcugcuggauugucucguuuuccugccaaauaaacaggaucagcgcuuuacagaucuaaaaaaaaaaaaaaaaaaaaaaaaaaaaaaaaaaaaaaaaaaaaaaaaaaaaaaaaaaaaaaaaugcaucccccccccccccccccccccccccccccccaaaggcucuuuucagagccaccagaauu

SEQ ID NO: 13273 - RNA, 1897 nt, Artificial Sequence
  mRNA product Design b-3 comprising derived and/or modified sequence from HRSV(Memphis-37)__AIY60640.1__F_DSCav1_mut0 (opt6)
gggagagucccgcagucggcguccagcggcucugcuuguucgugugugugucguugcaggccuuauucaagcuuaccauggaauuaccaaucuuaaaaacaaacgccauaacaaccauccucgcagcaguaacccuaugcuuugcauccucacaaaacauaacugaagaauuuuaccaaucaacaugcucagcaguaucaaaaggauaucuaucagcccucagaacaggaugguacacaucagucauuacaaucgaacuuucaaacauaaaagaaaauaaauguaacggcacagaugccaaaguaaaauuaauuaaacaagaacuugacaaauacaaaaaugccguaacagaacuacaacuacuaaugcaaaguacuccugcugcaggaagcggaucugcaauagcaucagguauagcaguauguaaaguucuacaccuagaaggcgaaguaaacaaaauuaaaaacgcacuacucucaacaaauaaagcaguugucucccuaucaaacggaguaucaguauuaacuuucaaaguacuagaccucaaaaacuauauagacaaacaacuauuaccaauacuaaacaaacaaagcugcucuaucuccaacaucgaaacaguaauagaauuucaacaaaaaaauaauagacuacuugaaauaaccagagaauuuucaguaaacgccggaguaacaacaccaguaucaacuuacaugcuaacaaacuccgaacuacuaucauuaauaaacgacaugcccauaacaaacgaccaaaaaaaauuaaugucaaacaacguccaaaucguacgacaacaauccuauuccauaauguguauaauaaaagaagaaguacuagcauacguaguacaauuaccauuauauggaguaauagauaccccuugcuggaaacuacacacaucaccccuaugcacuacaaauacgaaagaagguucaaauauaugcuuaacuagaaccgauagagguugguauugugacaacgcuggaucaguaucauuuuucccacaagcagaaacaugcaaaguacaaucaaacagaguauuuugcgacacuaugaacucaagaacuuuaccauccgaaguuaaucuauguaacauagauauauuuaacccaaaauacgacugcaaaauaaugacaucaaaaacagauguaucaucaucaguuauaaccucccucggagcaauaguaucaugcuauggaaaaacaaaaugcacagcaucaaacaaaaaucguggaauuauaaaaacauucucaaacggcugugacuacgucagcaauaaaggaguagacacagucucaguaggaaacacuuuauacuauguuaacaaacaagaaggaaaaucacucuacgucaaaggcgaaccaauaauaaauuucuaugacccacucguauucccauccgacgaauuugacgcaucaauaucacaaguaaaugaaaaaauaaaccaaagccuagcauuuauacgaaaaucagacgaacuacuacacaacguaaacguagguaaaagcacaaccaauauaaugauaacaacaauaaucauaguaauaaucguaauauuacuauuacuaauagcuguaggauuguuccuauacugcaaagcaagaucaacaccaguaaccuuaucuaaggaccaacuaucaggaaucaauaacauugccuucucaaacuaaggacuaguguccaccugucccuccugggcugcuggauugucucguuuuccugccaaauaaacaggaucagcgcuuuacagaucuaaaaaaaaaaaaaaaaaaaaaaaaaaaaaaaaaaaaaaaaaaaaaaaaaaaaaaaaaaaaaaaaugcaucccccccccccccccccccccccccccccccaaaggcucuuuucagagccaccagaauu

SEQ ID NO: 13274 - RNA, 1897 nt, Artificial Sequence
  mRNA product Design b-3 comprising derived and/or modified sequence from HRSV(Memphis-37)__AIY60640.1__F_DSCav1_mut0 (opt11)
gggagagucccgcagucggcguccagcggcucugcuuguucgugugugugucguugcaggccuuauucaagcuuaccauggaacuaccuauccuuaaaaccaacgcaaucaccaccauccuugccgcagucacacucugcuucgcauccucacagaacaucaccgaagaguucuaucaaucaaccugcuccgccguauccaaaggauaccucucagcccuccgcaccggcugguauaccucagucauaacaaucgaauuaucaaauaucaaggagaacaaaugcaacggcaccgacgccaaagucaaacucauaaaacaagaacuagacaaauacaaaaacgccgugacagaacuccaacuccucaugcaguccacccccgcagccggauccggcucagcaaucgccucgggcauugcaguaugcaaaguccuccaccucgaaggcgaagucaacaaaaucaaaaacgcccuccucuccaccaacaaagccgucgucucccucuccaacggcguaucuguccucacuuucaagguccucgaccucaaaaacuacaucgacaagcaacuacuuccaauccucaacaagcaauccugcucaaucucaaacaucgaaaccguaauagaguuccaacaaaagaacaaccgccuccucgaaaucacccgcgaguucuccguuaacgccggugucacuaccccagucagcaccuacaugcucaccaacuccgaacuccuuucucugaucaacgacaugccaaucaccaacgaucaaaagaaauuaauguccaacaacguccagaucguccgccaacaaagcuacagcaucaugugcaucauaaaagaagaaguacuugcguacguaguucaacuaccccuuuacggcguaaucgacaccccaugcuggaaacuccacaccuccccacuaugcaccaccaacaccaaagaaggauccaacaucugccuaacccgcaccgaccgcggcugguacugcgacaacgcugggagcgucucauucuucccacaagcagaaaccugcaaaguccaaucgaaccgcguauucugcgacaccaugaacuccagaacccuaccaagcgaagucaaucuuugcaacaucgacauauuuaaccccaaauacgacugcaaaaucaugacaucaaagaccgacgucucaucuucagucauuaccucacucggcgcaauugucagcugcuacggaaagaccaaauguaccgccuccaauaaaaaccguggaaucauaaaaaccuuuagcaacggcugcgacuacgucuccaacaaaggagucgacaccgucuccgucggcaacacccucuacuacgucaacaaacaagaaggaaaaucccucuacgugaaaggcgaacccauaauaaacuucuacgacccccuagucuuccccucugacgaguucgacgccuccaucucccaagucaacgaaaagauaaaucaaucacuagccuucauacgcaaaucugacgaacuucuccacaacgucaacgucggcaaauccaccaccaacauaaugaucacaacgauaauaaucgugaucauaguaauccuacuucuccucaucgcaguaggucuauuccuauacugcaaagcccgcagcacccccgucacccuaucaaaagaccaacucuccggcaucaacaacaucgccuucucaaacuaaggacuaguguccaccugucccuccugggcugcuggauugucucguuuuccugccaaauaaacaggaucagcgcuuuacagaucuaaaaaaaaaaaaaaaaaaaaaaaaaaaaaaaaaaaaaaaaaaaaaaaaaaaaaaaaaaaaaaaaugcaucccccccccccccccccccccccccccccccaaaggcucuuuucagagccaccagaauu

SEQ ID NO: 13275 - RNA, 1948 nt, Artificial Sequence
  mRNA product Design b-4 comprising derived and/or modified sequence from HRSV(Memphis-37)__AIY60640.1__F_DSCav1_mut0 (opt1)
gggagagucccgcagucggcguccagcggcucugcuuguucgugugugugucguugcaggccuuauucaagcuuaccauggagcugcccauccucaagaccaacgccaucaccacgauccuggccgcggugacccugugcuucgccagcucccagaacaucaccgaggaguucuaccagagcacgugcuccgccgucagcaagggcuaccucuccgcccugcgcaccgggugguacaccagcgugaucaccaucgagcuguccaacaucaaggagaacaagugcaacggcaccgacgccaaggugaagcucaucaagcaggagcuggacaaguacaagaacgcggucacggagcugcagcuccugaugcagagcaccccggccgccggcuccgggagcgcgaucgccuccggcaucgccgucugcaaggugcugcaccucgagggcgaggugaacaagaucaagaacgcccugcuguccaccaacaaggccgucgugagccucuccaacggggugagcguccugaccuucaaggugcuggaccucaagaacuacaucgacaagcagcugcugcccauccugaacaagcagagcugcuccaucagcaacaucgagaccgucaucgaguuccagcagaagaacaaccgccuccuggagaucacgcgggaguucagcgugaacgcgggcgugaccacccccgucuccaccuacaugcugacgaacagcgagcuccugucccugaucaacgacaugccgaucaccaacgaccagaagaagcucaugagcaacaacgugcagaucgugcgccagcaguccuacagcaucaugugcaucaucaaggaggagguccuggccuacguggugcagcugccccucuacggggucaucgacacccccugcuggaagcugcacaccagcccccugugcacgaccaacaccaaggagggcuccaacaucugccucacccggacggaccgcgggugguacugcgacaacgccggcagcguguccuucuucccgcaggccgagaccugcaagguccagagcaaccggguguucugcgacaccaugaacucccggacccugcccagcgaggugaaccucugcaacaucgacaucuucaaccccaaguacgacugcaagaucaugacguccaagaccgacgucagcuccagcgugaucaccucccugggcgccaucgugagcugcuacgggaagaccaagugcacggcgagcaacaagaaccgcggcaucaucaagaccuucuccaacgggugcgacuacgucagcaacaagggcguggacaccguguccgucggcaacacccuguacuacgugaacaagcaggagggcaagagccucuacgugaagggggagcccaucaucaacuucuacgacccgcuggucuuccccuccgacgaguucgacgccagcaucucccaggugaacgagaagaucaaccagagccuggccuucauccggaaguccgacgagcuccugcacaacgugaacgucggcaagagcaccacgaacaucaugaucaccaccaucaucaucgugaucaucgugauccugcugcuccugaucgccgucgggcuguuccucuacugcaaggcccgcuccacccccgugacgcugagcaaggaccagcuguccgggaucaacaacaucgcguucagcaacugaggacuaguaauaaggaaacuguaugaaugucugugggcaggaagugaagagauccuucuguaaagguuuuuggaauuaugucugcugaauaauaaacuuuuuugaaauaauaaaucugguagaaaaaugagaucuaaaaaaaaaaaaaaaaaaaaaaaaaaaaaaaaaaaaaaaaaaaaaaaaaaaaaaaaaaaaaaaaugcaucccccccccccccccccccccccccccccccaaaggcucuuuucagagccaccagaauu

SEQ ID NO: 13276 - RNA, 1948 nt, Artificial Sequence
  mRNA product Design b-4 comprising derived and/or modified sequence from HRSV(Memphis-37)__AIY60640.1__F_DSCav1_mut0 (opt1)
gggagagucccgcagucggcguccagcggcucugcuuguucgugugugugucguugcaggccuuauucaagcuuaccauggagcugcccauccucaagaccaacgccaucaccacgauccuggccgcggugacccugugcuucgccagcucccagaacaucaccgaggaguucuaccagagcacgugcuccgccgucagcaagggcuaccucuccgcccugcgcaccgggugguacaccagcgugaucaccaucgagcuguccaacaucaaggagaacaagugcaacggcaccgacgccaaggugaagcucaucaagcaggagcuggacaaguacaagaacgcggucacggagcugcagcuccugaugcagagcaccccggccgccggguccggcagcgccaucgcguccgggaucgccgugugcaaggugcugcaccucgagggcgaggucaacaagaucaagaacgcccugcugagcaccaacaaggccguggugucccucagcaacggcgucuccgugcugaccuucaaggugcuggaccucaagaacuacaucgacaagcagcugcugcccauccucaacaagcagagcugcuccaucagcaacaucgagacggucaucgaguuccagcagaagaacaaccggcugcuggagaucacccgcgaguucuccgugaacgccggggugaccacccccgucagcacguacaugcucaccaacagcgagcugcugucccucaucaacgacaugcccaucaccaacgaccagaagaagcugaugagcaacaacgugcagaucgugcggcagcaguccuacagcaucaugugcaucaucaaggaggagguccuggcguacguggugcagcucccgcuguacggcgucaucgacacccccugcuggaagcugcacacgagcccccucugcaccaccaacaccaaggagggguccaacaucugccugacgcgcaccgaccggggcugguacugcgacaacgccggguccgugagcuucuucccccaggccgagaccugcaaggugcaguccaaccgcgucuucugcgacaccaugaacagccggacgcucccguccgaggugaaccugugcaacaucgacaucuucaaccccaaguacgacugcaagaucaugaccagcaagaccgacgucuccagcuccgugaucaccagccugggcgccaucguguccugcuacggcaagacgaagugcaccgccagcaacaagaaccgggggaucaucaagaccuucuccaacggcugcgacuacgucagcaacaaggggguggacaccgugagcgucggcaacacgcucuacuacgugaacaagcaggagggcaagucccuguacgugaagggggagcccaucaucaacuucuacgacccccuggucuucccgagcgacgaguucgacgcguccaucagccaggugaacgagaagaucaaccagucccucgccuucauccgcaagagcgacgagcugcugcacaacgugaacgucggcaaguccaccaccaacaucaugaucaccaccaucaucaucgugaucaucgugauccuccugcugcucaucgccgucgggcuguuccuguacugcaaggcccggagcacgcccgugacccuguccaaggaccagcucagcggcaucaacaacaucgccuucuccaacugaggacuaguaauaaggaaacuguaugaaugucugugggcaggaagugaagagauccuucuguaaagguuuuuggaauuaugucugcugaauaauaaacuuuuuugaaauaauaaaucugguagaaaaaugagaucuaaaaaaaaaaaaaaaaaaaaaaaaaaaaaaaaaaaaaaaaaaaaaaaaaaaaaaaaaaaaaaaaugcaucccccccccccccccccccccccccccccccaaaggcucuuuucagagccaccagaauu

SEQ ID NO: 13277 - RNA, 1948 nt, Artificial Sequence
  mRNA product Design b-4 comprising derived and/or modified sequence from HRSV(Memphis-37)__AIY60640.1__F_DSCav1_mut0 (opt2)
gggagagucccgcagucggcguccagcggcucugcuuguucgugugugugucguugcaggccuuauucaagcuuaccauggagcuccccauccucaagaccaacgccaucaccaccauccucgccgccgucacccucugcuucgccuccucccagaacaucaccgaggaguucuaccaguccaccugcuccgccgucuccaagggcuaccucuccgcccuccgcaccggcugguacaccuccgucaucaccaucgagcucuccaacaucaaggagaacaagugcaacggcaccgacgccaaggucaagcucaucaagcaggagcucgacaaguacaagaacgccgucaccgagcuccagcuccucaugcaguccacccccgccgccggcuccggcuccgccaucgccuccggcaucgccgucugcaagguccuccaccucgagggcgaggucaacaagaucaagaacgcccuccucuccaccaacaaggccgucgucucccucuccaacggcgucuccguccucaccuucaagguccucgaccucaagaacuacaucgacaagcagcuccuccccauccucaacaagcaguccugcuccaucuccaacaucgagaccgucaucgaguuccagcagaagaacaaccgccuccucgagaucacccgcgaguucuccgucaacgccggcgucaccacccccgucuccaccuacaugcucaccaacuccgagcuccucucccucaucaacgacaugcccaucaccaacgaccagaagaagcucauguccaacaacguccagaucguccgccagcaguccuacuccaucaugugcaucaucaaggaggagguccucgccuacgucguccagcucccccucuacggcgucaucgacacccccugcuggaagcuccacaccuccccccucugcaccaccaacaccaaggagggcuccaacaucugccucacccgcaccgaccgcggcugguacugcgacaacgccggcuccgucuccuucuucccccaggccgagaccugcaagguccaguccaaccgcgucuucugcgacaccaugaacucccgcacccuccccuccgaggucaaccucugcaacaucgacaucuucaaccccaaguacgacugcaagaucaugaccuccaagaccgacgucuccuccuccgucaucaccucccucggcgccaucgucuccugcuacggcaagaccaagugcaccgccuccaacaagaaccgcggcaucaucaagaccuucuccaacggcugcgacuacgucuccaacaagggcgucgacaccgucuccgucggcaacacccucuacuacgucaacaagcaggagggcaagucccucuacgucaagggcgagcccaucaucaacuucuacgacccccucgucuuccccuccgacgaguucgacgccuccaucucccaggucaacgagaagaucaaccagucccucgccuucauccgcaaguccgacgagcuccuccacaacgucaacgucggcaaguccaccaccaacaucaugaucaccaccaucaucaucgucaucaucgucauccuccuccuccucaucgccgucggccucuuccucuacugcaaggcccgcuccacccccgucacccucuccaaggaccagcucuccggcaucaacaacaucgccuucuccaacugaggacuaguaauaaggaaacuguaugaaugucugugggcaggaagugaagagauccuucuguaaagguuuuuggaauuaugucugcugaauaauaaacuuuuuugaaauaauaaaucugguagaaaaaugagaucuaaaaaaaaaaaaaaaaaaaaaaaaaaaaaaaaaaaaaaaaaaaaaaaaaaaaaaaaaaaaaaaaugcaucccccccccccccccccccccccccccccccaaaggcucuuuucagagccaccagaauu

SEQ ID NO: 13278 - RNA, 1948 nt, Artificial Sequence
  mRNA product Design b-4 comprising derived and/or modified sequence from HRSV(Memphis-37)__AIY60640.1__F_DSCav1_mut0 (opt3)
gggagagucccgcagucggcguccagcggcucugcuuguucgugugugugucguugcaggccuuauucaagcuuaccauggagcugcccauccucaagaccaacgccauuacaacuauacuugcugcagugacgcugugcuucgccagcucccagaauaucaccgaagaguuuuaccaaucuacauguucagcggucaguaaaggcuauuugagcgcuuuaagaacugggugguacaccuccguuauuacaaucgaacugucuaacauuaaggagaauaaaugcaacggaaccgacgccaaggugaaacuaaucaagcaggaacucgauaaguauaaaaaugcaguaacugagcugcagcuucugaugcagucgaccccugccgcugguucaggcagcgcaauagccagugggaucgcuguguguaaggucuugcaccucgagggagaagugaacaaaauuaagaaugcccugcuguccacaaacaaagcgguugugucucucagcaauggcgucuccguguuaacguucaagguacuggaccuuaagaacuacaucgauaaacaauugcugccaauucuaaauaagcagucaugcaguaucagcaacauagagacuguuauugaauuucagcagaaaaauaacaggcuccuggagaucacccgggaguucucugugaaugccggugucacaacuccgguguccaccuauaugcuuacaaacucagaacuguugagccucauuaacgacaugcccaucaccaaugaucaaaagaaacugaugaguaacaaugugcagaucguccgccagcagucuuacuccauuauguguauaaucaaggaggaaguuuuagcauaugugguacaacugccucucuacggggugauugacacgccaugcuggaaacuucauacuagcccccuguguacaaccaacacuaaggagggaucgaauaucugcuugacacgaaccgaucguggcugguacugugacaacgcuggcucugucuccuuuuucccucaggccgaaacgugcaaggugcagucaaauagaguguuuugugauaccaugaacaguagaacacugccaagcgaggugaaucucugcaacauagacauuuucaaucccaaauaugauugcaagaucaugacuuccaaaaccgacgucucuagcucagugaucacaagucugggggcaauuguauccuguuacggaaagacuaaaugcaccgcuagcaacaagaauagggguaucauuaagacauuuucuaacggcugugauuauguuucaaauaaagggguggacaccgucagugugggaaacacucuuuacuaugucaacaagcaagagggcaaaagccuguacgugaagggugaaccuauaaucaauuucuaugacccauugguuuuuccguccgaugaguucgacgccucuauuucgcagguuaacgagaaaaucaaucagagccucgcguuuauccggaaguccgaugaacuguuacacaacguaaaugucgggaagucaacgacaaacauuaugauaaccacuaucauuaucgugauuaucguuauacugcuacuccugaucgccgugggacuuuucuuguacugcaaagcacgcaguacccccgucacacugucuaaggaccagcucagcggcauuaauaacaucgcuuucuccaauugaggacuaguaauaaggaaacuguaugaaugucugugggcaggaagugaagagauccuucuguaaagguuuuuggaauuaugucugcugaauaauaaacuuuuuugaaauaauaaaucugguagaaaaaugagaucuaaaaaaaaaaaaaaaaaaaaaaaaaaaaaaaaaaaaaaaaaaaaaaaaaaaaaaaaaaaaaaaaugcaucccccccccccccccccccccccccccccccaaaggcucuuuucagagccaccagaauu

SEQ ID NO: 13279 - RNA, 1948 nt, Artificial Sequence
  mRNA product Design b-4 comprising derived and/or modified sequence from HRSV(Memphis-37)__AIY60640.1__F_DSCav1_mut0 (opt4)
gggagagucccgcagucggcguccagcggcucugcuuguucgugugugugucguugcaggccuuauucaagcuuaccauggagcugcccauccugaagaccaacgccaucaccaccauccuggccgccgugacccugugcuucgccagcagccagaacaucaccgaggaguucuaccagagcaccugcagcgccgugagcaagggcuaccugagcgcccugagaaccggcugguacaccagcgugaucaccaucgagcugagcaacaucaaggagaacaagugcaacggcaccgacgccaaggugaagcugaucaagcaggagcuggacaaguacaagaacgccgugaccgagcugcagcugcugaugcagagcacccccgccgccggcagcggcagcgccaucgccagcggcaucgccgugugcaaggugcugcaccuggagggcgaggugaacaagaucaagaacgcccugcugagcaccaacaaggccguggugagccugagcaacggcgugagcgugcugaccuucaaggugcuggaccugaagaacuacaucgacaagcagcugcugcccauccugaacaagcagagcugcagcaucagcaacaucgagaccgugaucgaguuccagcagaagaacaacagacugcuggagaucaccagagaguucagcgugaacgccggcgugaccacccccgugagcaccuacaugcugaccaacagcgagcugcugagccugaucaacgacaugcccaucaccaacgaccagaagaagcugaugagcaacaacgugcagaucgugagacagcagagcuacagcaucaugugcaucaucaaggaggaggugcuggccuacguggugcagcugccccuguacggcgugaucgacacccccugcuggaagcugcacaccagcccccugugcaccaccaacaccaaggagggcagcaacaucugccugaccagaaccgacagaggcugguacugcgacaacgccggcagcgugagcuucuucccccaggccgagaccugcaaggugcagagcaacagaguguucugcgacaccaugaacagcagaacccugcccagcgaggugaaccugugcaacaucgacaucuucaaccccaaguacgacugcaagaucaugaccagcaagaccgacgugagcagcagcgugaucaccagccugggcgccaucgugagcugcuacggcaagaccaagugcaccgccagcaacaagaacagaggcaucaucaagaccuucagcaacggcugcgacuacgugagcaacaagggcguggacaccgugagcgugggcaacacccuguacuacgugaacaagcaggagggcaagagccuguacgugaagggcgagcccaucaucaacuucuacgacccccugguguuccccagcgacgaguucgacgccagcaucagccaggugaacgagaagaucaaccagagccuggccuucaucagaaagagcgacgagcugcugcacaacgugaacgugggcaagagcaccaccaacaucaugaucaccaccaucaucaucgugaucaucgugauccugcugcugcugaucgccgugggccuguuccuguacugcaaggccagaagcacccccgugacccugagcaaggaccagcugagcggcaucaacaacaucgccuucagcaacugaggacuaguaauaaggaaacuguaugaaugucugugggcaggaagugaagagauccuucuguaaagguuuuuggaauuaugucugcugaauaauaaacuuuuuugaaauaauaaaucugguagaaaaaugagaucuaaaaaaaaaaaaaaaaaaaaaaaaaaaaaaaaaaaaaaaaaaaaaaaaaaaaaaaaaaaaaaaaugcaucccccccccccccccccccccccccccccccaaaggcucuuuucagagccaccagaauu

SEQ ID NO: 13280 - RNA, 1948 nt, Artificial Sequence
  mRNA product Design b-4 comprising derived and/or modified sequence from HRSV(Memphis-37)__AIY60640.1__F_DSCav1_mut0 (opt5)
gggagagucccgcagucggcguccagcggcucugcuuguucgugugugugucguugcaggccuuauucaagcuuaccauggagcugcccauccucaagaccaacgccauuacaacgauccuggcugccgugacccuuugcuucgcgagcucccagaauauuacagaagaguuuuaccaaucuaccuguagcgcugucuccaaaggcuaucugucugcccucagaacagggugguacaccagcguuaucacaauugaacuguccaacaucaaggagaauaaaugcaacggaaccgacgccaaggugaaacuuaucaagcaggaacuggauaaguauaaaaaugcugugacggagcuccagcugcugaugcagucuaccccugccgcuggcagcggguccgccauugcgagcggaaucgccgucuguaaggugcuccaccuggagggcgaaguuaacaaaauuaagaaugcccuucugucuacaaacaaagcuguggucucccucagcaauggggugucuguucugaccuucaaggugcuugaccugaagaacuacaucgauaaacaacuccugccgauucugaauaagcaguccugcagcaucucuaacauugagacagucaucgaauuucagcagaaaaauaaccggcuccuggagaucacccgcgaguucuccgugaaugcuggagugacgacacccgucagcaccuauaugcuuacaaacuccgaacugcucucucugauuaacgacaugccuaucaccaaugaucaaaagaaacuuaugagcaacaauguucagauugugagacagcaguccuacagcaucauguguauuaucaaggaggaagugcuggccuaugucgugcaacucccccuguacggcguuaucgacaccccuugcuggaaacugcauacaucuccccucuguacgaccaacacaaaggagggcuccaauauuugccugacccggacagaucgcgggugguacugugacaacgcgggaagcgugagcuuuuucccucaggccgaaaccugcaagguccagucuaauagaguguuuugugauacgaugaacuccagaacacugccgucugagguuaaucucugcaacaucgacauuuucaaucccaaauaugauugcaagaucaugaccagcaaaaccgacguguccagcucugucauuacaucccugggcgcuaucgugagcuguuacgggaagaccaaaugcacagccucuaacaagaaucggggaaucauuaagacguuuuccaacggcugugauuaugucagcaauaaagggguggacaccguuuccgugggaaacacacuuuacuaugucaacaagcaagagggcaaaucucuguacgugaagggcgaaccuaucauuaauuucuaugacccccucguuuuuccuagcgaugaguucgacgcuuccaucucucaggugaacgaaaagauuaaucagagccuggccuuuauccgcaaguccgaugagcugcuccacaacgucaauguggggaaaagcaccacaaacauuaugaucaccacgaucauuaucgugauuaucguuauucugcuucugcucaucgccgucggacuguuccuguacugcaaagcuagaucuacccccgugacacuuuccaaggaccagcucagcggcaucaauaacauugcguucucuaauugaggacuaguaauaaggaaacuguaugaaugucugugggcaggaagugaagagauccuucuguaaagguuuuuggaauuaugucugcugaauaauaaacuuuuuugaaauaauaaaucugguagaaaaaugagaucuaaaaaaaaaaaaaaaaaaaaaaaaaaaaaaaaaaaaaaaaaaaaaaaaaaaaaaaaaaaaaaaaugcaucccccccccccccccccccccccccccccccaaaggcucuuuucagagccaccagaauu

SEQ ID NO: 13281 - RNA, 1948 nt, Artificial Sequence
  mRNA product Design b-4 comprising derived and/or modified sequence from HRSV(Memphis-37)__AIY60640.1__F_DSCav1_mut0 (opt6)
gggagagucccgcagucggcguccagcggcucugcuuguucgugugugugucguugcaggccuuauucaagcuuaccauggaauuaccaaucuuaaaaacaaacgccauaacaaccauccucgcagcaguaacccuaugcuuugcauccucacaaaacauaacugaagaauuuuaccaaucaacaugcucagcaguaucaaaaggauaucuaucagcccucagaacaggaugguacacaucagucauuacaaucgaacuuucaaacauaaaagaaaauaaauguaacggcacagaugccaaaguaaaauuaauuaaacaagaacuugacaaauacaaaaaugccguaacagaacuacaacuacuaaugcaaaguacuccugcugcaggaagcggaucugcaauagcaucagguauagcaguauguaaaguucuacaccuagaaggcgaaguaaacaaaauuaaaaacgcacuacucucaacaaauaaagcaguugucucccuaucaaacggaguaucaguauuaacuuucaaaguacuagaccucaaaaacuauauagacaaacaacuauuaccaauacuaaacaaacaaagcugcucuaucuccaacaucgaaacaguaauagaauuucaacaaaaaaauaauagacuacuugaaauaaccagagaauuuucaguaaacgccggaguaacaacaccaguaucaacuuacaugcuaacaaacuccgaacuacuaucauuaauaaacgacaugcccauaacaaacgaccaaaaaaaauuaaugucaaacaacguccaaaucguacgacaacaauccuauuccauaauguguauaauaaaagaagaaguacuagcauacguaguacaauuaccauuauauggaguaauagauaccccuugcuggaaacuacacacaucaccccuaugcacuacaaauacgaaagaagguucaaauauaugcuuaacuagaaccgauagagguugguauugugacaacgcuggaucaguaucauuuuucccacaagcagaaacaugcaaaguacaaucaaacagaguauuuugcgacacuaugaacucaagaacuuuaccauccgaaguuaaucuauguaacauagauauauuuaacccaaaauacgacugcaaaauaaugacaucaaaaacagauguaucaucaucaguuauaaccucccucggagcaauaguaucaugcuauggaaaaacaaaaugcacagcaucaaacaaaaaucguggaauuauaaaaacauucucaaacggcugugacuacgucagcaauaaaggaguagacacagucucaguaggaaacacuuuauacuauguuaacaaacaagaaggaaaaucacucuacgucaaaggcgaaccaauaauaaauuucuaugacccacucguauucccauccgacgaauuugacgcaucaauaucacaaguaaaugaaaaaauaaaccaaagccuagcauuuauacgaaaaucagacgaacuacuacacaacguaaacguagguaaaagcacaaccaauauaaugauaacaacaauaaucauaguaauaaucguaauauuacuauuacuaauagcuguaggauuguuccuauacugcaaagcaagaucaacaccaguaaccuuaucuaaggaccaacuaucaggaaucaauaacauugccuucucaaacuaaggacuaguaauaaggaaacuguaugaaugucugugggcaggaagugaagagauccuucuguaaagguuuuuggaauuaugucugcugaauaauaaacuuuuuugaaauaauaaaucugguagaaaaaugagaucuaaaaaaaaaaaaaaaaaaaaaaaaaaaaaaaaaaaaaaaaaaaaaaaaaaaaaaaaaaaaaaaaugcaucccccccccccccccccccccccccccccccaaaggcucuuuucagagccaccagaauu

SEQ ID NO: 13282 - RNA, 1948 nt, Artificial Sequence
  mRNA product Design b-4 comprising derived and/or modified sequence from HRSV(Memphis-37)__AIY60640.1__F_DSCav1_mut0 (opt11)
gggagagucccgcagucggcguccagcggcucugcuuguucgugugugugucguugcaggccuuauucaagcuuaccauggaacuaccuauccuuaaaaccaacgcaaucaccaccauccuugccgcagucacacucugcuucgcauccucacagaacaucaccgaagaguucuaucaaucaaccugcuccgccguauccaaaggauaccucucagcccuccgcaccggcugguauaccucagucauaacaaucgaauuaucaaauaucaaggagaacaaaugcaacggcaccgacgccaaagucaaacucauaaaacaagaacuagacaaauacaaaaacgccgugacagaacuccaacuccucaugcaguccacccccgcagccggauccggcucagcaaucgccucgggcauugcaguaugcaaaguccuccaccucgaaggcgaagucaacaaaaucaaaaacgcccuccucuccaccaacaaagccgucgucucccucuccaacggcguaucuguccucacuuucaagguccucgaccucaaaaacuacaucgacaagcaacuacuuccaauccucaacaagcaauccugcucaaucucaaacaucgaaaccguaauagaguuccaacaaaagaacaaccgccuccucgaaaucacccgcgaguucuccguuaacgccggugucacuaccccagucagcaccuacaugcucaccaacuccgaacuccuuucucugaucaacgacaugccaaucaccaacgaucaaaagaaauuaauguccaacaacguccagaucguccgccaacaaagcuacagcaucaugugcaucauaaaagaagaaguacuugcguacguaguucaacuaccccuuuacggcguaaucgacaccccaugcuggaaacuccacaccuccccacuaugcaccaccaacaccaaagaaggauccaacaucugccuaacccgcaccgaccgcggcugguacugcgacaacgcugggagcgucucauucuucccacaagcagaaaccugcaaaguccaaucgaaccgcguauucugcgacaccaugaacuccagaacccuaccaagcgaagucaaucuuugcaacaucgacauauuuaaccccaaauacgacugcaaaaucaugacaucaaagaccgacgucucaucuucagucauuaccucacucggcgcaauugucagcugcuacggaaagaccaaauguaccgccuccaauaaaaaccguggaaucauaaaaaccuuuagcaacggcugcgacuacgucuccaacaaaggagucgacaccgucuccgucggcaacacccucuacuacgucaacaaacaagaaggaaaaucccucuacgugaaaggcgaacccauaauaaacuucuacgacccccuagucuuccccucugacgaguucgacgccuccaucucccaagucaacgaaaagauaaaucaaucacuagccuucauacgcaaaucugacgaacuucuccacaacgucaacgucggcaaauccaccaccaacauaaugaucacaacgauaauaaucgugaucauaguaauccuacuucuccucaucgcaguaggucuauuccuauacugcaaagcccgcagcacccccgucacccuaucaaaagaccaacucuccggcaucaacaacaucgccuucucaaacuaaggacuaguaauaaggaaacuguaugaaugucugugggcaggaagugaagagauccuucuguaaagguuuuuggaauuaugucugcugaauaauaaacuuuuuugaaauaauaaaucugguagaaaaaugagaucuaaaaaaaaaaaaaaaaaaaaaaaaaaaaaaaaaaaaaaaaaaaaaaaaaaaaaaaaaaaaaaaaugcaucccccccccccccccccccccccccccccccaaaggcucuuuucagagccaccagaauu

SEQ ID NO: 13283 - RNA, 2010 nt, Artificial Sequence
  mRNA product Design b-5 comprising derived and/or modified sequence from HRSV(Memphis-37)__AIY60640.1__F_DSCav1_mut0 (opt1)
gggagacuccugucgggcggaaguaggaggaguagaguuuaaaaacaguacucuuuuuccgguucgggacguaguugaagcaacgacaagccggauaaccgcucuugagacaggaagcuuaccauggagcugcccauccucaagaccaacgccaucaccacgauccuggccgcggugacccugugcuucgccagcucccagaacaucaccgaggaguucuaccagagcacgugcuccgccgucagcaagggcuaccucuccgcccugcgcaccgggugguacaccagcgugaucaccaucgagcuguccaacaucaaggagaacaagugcaacggcaccgacgccaaggugaagcucaucaagcaggagcuggacaaguacaagaacgcggucacggagcugcagcuccugaugcagagcaccccggccgccggcuccgggagcgcgaucgccuccggcaucgccgucugcaaggugcugcaccucgagggcgaggugaacaagaucaagaacgcccugcuguccaccaacaaggccgucgugagccucuccaacggggugagcguccugaccuucaaggugcuggaccucaagaacuacaucgacaagcagcugcugcccauccugaacaagcagagcugcuccaucagcaacaucgagaccgucaucgaguuccagcagaagaacaaccgccuccuggagaucacgcgggaguucagcgugaacgcgggcgugaccacccccgucuccaccuacaugcugacgaacagcgagcuccugucccugaucaacgacaugccgaucaccaacgaccagaagaagcucaugagcaacaacgugcagaucgugcgccagcaguccuacagcaucaugugcaucaucaaggaggagguccuggccuacguggugcagcugccccucuacggggucaucgacacccccugcuggaagcugcacaccagcccccugugcacgaccaacaccaaggagggcuccaacaucugccucacccggacggaccgcgggugguacugcgacaacgccggcagcguguccuucuucccgcaggccgagaccugcaagguccagagcaaccggguguucugcgacaccaugaacucccggacccugcccagcgaggugaaccucugcaacaucgacaucuucaaccccaaguacgacugcaagaucaugacguccaagaccgacgucagcuccagcgugaucaccucccugggcgccaucgugagcugcuacgggaagaccaagugcacggcgagcaacaagaaccgcggcaucaucaagaccuucuccaacgggugcgacuacgucagcaacaagggcguggacaccguguccgucggcaacacccuguacuacgugaacaagcaggagggcaagagccucuacgugaagggggagcccaucaucaacuucuacgacccgcuggucuuccccuccgacgaguucgacgccagcaucucccaggugaacgagaagaucaaccagagccuggccuucauccggaaguccgacgagcuccugcacaacgugaacgucggcaagagcaccacgaacaucaugaucaccaccaucaucaucgugaucaucgugauccugcugcuccugaucgccgucgggcuguuccucuacugcaaggcccgcuccacccccgugacgcugagcaaggaccagcuguccgggaucaacaacaucgcguucagcaacugaggacuaguacuggcugcaucucccuuuccucuguccuccauccuucucccaggauggugaagggggaccugguacccagugauccccaccccaggauccuaaaucaugacuuaccugcuaauaaaaacucauuggaaaagugagaagaucuaaaaaaaaaaaaaaaaaaaaaaaaaaaaaaaaaaaaaaaaaaaaaaaaaaaaaaaaaaaaaaaaugcaucccccccccccccccccccccccccccccccaaaggcucuuuucagagccaccagaauu

SEQ ID NO: 13284 - RNA, 2010 nt, Artificial Sequence
  mRNA product Design b-5 comprising derived and/or modified sequence from HRSV(Memphis-37)__AIY60640.1__F_DSCav1_mut0 (opt1)
gggagacuccugucgggcggaaguaggaggaguagaguuuaaaaacaguacucuuuuuccgguucgggacguaguugaagcaacgacaagccggauaaccgcucuugagacaggaagcuuaccauggagcugcccauccucaagaccaacgccaucaccacgauccuggccgcggugacccugugcuucgccagcucccagaacaucaccgaggaguucuaccagagcacgugcuccgccgucagcaagggcuaccucuccgcccugcgcaccgggugguacaccagcgugaucaccaucgagcuguccaacaucaaggagaacaagugcaacggcaccgacgccaaggugaagcucaucaagcaggagcuggacaaguacaagaacgcggucacggagcugcagcuccugaugcagagcaccccggccgccggguccggcagcgccaucgcguccgggaucgccgugugcaaggugcugcaccucgagggcgaggucaacaagaucaagaacgcccugcugagcaccaacaaggccguggugucccucagcaacggcgucuccgugcugaccuucaaggugcuggaccucaagaacuacaucgacaagcagcugcugcccauccucaacaagcagagcugcuccaucagcaacaucgagacggucaucgaguuccagcagaagaacaaccggcugcuggagaucacccgcgaguucuccgugaacgccggggugaccacccccgucagcacguacaugcucaccaacagcgagcugcugucccucaucaacgacaugcccaucaccaacgaccagaagaagcugaugagcaacaacgugcagaucgugcggcagcaguccuacagcaucaugugcaucaucaaggaggagguccuggcguacguggugcagcucccgcuguacggcgucaucgacacccccugcuggaagcugcacacgagcccccucugcaccaccaacaccaaggagggguccaacaucugccugacgcgcaccgaccggggcugguacugcgacaacgccggguccgugagcuucuucccccaggccgagaccugcaaggugcaguccaaccgcgucuucugcgacaccaugaacagccggacgcucccguccgaggugaaccugugcaacaucgacaucuucaaccccaaguacgacugcaagaucaugaccagcaagaccgacgucuccagcuccgugaucaccagccugggcgccaucguguccugcuacggcaagacgaagugcaccgccagcaacaagaaccgggggaucaucaagaccuucuccaacggcugcgacuacgucagcaacaaggggguggacaccgugagcgucggcaacacgcucuacuacgugaacaagcaggagggcaagucccuguacgugaagggggagcccaucaucaacuucuacgacccccuggucuucccgagcgacgaguucgacgcguccaucagccaggugaacgagaagaucaaccagucccucgccuucauccgcaagagcgacgagcugcugcacaacgugaacgucggcaaguccaccaccaacaucaugaucaccaccaucaucaucgugaucaucgugauccuccugcugcucaucgccgucgggcuguuccuguacugcaaggcccggagcacgcccgugacccuguccaaggaccagcucagcggcaucaacaacaucgccuucuccaacugaggacuaguacuggcugcaucucccuuuccucuguccuccauccuucucccaggauggugaagggggaccugguacccagugauccccaccccaggauccuaaaucaugacuuaccugcuaauaaaaacucauuggaaaagugagaagaucuaaaaaaaaaaaaaaaaaaaaaaaaaaaaaaaaaaaaaaaaaaaaaaaaaaaaaaaaaaaaaaaaugcaucccccccccccccccccccccccccccccccaaaggcucuuuucagagccaccagaauu

SEQ ID NO: 13285 - RNA, 2010 nt, Artificial Sequence
  mRNA product Design b-5 comprising derived and/or modified sequence from HRSV(Memphis-37)__AIY60640.1__F_DSCav1_mut0 (opt2)
gggagacuccugucgggcggaaguaggaggaguagaguuuaaaaacaguacucuuuuuccgguucgggacguaguugaagcaacgacaagccggauaaccgcucuugagacaggaagcuuaccauggagcuccccauccucaagaccaacgccaucaccaccauccucgccgccgucacccucugcuucgccuccucccagaacaucaccgaggaguucuaccaguccaccugcuccgccgucuccaagggcuaccucuccgcccuccgcaccggcugguacaccuccgucaucaccaucgagcucuccaacaucaaggagaacaagugcaacggcaccgacgccaaggucaagcucaucaagcaggagcucgacaaguacaagaacgccgucaccgagcuccagcuccucaugcaguccacccccgccgccggcuccggcuccgccaucgccuccggcaucgccgucugcaagguccuccaccucgagggcgaggucaacaagaucaagaacgcccuccucuccaccaacaaggccgucgucucccucuccaacggcgucuccguccucaccuucaagguccucgaccucaagaacuacaucgacaagcagcuccuccccauccucaacaagcaguccugcuccaucuccaacaucgagaccgucaucgaguuccagcagaagaacaaccgccuccucgagaucacccgcgaguucuccgucaacgccggcgucaccacccccgucuccaccuacaugcucaccaacuccgagcuccucucccucaucaacgacaugcccaucaccaacgaccagaagaagcucauguccaacaacguccagaucguccgccagcaguccuacuccaucaugugcaucaucaaggaggagguccucgccuacgucguccagcucccccucuacggcgucaucgacacccccugcuggaagcuccacaccuccccccucugcaccaccaacaccaaggagggcuccaacaucugccucacccgcaccgaccgcggcugguacugcgacaacgccggcuccgucuccuucuucccccaggccgagaccugcaagguccaguccaaccgcgucuucugcgacaccaugaacucccgcacccuccccuccgaggucaaccucugcaacaucgacaucuucaaccccaaguacgacugcaagaucaugaccuccaagaccgacgucuccuccuccgucaucaccucccucggcgccaucgucuccugcuacggcaagaccaagugcaccgccuccaacaagaaccgcggcaucaucaagaccuucuccaacggcugcgacuacgucuccaacaagggcgucgacaccgucuccgucggcaacacccucuacuacgucaacaagcaggagggcaagucccucuacgucaagggcgagcccaucaucaacuucuacgacccccucgucuuccccuccgacgaguucgacgccuccaucucccaggucaacgagaagaucaaccagucccucgccuucauccgcaaguccgacgagcuccuccacaacgucaacgucggcaaguccaccaccaacaucaugaucaccaccaucaucaucgucaucaucgucauccuccuccuccucaucgccgucggccucuuccucuacugcaaggcccgcuccacccccgucacccucuccaaggaccagcucuccggcaucaacaacaucgccuucuccaacugaggacuaguacuggcugcaucucccuuuccucuguccuccauccuucucccaggauggugaagggggaccugguacccagugauccccaccccaggauccuaaaucaugacuuaccugcuaauaaaaacucauuggaaaagugagaagaucuaaaaaaaaaaaaaaaaaaaaaaaaaaaaaaaaaaaaaaaaaaaaaaaaaaaaaaaaaaaaaaaaugcaucccccccccccccccccccccccccccccccaaaggcucuuuucagagccaccagaauu

SEQ ID NO: 13286 - RNA, 2010 nt, Artificial Sequence
  mRNA product Design b-5 comprising derived and/or modified sequence from HRSV(Memphis-37)__AIY60640.1__F_DSCav1_mut0 (opt3)
gggagacuccugucgggcggaaguaggaggaguagaguuuaaaaacaguacucuuuuuccgguucgggacguaguugaagcaacgacaagccggauaaccgcucuugagacaggaagcuuaccauggagcugcccauccucaagaccaacgccauuacaacuauacuugcugcagugacgcugugcuucgccagcucccagaauaucaccgaagaguuuuaccaaucuacauguucagcggucaguaaaggcuauuugagcgcuuuaagaacugggugguacaccuccguuauuacaaucgaacugucuaacauuaaggagaauaaaugcaacggaaccgacgccaaggugaaacuaaucaagcaggaacucgauaaguauaaaaaugcaguaacugagcugcagcuucugaugcagucgaccccugccgcugguucaggcagcgcaauagccagugggaucgcuguguguaaggucuugcaccucgagggagaagugaacaaaauuaagaaugcccugcuguccacaaacaaagcgguugugucucucagcaauggcgucuccguguuaacguucaagguacuggaccuuaagaacuacaucgauaaacaauugcugccaauucuaaauaagcagucaugcaguaucagcaacauagagacuguuauugaauuucagcagaaaaauaacaggcuccuggagaucacccgggaguucucugugaaugccggugucacaacuccgguguccaccuauaugcuuacaaacucagaacuguugagccucauuaacgacaugcccaucaccaaugaucaaaagaaacugaugaguaacaaugugcagaucguccgccagcagucuuacuccauuauguguauaaucaaggaggaaguuuuagcauaugugguacaacugccucucuacggggugauugacacgccaugcuggaaacuucauacuagcccccuguguacaaccaacacuaaggagggaucgaauaucugcuugacacgaaccgaucguggcugguacugugacaacgcuggcucugucuccuuuuucccucaggccgaaacgugcaaggugcagucaaauagaguguuuugugauaccaugaacaguagaacacugccaagcgaggugaaucucugcaacauagacauuuucaaucccaaauaugauugcaagaucaugacuuccaaaaccgacgucucuagcucagugaucacaagucugggggcaauuguauccuguuacggaaagacuaaaugcaccgcuagcaacaagaauagggguaucauuaagacauuuucuaacggcugugauuauguuucaaauaaagggguggacaccgucagugugggaaacacucuuuacuaugucaacaagcaagagggcaaaagccuguacgugaagggugaaccuauaaucaauuucuaugacccauugguuuuuccguccgaugaguucgacgccucuauuucgcagguuaacgagaaaaucaaucagagccucgcguuuauccggaaguccgaugaacuguuacacaacguaaaugucgggaagucaacgacaaacauuaugauaaccacuaucauuaucgugauuaucguuauacugcuacuccugaucgccgugggacuuuucuuguacugcaaagcacgcaguacccccgucacacugucuaaggaccagcucagcggcauuaauaacaucgcuuucuccaauugaggacuaguacuggcugcaucucccuuuccucuguccuccauccuucucccaggauggugaagggggaccugguacccagugauccccaccccaggauccuaaaucaugacuuaccugcuaauaaaaacucauuggaaaagugagaagaucuaaaaaaaaaaaaaaaaaaaaaaaaaaaaaaaaaaaaaaaaaaaaaaaaaaaaaaaaaaaaaaaaugcaucccccccccccccccccccccccccccccccaaaggcucuuuucagagccaccagaauu

SEQ ID NO: 13287 - RNA, 2010 nt, Artificial Sequence
  mRNA product Design b-5 comprising derived and/or modified sequence from HRSV(Memphis-37)__AIY60640.1__F_DSCav1_mut0 (opt4)
gggagacuccugucgggcggaaguaggaggaguagaguuuaaaaacaguacucuuuuuccgguucgggacguaguugaagcaacgacaagccggauaaccgcucuugagacaggaagcuuaccauggagcugcccauccugaagaccaacgccaucaccaccauccuggccgccgugacccugugcuucgccagcagccagaacaucaccgaggaguucuaccagagcaccugcagcgccgugagcaagggcuaccugagcgcccugagaaccggcugguacaccagcgugaucaccaucgagcugagcaacaucaaggagaacaagugcaacggcaccgacgccaaggugaagcugaucaagcaggagcuggacaaguacaagaacgccgugaccgagcugcagcugcugaugcagagcacccccgccgccggcagcggcagcgccaucgccagcggcaucgccgugugcaaggugcugcaccuggagggcgaggugaacaagaucaagaacgcccugcugagcaccaacaaggccguggugagccugagcaacggcgugagcgugcugaccuucaaggugcuggaccugaagaacuacaucgacaagcagcugcugcccauccugaacaagcagagcugcagcaucagcaacaucgagaccgugaucgaguuccagcagaagaacaacagacugcuggagaucaccagagaguucagcgugaacgccggcgugaccacccccgugagcaccuacaugcugaccaacagcgagcugcugagccugaucaacgacaugcccaucaccaacgaccagaagaagcugaugagcaacaacgugcagaucgugagacagcagagcuacagcaucaugugcaucaucaaggaggaggugcuggccuacguggugcagcugccccuguacggcgugaucgacacccccugcuggaagcugcacaccagcccccugugcaccaccaacaccaaggagggcagcaacaucugccugaccagaaccgacagaggcugguacugcgacaacgccggcagcgugagcuucuucccccaggccgagaccugcaaggugcagagcaacagaguguucugcgacaccaugaacagcagaacccugcccagcgaggugaaccugugcaacaucgacaucuucaaccccaaguacgacugcaagaucaugaccagcaagaccgacgugagcagcagcgugaucaccagccugggcgccaucgugagcugcuacggcaagaccaagugcaccgccagcaacaagaacagaggcaucaucaagaccuucagcaacggcugcgacuacgugagcaacaagggcguggacaccgugagcgugggcaacacccuguacuacgugaacaagcaggagggcaagagccuguacgugaagggcgagcccaucaucaacuucuacgacccccugguguuccccagcgacgaguucgacgccagcaucagccaggugaacgagaagaucaaccagagccuggccuucaucagaaagagcgacgagcugcugcacaacgugaacgugggcaagagcaccaccaacaucaugaucaccaccaucaucaucgugaucaucgugauccugcugcugcugaucgccgugggccuguuccuguacugcaaggccagaagcacccccgugacccugagcaaggaccagcugagcggcaucaacaacaucgccuucagcaacugaggacuaguacuggcugcaucucccuuuccucuguccuccauccuucucccaggauggugaagggggaccugguacccagugauccccaccccaggauccuaaaucaugacuuaccugcuaauaaaaacucauuggaaaagugagaagaucuaaaaaaaaaaaaaaaaaaaaaaaaaaaaaaaaaaaaaaaaaaaaaaaaaaaaaaaaaaaaaaaaugcaucccccccccccccccccccccccccccccccaaaggcucuuuucagagccaccagaauu

SEQ ID NO: 13288 - RNA, 2010 nt, Artificial Sequence
  mRNA product Design b-5 comprising derived and/or modified sequence from HRSV(Memphis-37)__AIY60640.1__F_DSCav1_mut0 (opt5)
gggagacuccugucgggcggaaguaggaggaguagaguuuaaaaacaguacucuuuuuccgguucgggacguaguugaagcaacgacaagccggauaaccgcucuugagacaggaagcuuaccauggagcugcccauccucaagaccaacgccauuacaacgauccuggcugccgugacccuuugcuucgcgagcucccagaauauuacagaagaguuuuaccaaucuaccuguagcgcugucuccaaaggcuaucugucugcccucagaacagggugguacaccagcguuaucacaauugaacuguccaacaucaaggagaauaaaugcaacggaaccgacgccaaggugaaacuuaucaagcaggaacuggauaaguauaaaaaugcugugacggagcuccagcugcugaugcagucuaccccugccgcuggcagcggguccgccauugcgagcggaaucgccgucuguaaggugcuccaccuggagggcgaaguuaacaaaauuaagaaugcccuucugucuacaaacaaagcuguggucucccucagcaauggggugucuguucugaccuucaaggugcuugaccugaagaacuacaucgauaaacaacuccugccgauucugaauaagcaguccugcagcaucucuaacauugagacagucaucgaauuucagcagaaaaauaaccggcuccuggagaucacccgcgaguucuccgugaaugcuggagugacgacacccgucagcaccuauaugcuuacaaacuccgaacugcucucucugauuaacgacaugccuaucaccaaugaucaaaagaaacuuaugagcaacaauguucagauugugagacagcaguccuacagcaucauguguauuaucaaggaggaagugcuggccuaugucgugcaacucccccuguacggcguuaucgacaccccuugcuggaaacugcauacaucuccccucuguacgaccaacacaaaggagggcuccaauauuugccugacccggacagaucgcgggugguacugugacaacgcgggaagcgugagcuuuuucccucaggccgaaaccugcaagguccagucuaauagaguguuuugugauacgaugaacuccagaacacugccgucugagguuaaucucugcaacaucgacauuuucaaucccaaauaugauugcaagaucaugaccagcaaaaccgacguguccagcucugucauuacaucccugggcgcuaucgugagcuguuacgggaagaccaaaugcacagccucuaacaagaaucggggaaucauuaagacguuuuccaacggcugugauuaugucagcaauaaagggguggacaccguuuccgugggaaacacacuuuacuaugucaacaagcaagagggcaaaucucuguacgugaagggcgaaccuaucauuaauuucuaugacccccucguuuuuccuagcgaugaguucgacgcuuccaucucucaggugaacgaaaagauuaaucagagccuggccuuuauccgcaaguccgaugagcugcuccacaacgucaauguggggaaaagcaccacaaacauuaugaucaccacgaucauuaucgugauuaucguuauucugcuucugcucaucgccgucggacuguuccuguacugcaaagcuagaucuacccccgugacacuuuccaaggaccagcucagcggcaucaauaacauugcguucucuaauugaggacuaguacuggcugcaucucccuuuccucuguccuccauccuucucccaggauggugaagggggaccugguacccagugauccccaccccaggauccuaaaucaugacuuaccugcuaauaaaaacucauuggaaaagugagaagaucuaaaaaaaaaaaaaaaaaaaaaaaaaaaaaaaaaaaaaaaaaaaaaaaaaaaaaaaaaaaaaaaaugcaucccccccccccccccccccccccccccccccaaaggcucuuuucagagccaccagaauu

SEQ ID NO: 13289 - RNA, 2010 nt, Artificial Sequence
  mRNA product Design b-5 comprising derived and/or modified sequence from HRSV(Memphis-37)__AIY60640.1__F_DSCav1_mut0 (opt6)
gggagacuccugucgggcggaaguaggaggaguagaguuuaaaaacaguacucuuuuuccgguucgggacguaguugaagcaacgacaagccggauaaccgcucuugagacaggaagcuuaccauggaauuaccaaucuuaaaaacaaacgccauaacaaccauccucgcagcaguaacccuaugcuuugcauccucacaaaacauaacugaagaauuuuaccaaucaacaugcucagcaguaucaaaaggauaucuaucagcccucagaacaggaugguacacaucagucauuacaaucgaacuuucaaacauaaaagaaaauaaauguaacggcacagaugccaaaguaaaauuaauuaaacaagaacuugacaaauacaaaaaugccguaacagaacuacaacuacuaaugcaaaguacuccugcugcaggaagcggaucugcaauagcaucagguauagcaguauguaaaguucuacaccuagaaggcgaaguaaacaaaauuaaaaacgcacuacucucaacaaauaaagcaguugucucccuaucaaacggaguaucaguauuaacuuucaaaguacuagaccucaaaaacuauauagacaaacaacuauuaccaauacuaaacaaacaaagcugcucuaucuccaacaucgaaacaguaauagaauuucaacaaaaaaauaauagacuacuugaaauaaccagagaauuuucaguaaacgccggaguaacaacaccaguaucaacuuacaugcuaacaaacuccgaacuacuaucauuaauaaacgacaugcccauaacaaacgaccaaaaaaaauuaaugucaaacaacguccaaaucguacgacaacaauccuauuccauaauguguauaauaaaagaagaaguacuagcauacguaguacaauuaccauuauauggaguaauagauaccccuugcuggaaacuacacacaucaccccuaugcacuacaaauacgaaagaagguucaaauauaugcuuaacuagaaccgauagagguugguauugugacaacgcuggaucaguaucauuuuucccacaagcagaaacaugcaaaguacaaucaaacagaguauuuugcgacacuaugaacucaagaacuuuaccauccgaaguuaaucuauguaacauagauauauuuaacccaaaauacgacugcaaaauaaugacaucaaaaacagauguaucaucaucaguuauaaccucccucggagcaauaguaucaugcuauggaaaaacaaaaugcacagcaucaaacaaaaaucguggaauuauaaaaacauucucaaacggcugugacuacgucagcaauaaaggaguagacacagucucaguaggaaacacuuuauacuauguuaacaaacaagaaggaaaaucacucuacgucaaaggcgaaccaauaauaaauuucuaugacccacucguauucccauccgacgaauuugacgcaucaauaucacaaguaaaugaaaaaauaaaccaaagccuagcauuuauacgaaaaucagacgaacuacuacacaacguaaacguagguaaaagcacaaccaauauaaugauaacaacaauaaucauaguaauaaucguaauauuacuauuacuaauagcuguaggauuguuccuauacugcaaagcaagaucaacaccaguaaccuuaucuaaggaccaacuaucaggaaucaauaacauugccuucucaaacuaaggacuaguacuggcugcaucucccuuuccucuguccuccauccuucucccaggauggugaagggggaccugguacccagugauccccaccccaggauccuaaaucaugacuuaccugcuaauaaaaacucauuggaaaagugagaagaucuaaaaaaaaaaaaaaaaaaaaaaaaaaaaaaaaaaaaaaaaaaaaaaaaaaaaaaaaaaaaaaaaugcaucccccccccccccccccccccccccccccccaaaggcucuuuucagagccaccagaauu

SEQ ID NO: 13290 - RNA, 2010 nt, Artificial Sequence
  mRNA product Design b-5 comprising derived and/or modified sequence from HRSV(Memphis-37)__AIY60640.1__F_DSCav1_mut0 (opt11)
gggagacuccugucgggcggaaguaggaggaguagaguuuaaaaacaguacucuuuuuccgguucgggacguaguugaagcaacgacaagccggauaaccgcucuugagacaggaagcuuaccauggaacuaccuauccuuaaaaccaacgcaaucaccaccauccuugccgcagucacacucugcuucgcauccucacagaacaucaccgaagaguucuaucaaucaaccugcuccgccguauccaaaggauaccucucagcccuccgcaccggcugguauaccucagucauaacaaucgaauuaucaaauaucaaggagaacaaaugcaacggcaccgacgccaaagucaaacucauaaaacaagaacuagacaaauacaaaaacgccgugacagaacuccaacuccucaugcaguccacccccgcagccggauccggcucagcaaucgccucgggcauugcaguaugcaaaguccuccaccucgaaggcgaagucaacaaaaucaaaaacgcccuccucuccaccaacaaagccgucgucucccucuccaacggcguaucuguccucacuuucaagguccucgaccucaaaaacuacaucgacaagcaacuacuuccaauccucaacaagcaauccugcucaaucucaaacaucgaaaccguaauagaguuccaacaaaagaacaaccgccuccucgaaaucacccgcgaguucuccguuaacgccggugucacuaccccagucagcaccuacaugcucaccaacuccgaacuccuuucucugaucaacgacaugccaaucaccaacgaucaaaagaaauuaauguccaacaacguccagaucguccgccaacaaagcuacagcaucaugugcaucauaaaagaagaaguacuugcguacguaguucaacuaccccuuuacggcguaaucgacaccccaugcuggaaacuccacaccuccccacuaugcaccaccaacaccaaagaaggauccaacaucugccuaacccgcaccgaccgcggcugguacugcgacaacgcugggagcgucucauucuucccacaagcagaaaccugcaaaguccaaucgaaccgcguauucugcgacaccaugaacuccagaacccuaccaagcgaagucaaucuuugcaacaucgacauauuuaaccccaaauacgacugcaaaaucaugacaucaaagaccgacgucucaucuucagucauuaccucacucggcgcaauugucagcugcuacggaaagaccaaauguaccgccuccaauaaaaaccguggaaucauaaaaaccuuuagcaacggcugcgacuacgucuccaacaaaggagucgacaccgucuccgucggcaacacccucuacuacgucaacaaacaagaaggaaaaucccucuacgugaaaggcgaacccauaauaaacuucuacgacccccuagucuuccccucugacgaguucgacgccuccaucucccaagucaacgaaaagauaaaucaaucacuagccuucauacgcaaaucugacgaacuucuccacaacgucaacgucggcaaauccaccaccaacauaaugaucacaacgauaauaaucgugaucauaguaauccuacuucuccucaucgcaguaggucuauuccuauacugcaaagcccgcagcacccccgucacccuaucaaaagaccaacucuccggcaucaacaacaucgccuucucaaacuaaggacuaguacuggcugcaucucccuuuccucuguccuccauccuucucccaggauggugaagggggaccugguacccagugauccccaccccaggauccuaaaucaugacuuaccugcuaauaaaaacucauuggaaaagugagaagaucuaaaaaaaaaaaaaaaaaaaaaaaaaaaaaaaaaaaaaaaaaaaaaaaaaaaaaaaaaaaaaaaaugcaucccccccccccccccccccccccccccccccaaaggcucuuuucagagccaccagaauu

SEQ ID NO: 13291 - RNA, 1916 nt, Artificial Sequence
  mRNA product Design c-1 comprising derived and/or modified sequence from HRSV(Memphis-37)__AIY60640.1__F_DSCav1_mut0 (opt1)
gggagaguccgcucagccagguugcagaagcggcuuagcguguguccuaaucuucucucugcguguagguaggccugugccgcaaacaagcuuaccauggagcugcccauccucaagaccaacgccaucaccacgauccuggccgcggugacccugugcuucgccagcucccagaacaucaccgaggaguucuaccagagcacgugcuccgccgucagcaagggcuaccucuccgcccugcgcaccgggugguacaccagcgugaucaccaucgagcuguccaacaucaaggagaacaagugcaacggcaccgacgccaaggugaagcucaucaagcaggagcuggacaaguacaagaacgcggucacggagcugcagcuccugaugcagagcaccccggccgccggcuccgggagcgcgaucgccuccggcaucgccgucugcaaggugcugcaccucgagggcgaggugaacaagaucaagaacgcccugcuguccaccaacaaggccgucgugagccucuccaacggggugagcguccugaccuucaaggugcuggaccucaagaacuacaucgacaagcagcugcugcccauccugaacaagcagagcugcuccaucagcaacaucgagaccgucaucgaguuccagcagaagaacaaccgccuccuggagaucacgcgggaguucagcgugaacgcgggcgugaccacccccgucuccaccuacaugcugacgaacagcgagcuccugucccugaucaacgacaugccgaucaccaacgaccagaagaagcucaugagcaacaacgugcagaucgugcgccagcaguccuacagcaucaugugcaucaucaaggaggagguccuggccuacguggugcagcugccccucuacggggucaucgacacccccugcuggaagcugcacaccagcccccugugcacgaccaacaccaaggagggcuccaacaucugccucacccggacggaccgcgggugguacugcgacaacgccggcagcguguccuucuucccgcaggccgagaccugcaagguccagagcaaccggguguucugcgacaccaugaacucccggacccugcccagcgaggugaaccucugcaacaucgacaucuucaaccccaaguacgacugcaagaucaugacguccaagaccgacgucagcuccagcgugaucaccucccugggcgccaucgugagcugcuacgggaagaccaagugcacggcgagcaacaagaaccgcggcaucaucaagaccuucuccaacgggugcgacuacgucagcaacaagggcguggacaccguguccgucggcaacacccuguacuacgugaacaagcaggagggcaagagccucuacgugaagggggagcccaucaucaacuucuacgacccgcuggucuuccccuccgacgaguucgacgccagcaucucccaggugaacgagaagaucaaccagagccuggccuucauccggaaguccgacgagcuccugcacaacgugaacgucggcaagagcaccacgaacaucaugaucaccaccaucaucaucgugaucaucgugauccugcugcuccugaucgccgucgggcuguuccucuacugcaaggcccgcuccacccccgugacgcugagcaaggaccagcuguccgggaucaacaacaucgcguucagcaacugaggacuaguguccaccugucccuccugggcugcuggauugucucguuuuccugccaaauaaacaggaucagcgcuuuacagaucuaaaaaaaaaaaaaaaaaaaaaaaaaaaaaaaaaaaaaaaaaaaaaaaaaaaaaaaaaaaaaaaaugcaucccccccccccccccccccccccccccccccaaaggcucuuuucagagccaccagaauu

SEQ ID NO: 13292 - RNA, 1916 nt, Artificial Sequence
  mRNA product Design c-1 comprising derived and/or modified sequence from HRSV(Memphis-37)__AIY60640.1__F_DSCav1_mut0 (opt1)
gggagaguccgcucagccagguugcagaagcggcuuagcguguguccuaaucuucucucugcguguagguaggccugugccgcaaacaagcuuaccauggagcugcccauccucaagaccaacgccaucaccacgauccuggccgcggugacccugugcuucgccagcucccagaacaucaccgaggaguucuaccagagcacgugcuccgccgucagcaagggcuaccucuccgcccugcgcaccgggugguacaccagcgugaucaccaucgagcuguccaacaucaaggagaacaagugcaacggcaccgacgccaaggugaagcucaucaagcaggagcuggacaaguacaagaacgcggucacggagcugcagcuccugaugcagagcaccccggccgccggguccggcagcgccaucgcguccgggaucgccgugugcaaggugcugcaccucgagggcgaggucaacaagaucaagaacgcccugcugagcaccaacaaggccguggugucccucagcaacggcgucuccgugcugaccuucaaggugcuggaccucaagaacuacaucgacaagcagcugcugcccauccucaacaagcagagcugcuccaucagcaacaucgagacggucaucgaguuccagcagaagaacaaccggcugcuggagaucacccgcgaguucuccgugaacgccggggugaccacccccgucagcacguacaugcucaccaacagcgagcugcugucccucaucaacgacaugcccaucaccaacgaccagaagaagcugaugagcaacaacgugcagaucgugcggcagcaguccuacagcaucaugugcaucaucaaggaggagguccuggcguacguggugcagcucccgcuguacggcgucaucgacacccccugcuggaagcugcacacgagcccccucugcaccaccaacaccaaggagggguccaacaucugccugacgcgcaccgaccggggcugguacugcgacaacgccggguccgugagcuucuucccccaggccgagaccugcaaggugcaguccaaccgcgucuucugcgacaccaugaacagccggacgcucccguccgaggugaaccugugcaacaucgacaucuucaaccccaaguacgacugcaagaucaugaccagcaagaccgacgucuccagcuccgugaucaccagccugggcgccaucguguccugcuacggcaagacgaagugcaccgccagcaacaagaaccgggggaucaucaagaccuucuccaacggcugcgacuacgucagcaacaaggggguggacaccgugagcgucggcaacacgcucuacuacgugaacaagcaggagggcaagucccuguacgugaagggggagcccaucaucaacuucuacgacccccuggucuucccgagcgacgaguucgacgcguccaucagccaggugaacgagaagaucaaccagucccucgccuucauccgcaagagcgacgagcugcugcacaacgugaacgucggcaaguccaccaccaacaucaugaucaccaccaucaucaucgugaucaucgugauccuccugcugcucaucgccgucgggcuguuccuguacugcaaggcccggagcacgcccgugacccuguccaaggaccagcucagcggcaucaacaacaucgccuucuccaacugaggacuaguguccaccugucccuccugggcugcuggauugucucguuuuccugccaaauaaacaggaucagcgcuuuacagaucuaaaaaaaaaaaaaaaaaaaaaaaaaaaaaaaaaaaaaaaaaaaaaaaaaaaaaaaaaaaaaaaaugcaucccccccccccccccccccccccccccccccaaaggcucuuuucagagccaccagaauu

SEQ ID NO: 13293 - RNA, 1916 nt, Artificial Sequence
  mRNA product Design c-1 comprising derived and/or modified sequence from HRSV(Memphis-37)__AIY60640.1__F_DSCav1_mut0 (opt2)
gggagaguccgcucagccagguugcagaagcggcuuagcguguguccuaaucuucucucugcguguagguaggccugugccgcaaacaagcuuaccauggagcuccccauccucaagaccaacgccaucaccaccauccucgccgccgucacccucugcuucgccuccucccagaacaucaccgaggaguucuaccaguccaccugcuccgccgucuccaagggcuaccucuccgcccuccgcaccggcugguacaccuccgucaucaccaucgagcucuccaacaucaaggagaacaagugcaacggcaccgacgccaaggucaagcucaucaagcaggagcucgacaaguacaagaacgccgucaccgagcuccagcuccucaugcaguccacccccgccgccggcuccggcuccgccaucgccuccggcaucgccgucugcaagguccuccaccucgagggcgaggucaacaagaucaagaacgcccuccucuccaccaacaaggccgucgucucccucuccaacggcgucuccguccucaccuucaagguccucgaccucaagaacuacaucgacaagcagcuccuccccauccucaacaagcaguccugcuccaucuccaacaucgagaccgucaucgaguuccagcagaagaacaaccgccuccucgagaucacccgcgaguucuccgucaacgccggcgucaccacccccgucuccaccuacaugcucaccaacuccgagcuccucucccucaucaacgacaugcccaucaccaacgaccagaagaagcucauguccaacaacguccagaucguccgccagcaguccuacuccaucaugugcaucaucaaggaggagguccucgccuacgucguccagcucccccucuacggcgucaucgacacccccugcuggaagcuccacaccuccccccucugcaccaccaacaccaaggagggcuccaacaucugccucacccgcaccgaccgcggcugguacugcgacaacgccggcuccgucuccuucuucccccaggccgagaccugcaagguccaguccaaccgcgucuucugcgacaccaugaacucccgcacccuccccuccgaggucaaccucugcaacaucgacaucuucaaccccaaguacgacugcaagaucaugaccuccaagaccgacgucuccuccuccgucaucaccucccucggcgccaucgucuccugcuacggcaagaccaagugcaccgccuccaacaagaaccgcggcaucaucaagaccuucuccaacggcugcgacuacgucuccaacaagggcgucgacaccgucuccgucggcaacacccucuacuacgucaacaagcaggagggcaagucccucuacgucaagggcgagcccaucaucaacuucuacgacccccucgucuuccccuccgacgaguucgacgccuccaucucccaggucaacgagaagaucaaccagucccucgccuucauccgcaaguccgacgagcuccuccacaacgucaacgucggcaaguccaccaccaacaucaugaucaccaccaucaucaucgucaucaucgucauccuccuccuccucaucgccgucggccucuuccucuacugcaaggcccgcuccacccccgucacccucuccaaggaccagcucuccggcaucaacaacaucgccuucuccaacugaggacuaguguccaccugucccuccugggcugcuggauugucucguuuuccugccaaauaaacaggaucagcgcuuuacagaucuaaaaaaaaaaaaaaaaaaaaaaaaaaaaaaaaaaaaaaaaaaaaaaaaaaaaaaaaaaaaaaaaugcaucccccccccccccccccccccccccccccccaaaggcucuuuucagagccaccagaauu

SEQ ID NO: 13294 - RNA, 1916 nt, Artificial Sequence
  mRNA product Design c-1 comprising derived and/or modified sequence from HRSV(Memphis-37)__AIY60640.1__F_DSCav1_mut0 (opt3)
gggagaguccgcucagccagguugcagaagcggcuuagcguguguccuaaucuucucucugcguguagguaggccugugccgcaaacaagcuuaccauggagcugcccauccucaagaccaacgccauuacaacuauacuugcugcagugacgcugugcuucgccagcucccagaauaucaccgaagaguuuuaccaaucuacauguucagcggucaguaaaggcuauuugagcgcuuuaagaacugggugguacaccuccguuauuacaaucgaacugucuaacauuaaggagaauaaaugcaacggaaccgacgccaaggugaaacuaaucaagcaggaacucgauaaguauaaaaaugcaguaacugagcugcagcuucugaugcagucgaccccugccgcugguucaggcagcgcaauagccagugggaucgcuguguguaaggucuugcaccucgagggagaagugaacaaaauuaagaaugcccugcuguccacaaacaaagcgguugugucucucagcaauggcgucuccguguuaacguucaagguacuggaccuuaagaacuacaucgauaaacaauugcugccaauucuaaauaagcagucaugcaguaucagcaacauagagacuguuauugaauuucagcagaaaaauaacaggcuccuggagaucacccgggaguucucugugaaugccggugucacaacuccgguguccaccuauaugcuuacaaacucagaacuguugagccucauuaacgacaugcccaucaccaaugaucaaaagaaacugaugaguaacaaugugcagaucguccgccagcagucuuacuccauuauguguauaaucaaggaggaaguuuuagcauaugugguacaacugccucucuacggggugauugacacgccaugcuggaaacuucauacuagcccccuguguacaaccaacacuaaggagggaucgaauaucugcuugacacgaaccgaucguggcugguacugugacaacgcuggcucugucuccuuuuucccucaggccgaaacgugcaaggugcagucaaauagaguguuuugugauaccaugaacaguagaacacugccaagcgaggugaaucucugcaacauagacauuuucaaucccaaauaugauugcaagaucaugacuuccaaaaccgacgucucuagcucagugaucacaagucugggggcaauuguauccuguuacggaaagacuaaaugcaccgcuagcaacaagaauagggguaucauuaagacauuuucuaacggcugugauuauguuucaaauaaagggguggacaccgucagugugggaaacacucuuuacuaugucaacaagcaagagggcaaaagccuguacgugaagggugaaccuauaaucaauuucuaugacccauugguuuuuccguccgaugaguucgacgccucuauuucgcagguuaacgagaaaaucaaucagagccucgcguuuauccggaaguccgaugaacuguuacacaacguaaaugucgggaagucaacgacaaacauuaugauaaccacuaucauuaucgugauuaucguuauacugcuacuccugaucgccgugggacuuuucuuguacugcaaagcacgcaguacccccgucacacugucuaaggaccagcucagcggcauuaauaacaucgcuuucuccaauugaggacuaguguccaccugucccuccugggcugcuggauugucucguuuuccugccaaauaaacaggaucagcgcuuuacagaucuaaaaaaaaaaaaaaaaaaaaaaaaaaaaaaaaaaaaaaaaaaaaaaaaaaaaaaaaaaaaaaaaugcaucccccccccccccccccccccccccccccccaaaggcucuuuucagagccaccagaauu

SEQ ID NO: 13295 - RNA, 1916 nt, Artificial Sequence
  mRNA product Design c-1 comprising derived and/or modified sequence from HRSV(Memphis-37)__AIY60640.1__F_DSCav1_mut0 (opt4)
gggagaguccgcucagccagguugcagaagcggcuuagcguguguccuaaucuucucucugcguguagguaggccugugccgcaaacaagcuuaccauggagcugcccauccugaagaccaacgccaucaccaccauccuggccgccgugacccugugcuucgccagcagccagaacaucaccgaggaguucuaccagagcaccugcagcgccgugagcaagggcuaccugagcgcccugagaaccggcugguacaccagcgugaucaccaucgagcugagcaacaucaaggagaacaagugcaacggcaccgacgccaaggugaagcugaucaagcaggagcuggacaaguacaagaacgccgugaccgagcugcagcugcugaugcagagcacccccgccgccggcagcggcagcgccaucgccagcggcaucgccgugugcaaggugcugcaccuggagggcgaggugaacaagaucaagaacgcccugcugagcaccaacaaggccguggugagccugagcaacggcgugagcgugcugaccuucaaggugcuggaccugaagaacuacaucgacaagcagcugcugcccauccugaacaagcagagcugcagcaucagcaacaucgagaccgugaucgaguuccagcagaagaacaacagacugcuggagaucaccagagaguucagcgugaacgccggcgugaccacccccgugagcaccuacaugcugaccaacagcgagcugcugagccugaucaacgacaugcccaucaccaacgaccagaagaagcugaugagcaacaacgugcagaucgugagacagcagagcuacagcaucaugugcaucaucaaggaggaggugcuggccuacguggugcagcugccccuguacggcgugaucgacacccccugcuggaagcugcacaccagcccccugugcaccaccaacaccaaggagggcagcaacaucugccugaccagaaccgacagaggcugguacugcgacaacgccggcagcgugagcuucuucccccaggccgagaccugcaaggugcagagcaacagaguguucugcgacaccaugaacagcagaacccugcccagcgaggugaaccugugcaacaucgacaucuucaaccccaaguacgacugcaagaucaugaccagcaagaccgacgugagcagcagcgugaucaccagccugggcgccaucgugagcugcuacggcaagaccaagugcaccgccagcaacaagaacagaggcaucaucaagaccuucagcaacggcugcgacuacgugagcaacaagggcguggacaccgugagcgugggcaacacccuguacuacgugaacaagcaggagggcaagagccuguacgugaagggcgagcccaucaucaacuucuacgacccccugguguuccccagcgacgaguucgacgccagcaucagccaggugaacgagaagaucaaccagagccuggccuucaucagaaagagcgacgagcugcugcacaacgugaacgugggcaagagcaccaccaacaucaugaucaccaccaucaucaucgugaucaucgugauccugcugcugcugaucgccgugggccuguuccuguacugcaaggccagaagcacccccgugacccugagcaaggaccagcugagcggcaucaacaacaucgccuucagcaacugaggacuaguguccaccugucccuccugggcugcuggauugucucguuuuccugccaaauaaacaggaucagcgcuuuacagaucuaaaaaaaaaaaaaaaaaaaaaaaaaaaaaaaaaaaaaaaaaaaaaaaaaaaaaaaaaaaaaaaaugcaucccccccccccccccccccccccccccccccaaaggcucuuuucagagccaccagaauu

SEQ ID NO: 13296 - RNA, 1916 nt, Artificial Sequence
  mRNA product Design c-1 comprising derived and/or modified sequence from HRSV(Memphis-37)__AIY60640.1__F_DSCav1_mut0 (opt5)
gggagaguccgcucagccagguugcagaagcggcuuagcguguguccuaaucuucucucugcguguagguaggccugugccgcaaacaagcuuaccauggagcugcccauccucaagaccaacgccauuacaacgauccuggcugccgugacccuuugcuucgcgagcucccagaauauuacagaagaguuuuaccaaucuaccuguagcgcugucuccaaaggcuaucugucugcccucagaacagggugguacaccagcguuaucacaauugaacuguccaacaucaaggagaauaaaugcaacggaaccgacgccaaggugaaacuuaucaagcaggaacuggauaaguauaaaaaugcugugacggagcuccagcugcugaugcagucuaccccugccgcuggcagcggguccgccauugcgagcggaaucgccgucuguaaggugcuccaccuggagggcgaaguuaacaaaauuaagaaugcccuucugucuacaaacaaagcuguggucucccucagcaauggggugucuguucugaccuucaaggugcuugaccugaagaacuacaucgauaaacaacuccugccgauucugaauaagcaguccugcagcaucucuaacauugagacagucaucgaauuucagcagaaaaauaaccggcuccuggagaucacccgcgaguucuccgugaaugcuggagugacgacacccgucagcaccuauaugcuuacaaacuccgaacugcucucucugauuaacgacaugccuaucaccaaugaucaaaagaaacuuaugagcaacaauguucagauugugagacagcaguccuacagcaucauguguauuaucaaggaggaagugcuggccuaugucgugcaacucccccuguacggcguuaucgacaccccuugcuggaaacugcauacaucuccccucuguacgaccaacacaaaggagggcuccaauauuugccugacccggacagaucgcgggugguacugugacaacgcgggaagcgugagcuuuuucccucaggccgaaaccugcaagguccagucuaauagaguguuuugugauacgaugaacuccagaacacugccgucugagguuaaucucugcaacaucgacauuuucaaucccaaauaugauugcaagaucaugaccagcaaaaccgacguguccagcucugucauuacaucccugggcgcuaucgugagcuguuacgggaagaccaaaugcacagccucuaacaagaaucggggaaucauuaagacguuuuccaacggcugugauuaugucagcaauaaagggguggacaccguuuccgugggaaacacacuuuacuaugucaacaagcaagagggcaaaucucuguacgugaagggcgaaccuaucauuaauuucuaugacccccucguuuuuccuagcgaugaguucgacgcuuccaucucucaggugaacgaaaagauuaaucagagccuggccuuuauccgcaaguccgaugagcugcuccacaacgucaauguggggaaaagcaccacaaacauuaugaucaccacgaucauuaucgugauuaucguuauucugcuucugcucaucgccgucggacuguuccuguacugcaaagcuagaucuacccccgugacacuuuccaaggaccagcucagcggcaucaauaacauugcguucucuaauugaggacuaguguccaccugucccuccugggcugcuggauugucucguuuuccugccaaauaaacaggaucagcgcuuuacagaucuaaaaaaaaaaaaaaaaaaaaaaaaaaaaaaaaaaaaaaaaaaaaaaaaaaaaaaaaaaaaaaaaugcaucccccccccccccccccccccccccccccccaaaggcucuuuucagagccaccagaauu

SEQ ID NO: 13297 - RNA, 1916 nt, Artificial Sequence
  mRNA product Design c-1 comprising derived and/or modified sequence from HRSV(Memphis-37)__AIY60640.1__F_DSCav1_mut0 (opt6)
gggagaguccgcucagccagguugcagaagcggcuuagcguguguccuaaucuucucucugcguguagguaggccugugccgcaaacaagcuuaccauggaauuaccaaucuuaaaaacaaacgccauaacaaccauccucgcagcaguaacccuaugcuuugcauccucacaaaacauaacugaagaauuuuaccaaucaacaugcucagcaguaucaaaaggauaucuaucagcccucagaacaggaugguacacaucagucauuacaaucgaacuuucaaacauaaaagaaaauaaauguaacggcacagaugccaaaguaaaauuaauuaaacaagaacuugacaaauacaaaaaugccguaacagaacuacaacuacuaaugcaaaguacuccugcugcaggaagcggaucugcaauagcaucagguauagcaguauguaaaguucuacaccuagaaggcgaaguaaacaaaauuaaaaacgcacuacucucaacaaauaaagcaguugucucccuaucaaacggaguaucaguauuaacuuucaaaguacuagaccucaaaaacuauauagacaaacaacuauuaccaauacuaaacaaacaaagcugcucuaucuccaacaucgaaacaguaauagaauuucaacaaaaaaauaauagacuacuugaaauaaccagagaauuuucaguaaacgccggaguaacaacaccaguaucaacuuacaugcuaacaaacuccgaacuacuaucauuaauaaacgacaugcccauaacaaacgaccaaaaaaaauuaaugucaaacaacguccaaaucguacgacaacaauccuauuccauaauguguauaauaaaagaagaaguacuagcauacguaguacaauuaccauuauauggaguaauagauaccccuugcuggaaacuacacacaucaccccuaugcacuacaaauacgaaagaagguucaaauauaugcuuaacuagaaccgauagagguugguauugugacaacgcuggaucaguaucauuuuucccacaagcagaaacaugcaaaguacaaucaaacagaguauuuugcgacacuaugaacucaagaacuuuaccauccgaaguuaaucuauguaacauagauauauuuaacccaaaauacgacugcaaaauaaugacaucaaaaacagauguaucaucaucaguuauaaccucccucggagcaauaguaucaugcuauggaaaaacaaaaugcacagcaucaaacaaaaaucguggaauuauaaaaacauucucaaacggcugugacuacgucagcaauaaaggaguagacacagucucaguaggaaacacuuuauacuauguuaacaaacaagaaggaaaaucacucuacgucaaaggcgaaccaauaauaaauuucuaugacccacucguauucccauccgacgaauuugacgcaucaauaucacaaguaaaugaaaaaauaaaccaaagccuagcauuuauacgaaaaucagacgaacuacuacacaacguaaacguagguaaaagcacaaccaauauaaugauaacaacaauaaucauaguaauaaucguaauauuacuauuacuaauagcuguaggauuguuccuauacugcaaagcaagaucaacaccaguaaccuuaucuaaggaccaacuaucaggaaucaauaacauugccuucucaaacuaaggacuaguguccaccugucccuccugggcugcuggauugucucguuuuccugccaaauaaacaggaucagcgcuuuacagaucuaaaaaaaaaaaaaaaaaaaaaaaaaaaaaaaaaaaaaaaaaaaaaaaaaaaaaaaaaaaaaaaaugcaucccccccccccccccccccccccccccccccaaaggcucuuuucagagccaccagaauu

SEQ ID NO: 13298 - RNA, 1916 nt, Artificial Sequence
  mRNA product Design c-1 comprising derived and/or modified sequence from HRSV(Memphis-37)__AIY60640.1__F_DSCav1_mut0 (opt11)
gggagaguccgcucagccagguugcagaagcggcuuagcguguguccuaaucuucucucugcguguagguaggccugugccgcaaacaagcuuaccauggaacuaccuauccuuaaaaccaacgcaaucaccaccauccuugccgcagucacacucugcuucgcauccucacagaacaucaccgaagaguucuaucaaucaaccugcuccgccguauccaaaggauaccucucagcccuccgcaccggcugguauaccucagucauaacaaucgaauuaucaaauaucaaggagaacaaaugcaacggcaccgacgccaaagucaaacucauaaaacaagaacuagacaaauacaaaaacgccgugacagaacuccaacuccucaugcaguccacccccgcagccggauccggcucagcaaucgccucgggcauugcaguaugcaaaguccuccaccucgaaggcgaagucaacaaaaucaaaaacgcccuccucuccaccaacaaagccgucgucucccucuccaacggcguaucuguccucacuuucaagguccucgaccucaaaaacuacaucgacaagcaacuacuuccaauccucaacaagcaauccugcucaaucucaaacaucgaaaccguaauagaguuccaacaaaagaacaaccgccuccucgaaaucacccgcgaguucuccguuaacgccggugucacuaccccagucagcaccuacaugcucaccaacuccgaacuccuuucucugaucaacgacaugccaaucaccaacgaucaaaagaaauuaauguccaacaacguccagaucguccgccaacaaagcuacagcaucaugugcaucauaaaagaagaaguacuugcguacguaguucaacuaccccuuuacggcguaaucgacaccccaugcuggaaacuccacaccuccccacuaugcaccaccaacaccaaagaaggauccaacaucugccuaacccgcaccgaccgcggcugguacugcgacaacgcugggagcgucucauucuucccacaagcagaaaccugcaaaguccaaucgaaccgcguauucugcgacaccaugaacuccagaacccuaccaagcgaagucaaucuuugcaacaucgacauauuuaaccccaaauacgacugcaaaaucaugacaucaaagaccgacgucucaucuucagucauuaccucacucggcgcaauugucagcugcuacggaaagaccaaauguaccgccuccaauaaaaaccguggaaucauaaaaaccuuuagcaacggcugcgacuacgucuccaacaaaggagucgacaccgucuccgucggcaacacccucuacuacgucaacaaacaagaaggaaaaucccucuacgugaaaggcgaacccauaauaaacuucuacgacccccuagucuuccccucugacgaguucgacgccuccaucucccaagucaacgaaaagauaaaucaaucacuagccuucauacgcaaaucugacgaacuucuccacaacgucaacgucggcaaauccaccaccaacauaaugaucacaacgauaauaaucgugaucauaguaauccuacuucuccucaucgcaguaggucuauuccuauacugcaaagcccgcagcacccccgucacccuaucaaaagaccaacucuccggcaucaacaacaucgccuucucaaacuaaggacuaguguccaccugucccuccugggcugcuggauugucucguuuuccugccaaauaaacaggaucagcgcuuuacagaucuaaaaaaaaaaaaaaaaaaaaaaaaaaaaaaaaaaaaaaaaaaaaaaaaaaaaaaaaaaaaaaaaugcaucccccccccccccccccccccccccccccccaaaggcucuuuucagagccaccagaauu

SEQ ID NO: 13299 - RNA, 2006 nt, Artificial Sequence
  mRNA product Design c-2 comprising derived and/or modified sequence from HRSV(Memphis-37)__AIY60640.1__F_DSCav1_mut0 (opt1)
gggagacuccugucgggcggaaguaggaggaguagaguuuaaaaacaguacucuuuuuccgguucgggacguaguugaagcaacgacaagccggauaaccgcucuugagacaggaagcuuaccauggagcugcccauccucaagaccaacgccaucaccacgauccuggccgcggugacccugugcuucgccagcucccagaacaucaccgaggaguucuaccagagcacgugcuccgccgucagcaagggcuaccucuccgcccugcgcaccgggugguacaccagcgugaucaccaucgagcuguccaacaucaaggagaacaagugcaacggcaccgacgccaaggugaagcucaucaagcaggagcuggacaaguacaagaacgcggucacggagcugcagcuccugaugcagagcaccccggccgccggcuccgggagcgcgaucgccuccggcaucgccgucugcaaggugcugcaccucgagggcgaggugaacaagaucaagaacgcccugcuguccaccaacaaggccgucgugagccucuccaacggggugagcguccugaccuucaaggugcuggaccucaagaacuacaucgacaagcagcugcugcccauccugaacaagcagagcugcuccaucagcaacaucgagaccgucaucgaguuccagcagaagaacaaccgccuccuggagaucacgcgggaguucagcgugaacgcgggcgugaccacccccgucuccaccuacaugcugacgaacagcgagcuccugucccugaucaacgacaugccgaucaccaacgaccagaagaagcucaugagcaacaacgugcagaucgugcgccagcaguccuacagcaucaugugcaucaucaaggaggagguccuggccuacguggugcagcugccccucuacggggucaucgacacccccugcuggaagcugcacaccagcccccugugcacgaccaacaccaaggagggcuccaacaucugccucacccggacggaccgcgggugguacugcgacaacgccggcagcguguccuucuucccgcaggccgagaccugcaagguccagagcaaccggguguucugcgacaccaugaacucccggacccugcccagcgaggugaaccucugcaacaucgacaucuucaaccccaaguacgacugcaagaucaugacguccaagaccgacgucagcuccagcgugaucaccucccugggcgccaucgugagcugcuacgggaagaccaagugcacggcgagcaacaagaaccgcggcaucaucaagaccuucuccaacgggugcgacuacgucagcaacaagggcguggacaccguguccgucggcaacacccuguacuacgugaacaagcaggagggcaagagccucuacgugaagggggagcccaucaucaacuucuacgacccgcuggucuuccccuccgacgaguucgacgccagcaucucccaggugaacgagaagaucaaccagagccuggccuucauccggaaguccgacgagcuccugcacaacgugaacgucggcaagagcaccacgaacaucaugaucaccaccaucaucaucgugaucaucgugauccugcugcuccugaucgccgucgggcuguuccucuacugcaaggcccgcuccacccccgugacgcugagcaaggaccagcuguccgggaucaacaacaucgcguucagcaacugaggacuaguggaagcauuuuccuggcugauuaaaagaaauuacucagcuauggucaucuguuccuguuagaaggcuaugcagcauauuauauacuaugcgcauguuaugaaaugcauaauaaaaaauuuuaaaaaaucuaaaagaucuaaaaaaaaaaaaaaaaaaaaaaaaaaaaaaaaaaaaaaaaaaaaaaaaaaaaaaaaaaaaaaaaugcaucccccccccccccccccccccccccccccccaaaggcucuuuucagagccaccagaauu

SEQ ID NO: 13300 - RNA, 2006 nt, Artificial Sequence
  mRNA product Design c-2 comprising derived and/or modified sequence from HRSV(Memphis-37)__AIY60640.1__F_DSCav1_mut0 (opt1)
gggagacuccugucgggcggaaguaggaggaguagaguuuaaaaacaguacucuuuuuccgguucgggacguaguugaagcaacgacaagccggauaaccgcucuugagacaggaagcuuaccauggagcugcccauccucaagaccaacgccaucaccacgauccuggccgcggugacccugugcuucgccagcucccagaacaucaccgaggaguucuaccagagcacgugcuccgccgucagcaagggcuaccucuccgcccugcgcaccgggugguacaccagcgugaucaccaucgagcuguccaacaucaaggagaacaagugcaacggcaccgacgccaaggugaagcucaucaagcaggagcuggacaaguacaagaacgcggucacggagcugcagcuccugaugcagagcaccccggccgccggguccggcagcgccaucgcguccgggaucgccgugugcaaggugcugcaccucgagggcgaggucaacaagaucaagaacgcccugcugagcaccaacaaggccguggugucccucagcaacggcgucuccgugcugaccuucaaggugcuggaccucaagaacuacaucgacaagcagcugcugcccauccucaacaagcagagcugcuccaucagcaacaucgagacggucaucgaguuccagcagaagaacaaccggcugcuggagaucacccgcgaguucuccgugaacgccggggugaccacccccgucagcacguacaugcucaccaacagcgagcugcugucccucaucaacgacaugcccaucaccaacgaccagaagaagcugaugagcaacaacgugcagaucgugcggcagcaguccuacagcaucaugugcaucaucaaggaggagguccuggcguacguggugcagcucccgcuguacggcgucaucgacacccccugcuggaagcugcacacgagcccccucugcaccaccaacaccaaggagggguccaacaucugccugacgcgcaccgaccggggcugguacugcgacaacgccggguccgugagcuucuucccccaggccgagaccugcaaggugcaguccaaccgcgucuucugcgacaccaugaacagccggacgcucccguccgaggugaaccugugcaacaucgacaucuucaaccccaaguacgacugcaagaucaugaccagcaagaccgacgucuccagcuccgugaucaccagccugggcgccaucguguccugcuacggcaagacgaagugcaccgccagcaacaagaaccgggggaucaucaagaccuucuccaacggcugcgacuacgucagcaacaaggggguggacaccgugagcgucggcaacacgcucuacuacgugaacaagcaggagggcaagucccuguacgugaagggggagcccaucaucaacuucuacgacccccuggucuucccgagcgacgaguucgacgcguccaucagccaggugaacgagaagaucaaccagucccucgccuucauccgcaagagcgacgagcugcugcacaacgugaacgucggcaaguccaccaccaacaucaugaucaccaccaucaucaucgugaucaucgugauccuccugcugcucaucgccgucgggcuguuccuguacugcaaggcccggagcacgcccgugacccuguccaaggaccagcucagcggcaucaacaacaucgccuucuccaacugaggacuaguggaagcauuuuccuggcugauuaaaagaaauuacucagcuauggucaucuguuccuguuagaaggcuaugcagcauauuauauacuaugcgcauguuaugaaaugcauaauaaaaaauuuuaaaaaaucuaaaagaucuaaaaaaaaaaaaaaaaaaaaaaaaaaaaaaaaaaaaaaaaaaaaaaaaaaaaaaaaaaaaaaaaugcaucccccccccccccccccccccccccccccccaaaggcucuuuucagagccaccagaauu

SEQ ID NO: 13301 - RNA, 2006 nt, Artificial Sequence
  mRNA product Design c-2 comprising derived and/or modified sequence from HRSV(Memphis-37)__AIY60640.1__F_DSCav1_mut0 (opt2)
gggagacuccugucgggcggaaguaggaggaguagaguuuaaaaacaguacucuuuuuccgguucgggacguaguugaagcaacgacaagccggauaaccgcucuugagacaggaagcuuaccauggagcuccccauccucaagaccaacgccaucaccaccauccucgccgccgucacccucugcuucgccuccucccagaacaucaccgaggaguucuaccaguccaccugcuccgccgucuccaagggcuaccucuccgcccuccgcaccggcugguacaccuccgucaucaccaucgagcucuccaacaucaaggagaacaagugcaacggcaccgacgccaaggucaagcucaucaagcaggagcucgacaaguacaagaacgccgucaccgagcuccagcuccucaugcaguccacccccgccgccggcuccggcuccgccaucgccuccggcaucgccgucugcaagguccuccaccucgagggcgaggucaacaagaucaagaacgcccuccucuccaccaacaaggccgucgucucccucuccaacggcgucuccguccucaccuucaagguccucgaccucaagaacuacaucgacaagcagcuccuccccauccucaacaagcaguccugcuccaucuccaacaucgagaccgucaucgaguuccagcagaagaacaaccgccuccucgagaucacccgcgaguucuccgucaacgccggcgucaccacccccgucuccaccuacaugcucaccaacuccgagcuccucucccucaucaacgacaugcccaucaccaacgaccagaagaagcucauguccaacaacguccagaucguccgccagcaguccuacuccaucaugugcaucaucaaggaggagguccucgccuacgucguccagcucccccucuacggcgucaucgacacccccugcuggaagcuccacaccuccccccucugcaccaccaacaccaaggagggcuccaacaucugccucacccgcaccgaccgcggcugguacugcgacaacgccggcuccgucuccuucuucccccaggccgagaccugcaagguccaguccaaccgcgucuucugcgacaccaugaacucccgcacccuccccuccgaggucaaccucugcaacaucgacaucuucaaccccaaguacgacugcaagaucaugaccuccaagaccgacgucuccuccuccgucaucaccucccucggcgccaucgucuccugcuacggcaagaccaagugcaccgccuccaacaagaaccgcggcaucaucaagaccuucuccaacggcugcgacuacgucuccaacaagggcgucgacaccgucuccgucggcaacacccucuacuacgucaacaagcaggagggcaagucccucuacgucaagggcgagcccaucaucaacuucuacgacccccucgucuuccccuccgacgaguucgacgccuccaucucccaggucaacgagaagaucaaccagucccucgccuucauccgcaaguccgacgagcuccuccacaacgucaacgucggcaaguccaccaccaacaucaugaucaccaccaucaucaucgucaucaucgucauccuccuccuccucaucgccgucggccucuuccucuacugcaaggcccgcuccacccccgucacccucuccaaggaccagcucuccggcaucaacaacaucgccuucuccaacugaggacuaguggaagcauuuuccuggcugauuaaaagaaauuacucagcuauggucaucuguuccuguuagaaggcuaugcagcauauuauauacuaugcgcauguuaugaaaugcauaauaaaaaauuuuaaaaaaucuaaaagaucuaaaaaaaaaaaaaaaaaaaaaaaaaaaaaaaaaaaaaaaaaaaaaaaaaaaaaaaaaaaaaaaaugcaucccccccccccccccccccccccccccccccaaaggcucuuuucagagccaccagaauu

SEQ ID NO: 13302 - RNA, 2006 nt, Artificial Sequence
  mRNA product Design c-2 comprising derived and/or modified sequence from HRSV(Memphis-37)__AIY60640.1__F_DSCav1_mut0 (opt3)
gggagacuccugucgggcggaaguaggaggaguagaguuuaaaaacaguacucuuuuuccgguucgggacguaguugaagcaacgacaagccggauaaccgcucuugagacaggaagcuuaccauggagcugcccauccucaagaccaacgccauuacaacuauacuugcugcagugacgcugugcuucgccagcucccagaauaucaccgaagaguuuuaccaaucuacauguucagcggucaguaaaggcuauuugagcgcuuuaagaacugggugguacaccuccguuauuacaaucgaacugucuaacauuaaggagaauaaaugcaacggaaccgacgccaaggugaaacuaaucaagcaggaacucgauaaguauaaaaaugcaguaacugagcugcagcuucugaugcagucgaccccugccgcugguucaggcagcgcaauagccagugggaucgcuguguguaaggucuugcaccucgagggagaagugaacaaaauuaagaaugcccugcuguccacaaacaaagcgguugugucucucagcaauggcgucuccguguuaacguucaagguacuggaccuuaagaacuacaucgauaaacaauugcugccaauucuaaauaagcagucaugcaguaucagcaacauagagacuguuauugaauuucagcagaaaaauaacaggcuccuggagaucacccgggaguucucugugaaugccggugucacaacuccgguguccaccuauaugcuuacaaacucagaacuguugagccucauuaacgacaugcccaucaccaaugaucaaaagaaacugaugaguaacaaugugcagaucguccgccagcagucuuacuccauuauguguauaaucaaggaggaaguuuuagcauaugugguacaacugccucucuacggggugauugacacgccaugcuggaaacuucauacuagcccccuguguacaaccaacacuaaggagggaucgaauaucugcuugacacgaaccgaucguggcugguacugugacaacgcuggcucugucuccuuuuucccucaggccgaaacgugcaaggugcagucaaauagaguguuuugugauaccaugaacaguagaacacugccaagcgaggugaaucucugcaacauagacauuuucaaucccaaauaugauugcaagaucaugacuuccaaaaccgacgucucuagcucagugaucacaagucugggggcaauuguauccuguuacggaaagacuaaaugcaccgcuagcaacaagaauagggguaucauuaagacauuuucuaacggcugugauuauguuucaaauaaagggguggacaccgucagugugggaaacacucuuuacuaugucaacaagcaagagggcaaaagccuguacgugaagggugaaccuauaaucaauuucuaugacccauugguuuuuccguccgaugaguucgacgccucuauuucgcagguuaacgagaaaaucaaucagagccucgcguuuauccggaaguccgaugaacuguuacacaacguaaaugucgggaagucaacgacaaacauuaugauaaccacuaucauuaucgugauuaucguuauacugcuacuccugaucgccgugggacuuuucuuguacugcaaagcacgcaguacccccgucacacugucuaaggaccagcucagcggcauuaauaacaucgcuuucuccaauugaggacuaguggaagcauuuuccuggcugauuaaaagaaauuacucagcuauggucaucuguuccuguuagaaggcuaugcagcauauuauauacuaugcgcauguuaugaaaugcauaauaaaaaauuuuaaaaaaucuaaaagaucuaaaaaaaaaaaaaaaaaaaaaaaaaaaaaaaaaaaaaaaaaaaaaaaaaaaaaaaaaaaaaaaaugcaucccccccccccccccccccccccccccccccaaaggcucuuuucagagccaccagaauu

SEQ ID NO: 13303 - RNA, 2006 nt, Artificial Sequence
  mRNA product Design c-2 comprising derived and/or modified sequence from HRSV(Memphis-37)__AIY60640.1__F_DSCav1_mut0 (opt4)
gggagacuccugucgggcggaaguaggaggaguagaguuuaaaaacaguacucuuuuuccgguucgggacguaguugaagcaacgacaagccggauaaccgcucuugagacaggaagcuuaccauggagcugcccauccugaagaccaacgccaucaccaccauccuggccgccgugacccugugcuucgccagcagccagaacaucaccgaggaguucuaccagagcaccugcagcgccgugagcaagggcuaccugagcgcccugagaaccggcugguacaccagcgugaucaccaucgagcugagcaacaucaaggagaacaagugcaacggcaccgacgccaaggugaagcugaucaagcaggagcuggacaaguacaagaacgccgugaccgagcugcagcugcugaugcagagcacccccgccgccggcagcggcagcgccaucgccagcggcaucgccgugugcaaggugcugcaccuggagggcgaggugaacaagaucaagaacgcccugcugagcaccaacaaggccguggugagccugagcaacggcgugagcgugcugaccuucaaggugcuggaccugaagaacuacaucgacaagcagcugcugcccauccugaacaagcagagcugcagcaucagcaacaucgagaccgugaucgaguuccagcagaagaacaacagacugcuggagaucaccagagaguucagcgugaacgccggcgugaccacccccgugagcaccuacaugcugaccaacagcgagcugcugagccugaucaacgacaugcccaucaccaacgaccagaagaagcugaugagcaacaacgugcagaucgugagacagcagagcuacagcaucaugugcaucaucaaggaggaggugcuggccuacguggugcagcugccccuguacggcgugaucgacacccccugcuggaagcugcacaccagcccccugugcaccaccaacaccaaggagggcagcaacaucugccugaccagaaccgacagaggcugguacugcgacaacgccggcagcgugagcuucuucccccaggccgagaccugcaaggugcagagcaacagaguguucugcgacaccaugaacagcagaacccugcccagcgaggugaaccugugcaacaucgacaucuucaaccccaaguacgacugcaagaucaugaccagcaagaccgacgugagcagcagcgugaucaccagccugggcgccaucgugagcugcuacggcaagaccaagugcaccgccagcaacaagaacagaggcaucaucaagaccuucagcaacggcugcgacuacgugagcaacaagggcguggacaccgugagcgugggcaacacccuguacuacgugaacaagcaggagggcaagagccuguacgugaagggcgagcccaucaucaacuucuacgacccccugguguuccccagcgacgaguucgacgccagcaucagccaggugaacgagaagaucaaccagagccuggccuucaucagaaagagcgacgagcugcugcacaacgugaacgugggcaagagcaccaccaacaucaugaucaccaccaucaucaucgugaucaucgugauccugcugcugcugaucgccgugggccuguuccuguacugcaaggccagaagcacccccgugacccugagcaaggaccagcugagcggcaucaacaacaucgccuucagcaacugaggacuaguggaagcauuuuccuggcugauuaaaagaaauuacucagcuauggucaucuguuccuguuagaaggcuaugcagcauauuauauacuaugcgcauguuaugaaaugcauaauaaaaaauuuuaaaaaaucuaaaagaucuaaaaaaaaaaaaaaaaaaaaaaaaaaaaaaaaaaaaaaaaaaaaaaaaaaaaaaaaaaaaaaaaugcaucccccccccccccccccccccccccccccccaaaggcucuuuucagagccaccagaauu

SEQ ID NO: 13304 - RNA, 2006 nt, Artificial Sequence
  mRNA product Design c-2 comprising derived and/or modified sequence from HRSV(Memphis-37)__AIY60640.1__F_DSCav1_mut0 (opt5)
gggagacuccugucgggcggaaguaggaggaguagaguuuaaaaacaguacucuuuuuccgguucgggacguaguugaagcaacgacaagccggauaaccgcucuugagacaggaagcuuaccauggagcugcccauccucaagaccaacgccauuacaacgauccuggcugccgugacccuuugcuucgcgagcucccagaauauuacagaagaguuuuaccaaucuaccuguagcgcugucuccaaaggcuaucugucugcccucagaacagggugguacaccagcguuaucacaauugaacuguccaacaucaaggagaauaaaugcaacggaaccgacgccaaggugaaacuuaucaagcaggaacuggauaaguauaaaaaugcugugacggagcuccagcugcugaugcagucuaccccugccgcuggcagcggguccgccauugcgagcggaaucgccgucuguaaggugcuccaccuggagggcgaaguuaacaaaauuaagaaugcccuucugucuacaaacaaagcuguggucucccucagcaauggggugucuguucugaccuucaaggugcuugaccugaagaacuacaucgauaaacaacuccugccgauucugaauaagcaguccugcagcaucucuaacauugagacagucaucgaauuucagcagaaaaauaaccggcuccuggagaucacccgcgaguucuccgugaaugcuggagugacgacacccgucagcaccuauaugcuuacaaacuccgaacugcucucucugauuaacgacaugccuaucaccaaugaucaaaagaaacuuaugagcaacaauguucagauugugagacagcaguccuacagcaucauguguauuaucaaggaggaagugcuggccuaugucgugcaacucccccuguacggcguuaucgacaccccuugcuggaaacugcauacaucuccccucuguacgaccaacacaaaggagggcuccaauauuugccugacccggacagaucgcgggugguacugugacaacgcgggaagcgugagcuuuuucccucaggccgaaaccugcaagguccagucuaauagaguguuuugugauacgaugaacuccagaacacugccgucugagguuaaucucugcaacaucgacauuuucaaucccaaauaugauugcaagaucaugaccagcaaaaccgacguguccagcucugucauuacaucccugggcgcuaucgugagcuguuacgggaagaccaaaugcacagccucuaacaagaaucggggaaucauuaagacguuuuccaacggcugugauuaugucagcaauaaagggguggacaccguuuccgugggaaacacacuuuacuaugucaacaagcaagagggcaaaucucuguacgugaagggcgaaccuaucauuaauuucuaugacccccucguuuuuccuagcgaugaguucgacgcuuccaucucucaggugaacgaaaagauuaaucagagccuggccuuuauccgcaaguccgaugagcugcuccacaacgucaauguggggaaaagcaccacaaacauuaugaucaccacgaucauuaucgugauuaucguuauucugcuucugcucaucgccgucggacuguuccuguacugcaaagcuagaucuacccccgugacacuuuccaaggaccagcucagcggcaucaauaacauugcguucucuaauugaggacuaguggaagcauuuuccuggcugauuaaaagaaauuacucagcuauggucaucuguuccuguuagaaggcuaugcagcauauuauauacuaugcgcauguuaugaaaugcauaauaaaaaauuuuaaaaaaucuaaaagaucuaaaaaaaaaaaaaaaaaaaaaaaaaaaaaaaaaaaaaaaaaaaaaaaaaaaaaaaaaaaaaaaaugcaucccccccccccccccccccccccccccccccaaaggcucuuuucagagccaccagaauu

SEQ ID NO: 13305 - RNA, 2006 nt, Artificial Sequence
  mRNA product Design c-2 comprising derived and/or modified sequence from HRSV(Memphis-37)__AIY60640.1__F_DSCav1_mut0 (opt6)
gggagacuccugucgggcggaaguaggaggaguagaguuuaaaaacaguacucuuuuuccgguucgggacguaguugaagcaacgacaagccggauaaccgcucuugagacaggaagcuuaccauggaauuaccaaucuuaaaaacaaacgccauaacaaccauccucgcagcaguaacccuaugcuuugcauccucacaaaacauaacugaagaauuuuaccaaucaacaugcucagcaguaucaaaaggauaucuaucagcccucagaacaggaugguacacaucagucauuacaaucgaacuuucaaacauaaaagaaaauaaauguaacggcacagaugccaaaguaaaauuaauuaaacaagaacuugacaaauacaaaaaugccguaacagaacuacaacuacuaaugcaaaguacuccugcugcaggaagcggaucugcaauagcaucagguauagcaguauguaaaguucuacaccuagaaggcgaaguaaacaaaauuaaaaacgcacuacucucaacaaauaaagcaguugucucccuaucaaacggaguaucaguauuaacuuucaaaguacuagaccucaaaaacuauauagacaaacaacuauuaccaauacuaaacaaacaaagcugcucuaucuccaacaucgaaacaguaauagaauuucaacaaaaaaauaauagacuacuugaaauaaccagagaauuuucaguaaacgccggaguaacaacaccaguaucaacuuacaugcuaacaaacuccgaacuacuaucauuaauaaacgacaugcccauaacaaacgaccaaaaaaaauuaaugucaaacaacguccaaaucguacgacaacaauccuauuccauaauguguauaauaaaagaagaaguacuagcauacguaguacaauuaccauuauauggaguaauagauaccccuugcuggaaacuacacacaucaccccuaugcacuacaaauacgaaagaagguucaaauauaugcuuaacuagaaccgauagagguugguauugugacaacgcuggaucaguaucauuuuucccacaagcagaaacaugcaaaguacaaucaaacagaguauuuugcgacacuaugaacucaagaacuuuaccauccgaaguuaaucuauguaacauagauauauuuaacccaaaauacgacugcaaaauaaugacaucaaaaacagauguaucaucaucaguuauaaccucccucggagcaauaguaucaugcuauggaaaaacaaaaugcacagcaucaaacaaaaaucguggaauuauaaaaacauucucaaacggcugugacuacgucagcaauaaaggaguagacacagucucaguaggaaacacuuuauacuauguuaacaaacaagaaggaaaaucacucuacgucaaaggcgaaccaauaauaaauuucuaugacccacucguauucccauccgacgaauuugacgcaucaauaucacaaguaaaugaaaaaauaaaccaaagccuagcauuuauacgaaaaucagacgaacuacuacacaacguaaacguagguaaaagcacaaccaauauaaugauaacaacaauaaucauaguaauaaucguaauauuacuauuacuaauagcuguaggauuguuccuauacugcaaagcaagaucaacaccaguaaccuuaucuaaggaccaacuaucaggaaucaauaacauugccuucucaaacuaaggacuaguggaagcauuuuccuggcugauuaaaagaaauuacucagcuauggucaucuguuccuguuagaaggcuaugcagcauauuauauacuaugcgcauguuaugaaaugcauaauaaaaaauuuuaaaaaaucuaaaagaucuaaaaaaaaaaaaaaaaaaaaaaaaaaaaaaaaaaaaaaaaaaaaaaaaaaaaaaaaaaaaaaaaugcaucccccccccccccccccccccccccccccccaaaggcucuuuucagagccaccagaauu

SEQ ID NO: 13306 - RNA, 2006 nt, Artificial Sequence
  mRNA product Design c-2 comprising derived and/or modified sequence from HRSV(Memphis-37)__AIY60640.1__F_DSCav1_mut0 (opt11)
gggagacuccugucgggcggaaguaggaggaguagaguuuaaaaacaguacucuuuuuccgguucgggacguaguugaagcaacgacaagccggauaaccgcucuugagacaggaagcuuaccauggaacuaccuauccuuaaaaccaacgcaaucaccaccauccuugccgcagucacacucugcuucgcauccucacagaacaucaccgaagaguucuaucaaucaaccugcuccgccguauccaaaggauaccucucagcccuccgcaccggcugguauaccucagucauaacaaucgaauuaucaaauaucaaggagaacaaaugcaacggcaccgacgccaaagucaaacucauaaaacaagaacuagacaaauacaaaaacgccgugacagaacuccaacuccucaugcaguccacccccgcagccggauccggcucagcaaucgccucgggcauugcaguaugcaaaguccuccaccucgaaggcgaagucaacaaaaucaaaaacgcccuccucuccaccaacaaagccgucgucucccucuccaacggcguaucuguccucacuuucaagguccucgaccucaaaaacuacaucgacaagcaacuacuuccaauccucaacaagcaauccugcucaaucucaaacaucgaaaccguaauagaguuccaacaaaagaacaaccgccuccucgaaaucacccgcgaguucuccguuaacgccggugucacuaccccagucagcaccuacaugcucaccaacuccgaacuccuuucucugaucaacgacaugccaaucaccaacgaucaaaagaaauuaauguccaacaacguccagaucguccgccaacaaagcuacagcaucaugugcaucauaaaagaagaaguacuugcguacguaguucaacuaccccuuuacggcguaaucgacaccccaugcuggaaacuccacaccuccccacuaugcaccaccaacaccaaagaaggauccaacaucugccuaacccgcaccgaccgcggcugguacugcgacaacgcugggagcgucucauucuucccacaagcagaaaccugcaaaguccaaucgaaccgcguauucugcgacaccaugaacuccagaacccuaccaagcgaagucaaucuuugcaacaucgacauauuuaaccccaaauacgacugcaaaaucaugacaucaaagaccgacgucucaucuucagucauuaccucacucggcgcaauugucagcugcuacggaaagaccaaauguaccgccuccaauaaaaaccguggaaucauaaaaaccuuuagcaacggcugcgacuacgucuccaacaaaggagucgacaccgucuccgucggcaacacccucuacuacgucaacaaacaagaaggaaaaucccucuacgugaaaggcgaacccauaauaaacuucuacgacccccuagucuuccccucugacgaguucgacgccuccaucucccaagucaacgaaaagauaaaucaaucacuagccuucauacgcaaaucugacgaacuucuccacaacgucaacgucggcaaauccaccaccaacauaaugaucacaacgauaauaaucgugaucauaguaauccuacuucuccucaucgcaguaggucuauuccuauacugcaaagcccgcagcacccccgucacccuaucaaaagaccaacucuccggcaucaacaacaucgccuucucaaacuaaggacuaguggaagcauuuuccuggcugauuaaaagaaauuacucagcuauggucaucuguuccuguuagaaggcuaugcagcauauuauauacuaugcgcauguuaugaaaugcauaauaaaaaauuuuaaaaaaucuaaaagaucuaaaaaaaaaaaaaaaaaaaaaaaaaaaaaaaaaaaaaaaaaaaaaaaaaaaaaaaaaaaaaaaaugcaucccccccccccccccccccccccccccccccaaaggcucuuuucagagccaccagaauu

SEQ ID NO: 13307 - RNA, 1983 nt, Artificial Sequence
  mRNA product Design c-3 comprising derived and/or modified sequence from HRSV(Memphis-37)__AIY60640.1__F_DSCav1_mut0 (opt1)
gggagaguccgcucagccagguugcagaagcggcuuagcguguguccuaaucuucucucugcguguagguaggccugugccgcaaacaagcuuaccauggagcugcccauccucaagaccaacgccaucaccacgauccuggccgcggugacccugugcuucgccagcucccagaacaucaccgaggaguucuaccagagcacgugcuccgccgucagcaagggcuaccucuccgcccugcgcaccgggugguacaccagcgugaucaccaucgagcuguccaacaucaaggagaacaagugcaacggcaccgacgccaaggugaagcucaucaagcaggagcuggacaaguacaagaacgcggucacggagcugcagcuccugaugcagagcaccccggccgccggcuccgggagcgcgaucgccuccggcaucgccgucugcaaggugcugcaccucgagggcgaggugaacaagaucaagaacgcccugcuguccaccaacaaggccgucgugagccucuccaacggggugagcguccugaccuucaaggugcuggaccucaagaacuacaucgacaagcagcugcugcccauccugaacaagcagagcugcuccaucagcaacaucgagaccgucaucgaguuccagcagaagaacaaccgccuccuggagaucacgcgggaguucagcgugaacgcgggcgugaccacccccgucuccaccuacaugcugacgaacagcgagcuccugucccugaucaacgacaugccgaucaccaacgaccagaagaagcucaugagcaacaacgugcagaucgugcgccagcaguccuacagcaucaugugcaucaucaaggaggagguccuggccuacguggugcagcugccccucuacggggucaucgacacccccugcuggaagcugcacaccagcccccugugcacgaccaacaccaaggagggcuccaacaucugccucacccggacggaccgcgggugguacugcgacaacgccggcagcguguccuucuucccgcaggccgagaccugcaagguccagagcaaccggguguucugcgacaccaugaacucccggacccugcccagcgaggugaaccucugcaacaucgacaucuucaaccccaaguacgacugcaagaucaugacguccaagaccgacgucagcuccagcgugaucaccucccugggcgccaucgugagcugcuacgggaagaccaagugcacggcgagcaacaagaaccgcggcaucaucaagaccuucuccaacgggugcgacuacgucagcaacaagggcguggacaccguguccgucggcaacacccuguacuacgugaacaagcaggagggcaagagccucuacgugaagggggagcccaucaucaacuucuacgacccgcuggucuuccccuccgacgaguucgacgccagcaucucccaggugaacgagaagaucaaccagagccuggccuucauccggaaguccgacgagcuccugcacaacgugaacgucggcaagagcaccacgaacaucaugaucaccaccaucaucaucgugaucaucgugauccugcugcuccugaucgccgucgggcuguuccucuacugcaaggcccgcuccacccccgugacgcugagcaaggaccagcuguccgggaucaacaacaucgcguucagcaacugaggacuaguacuggcugcaucucccuuuccucuguccuccauccuucucccaggauggugaagggggaccugguacccagugauccccaccccaggauccuaaaucaugacuuaccugcuaauaaaaacucauuggaaaagugagaagaucuaaaaaaaaaaaaaaaaaaaaaaaaaaaaaaaaaaaaaaaaaaaaaaaaaaaaaaaaaaaaaaaaugcaucccccccccccccccccccccccccccccccaaaggcucuuuucagagccaccagaauu

SEQ ID NO: 13308 - RNA, 1983 nt, Artificial Sequence
  mRNA product Design c-3 comprising derived and/or modified sequence from HRSV(Memphis-37)__AIY60640.1__F_DSCav1_mut0 (opt1)
gggagaguccgcucagccagguugcagaagcggcuuagcguguguccuaaucuucucucugcguguagguaggccugugccgcaaacaagcuuaccauggagcugcccauccucaagaccaacgccaucaccacgauccuggccgcggugacccugugcuucgccagcucccagaacaucaccgaggaguucuaccagagcacgugcuccgccgucagcaagggcuaccucuccgcccugcgcaccgggugguacaccagcgugaucaccaucgagcuguccaacaucaaggagaacaagugcaacggcaccgacgccaaggugaagcucaucaagcaggagcuggacaaguacaagaacgcggucacggagcugcagcuccugaugcagagcaccccggccgccggguccggcagcgccaucgcguccgggaucgccgugugcaaggugcugcaccucgagggcgaggucaacaagaucaagaacgcccugcugagcaccaacaaggccguggugucccucagcaacggcgucuccgugcugaccuucaaggugcuggaccucaagaacuacaucgacaagcagcugcugcccauccucaacaagcagagcugcuccaucagcaacaucgagacggucaucgaguuccagcagaagaacaaccggcugcuggagaucacccgcgaguucuccgugaacgccggggugaccacccccgucagcacguacaugcucaccaacagcgagcugcugucccucaucaacgacaugcccaucaccaacgaccagaagaagcugaugagcaacaacgugcagaucgugcggcagcaguccuacagcaucaugugcaucaucaaggaggagguccuggcguacguggugcagcucccgcuguacggcgucaucgacacccccugcuggaagcugcacacgagcccccucugcaccaccaacaccaaggagggguccaacaucugccugacgcgcaccgaccggggcugguacugcgacaacgccggguccgugagcuucuucccccaggccgagaccugcaaggugcaguccaaccgcgucuucugcgacaccaugaacagccggacgcucccguccgaggugaaccugugcaacaucgacaucuucaaccccaaguacgacugcaagaucaugaccagcaagaccgacgucuccagcuccgugaucaccagccugggcgccaucguguccugcuacggcaagacgaagugcaccgccagcaacaagaaccgggggaucaucaagaccuucuccaacggcugcgacuacgucagcaacaaggggguggacaccgugagcgucggcaacacgcucuacuacgugaacaagcaggagggcaagucccuguacgugaagggggagcccaucaucaacuucuacgacccccuggucuucccgagcgacgaguucgacgcguccaucagccaggugaacgagaagaucaaccagucccucgccuucauccgcaagagcgacgagcugcugcacaacgugaacgucggcaaguccaccaccaacaucaugaucaccaccaucaucaucgugaucaucgugauccuccugcugcucaucgccgucgggcuguuccuguacugcaaggcccggagcacgcccgugacccuguccaaggaccagcucagcggcaucaacaacaucgccuucuccaacugaggacuaguacuggcugcaucucccuuuccucuguccuccauccuucucccaggauggugaagggggaccugguacccagugauccccaccccaggauccuaaaucaugacuuaccugcuaauaaaaacucauuggaaaagugagaagaucuaaaaaaaaaaaaaaaaaaaaaaaaaaaaaaaaaaaaaaaaaaaaaaaaaaaaaaaaaaaaaaaaugcaucccccccccccccccccccccccccccccccaaaggcucuuuucagagccaccagaauu

SEQ ID NO: 13309 - RNA, 1983 nt, Artificial Sequence
  mRNA product Design c-3 comprising derived and/or modified sequence from HRSV(Memphis-37)__AIY60640.1__F_DSCav1_mut0 (opt2)
gggagaguccgcucagccagguugcagaagcggcuuagcguguguccuaaucuucucucugcguguagguaggccugugccgcaaacaagcuuaccauggagcuccccauccucaagaccaacgccaucaccaccauccucgccgccgucacccucugcuucgccuccucccagaacaucaccgaggaguucuaccaguccaccugcuccgccgucuccaagggcuaccucuccgcccuccgcaccggcugguacaccuccgucaucaccaucgagcucuccaacaucaaggagaacaagugcaacggcaccgacgccaaggucaagcucaucaagcaggagcucgacaaguacaagaacgccgucaccgagcuccagcuccucaugcaguccacccccgccgccggcuccggcuccgccaucgccuccggcaucgccgucugcaagguccuccaccucgagggcgaggucaacaagaucaagaacgcccuccucuccaccaacaaggccgucgucucccucuccaacggcgucuccguccucaccuucaagguccucgaccucaagaacuacaucgacaagcagcuccuccccauccucaacaagcaguccugcuccaucuccaacaucgagaccgucaucgaguuccagcagaagaacaaccgccuccucgagaucacccgcgaguucuccgucaacgccggcgucaccacccccgucuccaccuacaugcucaccaacuccgagcuccucucccucaucaacgacaugcccaucaccaacgaccagaagaagcucauguccaacaacguccagaucguccgccagcaguccuacuccaucaugugcaucaucaaggaggagguccucgccuacgucguccagcucccccucuacggcgucaucgacacccccugcuggaagcuccacaccuccccccucugcaccaccaacaccaaggagggcuccaacaucugccucacccgcaccgaccgcggcugguacugcgacaacgccggcuccgucuccuucuucccccaggccgagaccugcaagguccaguccaaccgcgucuucugcgacaccaugaacucccgcacccuccccuccgaggucaaccucugcaacaucgacaucuucaaccccaaguacgacugcaagaucaugaccuccaagaccgacgucuccuccuccgucaucaccucccucggcgccaucgucuccugcuacggcaagaccaagugcaccgccuccaacaagaaccgcggcaucaucaagaccuucuccaacggcugcgacuacgucuccaacaagggcgucgacaccgucuccgucggcaacacccucuacuacgucaacaagcaggagggcaagucccucuacgucaagggcgagcccaucaucaacuucuacgacccccucgucuuccccuccgacgaguucgacgccuccaucucccaggucaacgagaagaucaaccagucccucgccuucauccgcaaguccgacgagcuccuccacaacgucaacgucggcaaguccaccaccaacaucaugaucaccaccaucaucaucgucaucaucgucauccuccuccuccucaucgccgucggccucuuccucuacugcaaggcccgcuccacccccgucacccucuccaaggaccagcucuccggcaucaacaacaucgccuucuccaacugaggacuaguacuggcugcaucucccuuuccucuguccuccauccuucucccaggauggugaagggggaccugguacccagugauccccaccccaggauccuaaaucaugacuuaccugcuaauaaaaacucauuggaaaagugagaagaucuaaaaaaaaaaaaaaaaaaaaaaaaaaaaaaaaaaaaaaaaaaaaaaaaaaaaaaaaaaaaaaaaugcaucccccccccccccccccccccccccccccccaaaggcucuuuucagagccaccagaauu

SEQ ID NO: 13310 - RNA, 1983 nt, Artificial Sequence
  mRNA product Design c-3 comprising derived and/or modified sequence from HRSV(Memphis-37)__AIY60640.1__F_DSCav1_mut0 (opt3)
gggagaguccgcucagccagguugcagaagcggcuuagcguguguccuaaucuucucucugcguguagguaggccugugccgcaaacaagcuuaccauggagcugcccauccucaagaccaacgccauuacaacuauacuugcugcagugacgcugugcuucgccagcucccagaauaucaccgaagaguuuuaccaaucuacauguucagcggucaguaaaggcuauuugagcgcuuuaagaacugggugguacaccuccguuauuacaaucgaacugucuaacauuaaggagaauaaaugcaacggaaccgacgccaaggugaaacuaaucaagcaggaacucgauaaguauaaaaaugcaguaacugagcugcagcuucugaugcagucgaccccugccgcugguucaggcagcgcaauagccagugggaucgcuguguguaaggucuugcaccucgagggagaagugaacaaaauuaagaaugcccugcuguccacaaacaaagcgguugugucucucagcaauggcgucuccguguuaacguucaagguacuggaccuuaagaacuacaucgauaaacaauugcugccaauucuaaauaagcagucaugcaguaucagcaacauagagacuguuauugaauuucagcagaaaaauaacaggcuccuggagaucacccgggaguucucugugaaugccggugucacaacuccgguguccaccuauaugcuuacaaacucagaacuguugagccucauuaacgacaugcccaucaccaaugaucaaaagaaacugaugaguaacaaugugcagaucguccgccagcagucuuacuccauuauguguauaaucaaggaggaaguuuuagcauaugugguacaacugccucucuacggggugauugacacgccaugcuggaaacuucauacuagcccccuguguacaaccaacacuaaggagggaucgaauaucugcuugacacgaaccgaucguggcugguacugugacaacgcuggcucugucuccuuuuucccucaggccgaaacgugcaaggugcagucaaauagaguguuuugugauaccaugaacaguagaacacugccaagcgaggugaaucucugcaacauagacauuuucaaucccaaauaugauugcaagaucaugacuuccaaaaccgacgucucuagcucagugaucacaagucugggggcaauuguauccuguuacggaaagacuaaaugcaccgcuagcaacaagaauagggguaucauuaagacauuuucuaacggcugugauuauguuucaaauaaagggguggacaccgucagugugggaaacacucuuuacuaugucaacaagcaagagggcaaaagccuguacgugaagggugaaccuauaaucaauuucuaugacccauugguuuuuccguccgaugaguucgacgccucuauuucgcagguuaacgagaaaaucaaucagagccucgcguuuauccggaaguccgaugaacuguuacacaacguaaaugucgggaagucaacgacaaacauuaugauaaccacuaucauuaucgugauuaucguuauacugcuacuccugaucgccgugggacuuuucuuguacugcaaagcacgcaguacccccgucacacugucuaaggaccagcucagcggcauuaauaacaucgcuuucuccaauugaggacuaguacuggcugcaucucccuuuccucuguccuccauccuucucccaggauggugaagggggaccugguacccagugauccccaccccaggauccuaaaucaugacuuaccugcuaauaaaaacucauuggaaaagugagaagaucuaaaaaaaaaaaaaaaaaaaaaaaaaaaaaaaaaaaaaaaaaaaaaaaaaaaaaaaaaaaaaaaaugcaucccccccccccccccccccccccccccccccaaaggcucuuuucagagccaccagaauu

SEQ ID NO: 13311 - RNA, 1983 nt, Artificial Sequence
  mRNA product Design c-3 comprising derived and/or modified sequence from HRSV(Memphis-37)__AIY60640.1__F_DSCav1_mut0 (opt4)
gggagaguccgcucagccagguugcagaagcggcuuagcguguguccuaaucuucucucugcguguagguaggccugugccgcaaacaagcuuaccauggagcugcccauccugaagaccaacgccaucaccaccauccuggccgccgugacccugugcuucgccagcagccagaacaucaccgaggaguucuaccagagcaccugcagcgccgugagcaagggcuaccugagcgcccugagaaccggcugguacaccagcgugaucaccaucgagcugagcaacaucaaggagaacaagugcaacggcaccgacgccaaggugaagcugaucaagcaggagcuggacaaguacaagaacgccgugaccgagcugcagcugcugaugcagagcacccccgccgccggcagcggcagcgccaucgccagcggcaucgccgugugcaaggugcugcaccuggagggcgaggugaacaagaucaagaacgcccugcugagcaccaacaaggccguggugagccugagcaacggcgugagcgugcugaccuucaaggugcuggaccugaagaacuacaucgacaagcagcugcugcccauccugaacaagcagagcugcagcaucagcaacaucgagaccgugaucgaguuccagcagaagaacaacagacugcuggagaucaccagagaguucagcgugaacgccggcgugaccacccccgugagcaccuacaugcugaccaacagcgagcugcugagccugaucaacgacaugcccaucaccaacgaccagaagaagcugaugagcaacaacgugcagaucgugagacagcagagcuacagcaucaugugcaucaucaaggaggaggugcuggccuacguggugcagcugccccuguacggcgugaucgacacccccugcuggaagcugcacaccagcccccugugcaccaccaacaccaaggagggcagcaacaucugccugaccagaaccgacagaggcugguacugcgacaacgccggcagcgugagcuucuucccccaggccgagaccugcaaggugcagagcaacagaguguucugcgacaccaugaacagcagaacccugcccagcgaggugaaccugugcaacaucgacaucuucaaccccaaguacgacugcaagaucaugaccagcaagaccgacgugagcagcagcgugaucaccagccugggcgccaucgugagcugcuacggcaagaccaagugcaccgccagcaacaagaacagaggcaucaucaagaccuucagcaacggcugcgacuacgugagcaacaagggcguggacaccgugagcgugggcaacacccuguacuacgugaacaagcaggagggcaagagccuguacgugaagggcgagcccaucaucaacuucuacgacccccugguguuccccagcgacgaguucgacgccagcaucagccaggugaacgagaagaucaaccagagccuggccuucaucagaaagagcgacgagcugcugcacaacgugaacgugggcaagagcaccaccaacaucaugaucaccaccaucaucaucgugaucaucgugauccugcugcugcugaucgccgugggccuguuccuguacugcaaggccagaagcacccccgugacccugagcaaggaccagcugagcggcaucaacaacaucgccuucagcaacugaggacuaguacuggcugcaucucccuuuccucuguccuccauccuucucccaggauggugaagggggaccugguacccagugauccccaccccaggauccuaaaucaugacuuaccugcuaauaaaaacucauuggaaaagugagaagaucuaaaaaaaaaaaaaaaaaaaaaaaaaaaaaaaaaaaaaaaaaaaaaaaaaaaaaaaaaaaaaaaaugcaucccccccccccccccccccccccccccccccaaaggcucuuuucagagccaccagaauu

SEQ ID NO: 13312 - RNA, 1983 nt, Artificial Sequence
  mRNA product Design c-3 comprising derived and/or modified sequence from HRSV(Memphis-37)__AIY60640.1__F_DSCav1_mut0 (opt5)
gggagaguccgcucagccagguugcagaagcggcuuagcguguguccuaaucuucucucugcguguagguaggccugugccgcaaacaagcuuaccauggagcugcccauccucaagaccaacgccauuacaacgauccuggcugccgugacccuuugcuucgcgagcucccagaauauuacagaagaguuuuaccaaucuaccuguagcgcugucuccaaaggcuaucugucugcccucagaacagggugguacaccagcguuaucacaauugaacuguccaacaucaaggagaauaaaugcaacggaaccgacgccaaggugaaacuuaucaagcaggaacuggauaaguauaaaaaugcugugacggagcuccagcugcugaugcagucuaccccugccgcuggcagcggguccgccauugcgagcggaaucgccgucuguaaggugcuccaccuggagggcgaaguuaacaaaauuaagaaugcccuucugucuacaaacaaagcuguggucucccucagcaauggggugucuguucugaccuucaaggugcuugaccugaagaacuacaucgauaaacaacuccugccgauucugaauaagcaguccugcagcaucucuaacauugagacagucaucgaauuucagcagaaaaauaaccggcuccuggagaucacccgcgaguucuccgugaaugcuggagugacgacacccgucagcaccuauaugcuuacaaacuccgaacugcucucucugauuaacgacaugccuaucaccaaugaucaaaagaaacuuaugagcaacaauguucagauugugagacagcaguccuacagcaucauguguauuaucaaggaggaagugcuggccuaugucgugcaacucccccuguacggcguuaucgacaccccuugcuggaaacugcauacaucuccccucuguacgaccaacacaaaggagggcuccaauauuugccugacccggacagaucgcgggugguacugugacaacgcgggaagcgugagcuuuuucccucaggccgaaaccugcaagguccagucuaauagaguguuuugugauacgaugaacuccagaacacugccgucugagguuaaucucugcaacaucgacauuuucaaucccaaauaugauugcaagaucaugaccagcaaaaccgacguguccagcucugucauuacaucccugggcgcuaucgugagcuguuacgggaagaccaaaugcacagccucuaacaagaaucggggaaucauuaagacguuuuccaacggcugugauuaugucagcaauaaagggguggacaccguuuccgugggaaacacacuuuacuaugucaacaagcaagagggcaaaucucuguacgugaagggcgaaccuaucauuaauuucuaugacccccucguuuuuccuagcgaugaguucgacgcuuccaucucucaggugaacgaaaagauuaaucagagccuggccuuuauccgcaaguccgaugagcugcuccacaacgucaauguggggaaaagcaccacaaacauuaugaucaccacgaucauuaucgugauuaucguuauucugcuucugcucaucgccgucggacuguuccuguacugcaaagcuagaucuacccccgugacacuuuccaaggaccagcucagcggcaucaauaacauugcguucucuaauugaggacuaguacuggcugcaucucccuuuccucuguccuccauccuucucccaggauggugaagggggaccugguacccagugauccccaccccaggauccuaaaucaugacuuaccugcuaauaaaaacucauuggaaaagugagaagaucuaaaaaaaaaaaaaaaaaaaaaaaaaaaaaaaaaaaaaaaaaaaaaaaaaaaaaaaaaaaaaaaaugcaucccccccccccccccccccccccccccccccaaaggcucuuuucagagccaccagaauu

SEQ ID NO: 13313 - RNA, 1983 nt, Artificial Sequence
  mRNA product Design c-3 comprising derived and/or modified sequence from HRSV(Memphis-37)__AIY60640.1__F_DSCav1_mut0 (opt6)
gggagaguccgcucagccagguugcagaagcggcuuagcguguguccuaaucuucucucugcguguagguaggccugugccgcaaacaagcuuaccauggaauuaccaaucuuaaaaacaaacgccauaacaaccauccucgcagcaguaacccuaugcuuugcauccucacaaaacauaacugaagaauuuuaccaaucaacaugcucagcaguaucaaaaggauaucuaucagcccucagaacaggaugguacacaucagucauuacaaucgaacuuucaaacauaaaagaaaauaaauguaacggcacagaugccaaaguaaaauuaauuaaacaagaacuugacaaauacaaaaaugccguaacagaacuacaacuacuaaugcaaaguacuccugcugcaggaagcggaucugcaauagcaucagguauagcaguauguaaaguucuacaccuagaaggcgaaguaaacaaaauuaaaaacgcacuacucucaacaaauaaagcaguugucucccuaucaaacggaguaucaguauuaacuuucaaaguacuagaccucaaaaacuauauagacaaacaacuauuaccaauacuaaacaaacaaagcugcucuaucuccaacaucgaaacaguaauagaauuucaacaaaaaaauaauagacuacuugaaauaaccagagaauuuucaguaaacgccggaguaacaacaccaguaucaacuuacaugcuaacaaacuccgaacuacuaucauuaauaaacgacaugcccauaacaaacgaccaaaaaaaauuaaugucaaacaacguccaaaucguacgacaacaauccuauuccauaauguguauaauaaaagaagaaguacuagcauacguaguacaauuaccauuauauggaguaauagauaccccuugcuggaaacuacacacaucaccccuaugcacuacaaauacgaaagaagguucaaauauaugcuuaacuagaaccgauagagguugguauugugacaacgcuggaucaguaucauuuuucccacaagcagaaacaugcaaaguacaaucaaacagaguauuuugcgacacuaugaacucaagaacuuuaccauccgaaguuaaucuauguaacauagauauauuuaacccaaaauacgacugcaaaauaaugacaucaaaaacagauguaucaucaucaguuauaaccucccucggagcaauaguaucaugcuauggaaaaacaaaaugcacagcaucaaacaaaaaucguggaauuauaaaaacauucucaaacggcugugacuacgucagcaauaaaggaguagacacagucucaguaggaaacacuuuauacuauguuaacaaacaagaaggaaaaucacucuacgucaaaggcgaaccaauaauaaauuucuaugacccacucguauucccauccgacgaauuugacgcaucaauaucacaaguaaaugaaaaaauaaaccaaagccuagcauuuauacgaaaaucagacgaacuacuacacaacguaaacguagguaaaagcacaaccaauauaaugauaacaacaauaaucauaguaauaaucguaauauuacuauuacuaauagcuguaggauuguuccuauacugcaaagcaagaucaacaccaguaaccuuaucuaaggaccaacuaucaggaaucaauaacauugccuucucaaacuaaggacuaguacuggcugcaucucccuuuccucuguccuccauccuucucccaggauggugaagggggaccugguacccagugauccccaccccaggauccuaaaucaugacuuaccugcuaauaaaaacucauuggaaaagugagaagaucuaaaaaaaaaaaaaaaaaaaaaaaaaaaaaaaaaaaaaaaaaaaaaaaaaaaaaaaaaaaaaaaaugcaucccccccccccccccccccccccccccccccaaaggcucuuuucagagccaccagaauu

SEQ ID NO: 13314 - RNA, 1983 nt, Artificial Sequence
  mRNA product Design c-3 comprising derived and/or modified sequence from HRSV(Memphis-37)__AIY60640.1__F_DSCav1_mut0 (opt11)
gggagaguccgcucagccagguugcagaagcggcuuagcguguguccuaaucuucucucugcguguagguaggccugugccgcaaacaagcuuaccauggaacuaccuauccuuaaaaccaacgcaaucaccaccauccuugccgcagucacacucugcuucgcauccucacagaacaucaccgaagaguucuaucaaucaaccugcuccgccguauccaaaggauaccucucagcccuccgcaccggcugguauaccucagucauaacaaucgaauuaucaaauaucaaggagaacaaaugcaacggcaccgacgccaaagucaaacucauaaaacaagaacuagacaaauacaaaaacgccgugacagaacuccaacuccucaugcaguccacccccgcagccggauccggcucagcaaucgccucgggcauugcaguaugcaaaguccuccaccucgaaggcgaagucaacaaaaucaaaaacgcccuccucuccaccaacaaagccgucgucucccucuccaacggcguaucuguccucacuuucaagguccucgaccucaaaaacuacaucgacaagcaacuacuuccaauccucaacaagcaauccugcucaaucucaaacaucgaaaccguaauagaguuccaacaaaagaacaaccgccuccucgaaaucacccgcgaguucuccguuaacgccggugucacuaccccagucagcaccuacaugcucaccaacuccgaacuccuuucucugaucaacgacaugccaaucaccaacgaucaaaagaaauuaauguccaacaacguccagaucguccgccaacaaagcuacagcaucaugugcaucauaaaagaagaaguacuugcguacguaguucaacuaccccuuuacggcguaaucgacaccccaugcuggaaacuccacaccuccccacuaugcaccaccaacaccaaagaaggauccaacaucugccuaacccgcaccgaccgcggcugguacugcgacaacgcugggagcgucucauucuucccacaagcagaaaccugcaaaguccaaucgaaccgcguauucugcgacaccaugaacuccagaacccuaccaagcgaagucaaucuuugcaacaucgacauauuuaaccccaaauacgacugcaaaaucaugacaucaaagaccgacgucucaucuucagucauuaccucacucggcgcaauugucagcugcuacggaaagaccaaauguaccgccuccaauaaaaaccguggaaucauaaaaaccuuuagcaacggcugcgacuacgucuccaacaaaggagucgacaccgucuccgucggcaacacccucuacuacgucaacaaacaagaaggaaaaucccucuacgugaaaggcgaacccauaauaaacuucuacgacccccuagucuuccccucugacgaguucgacgccuccaucucccaagucaacgaaaagauaaaucaaucacuagccuucauacgcaaaucugacgaacuucuccacaacgucaacgucggcaaauccaccaccaacauaaugaucacaacgauaauaaucgugaucauaguaauccuacuucuccucaucgcaguaggucuauuccuauacugcaaagcccgcagcacccccgucacccuaucaaaagaccaacucuccggcaucaacaacaucgccuucucaaacuaaggacuaguacuggcugcaucucccuuuccucuguccuccauccuucucccaggauggugaagggggaccugguacccagugauccccaccccaggauccuaaaucaugacuuaccugcuaauaaaaacucauuggaaaagugagaagaucuaaaaaaaaaaaaaaaaaaaaaaaaaaaaaaaaaaaaaaaaaaaaaaaaaaaaaaaaaaaaaaaaugcaucccccccccccccccccccccccccccccccaaaggcucuuuucagagccaccagaauu

SEQ ID NO: 13315 - RNA, 1979 nt, Artificial Sequence
  mRNA product Design c-4 comprising derived and/or modified sequence from HRSV(Memphis-37)__AIY60640.1__F_DSCav1_mut0 (opt1)
gggagaguccgcucagccagguugcagaagcggcuuagcguguguccuaaucuucucucugcguguagguaggccugugccgcaaacaagcuuaccauggagcugcccauccucaagaccaacgccaucaccacgauccuggccgcggugacccugugcuucgccagcucccagaacaucaccgaggaguucuaccagagcacgugcuccgccgucagcaagggcuaccucuccgcccugcgcaccgggugguacaccagcgugaucaccaucgagcuguccaacaucaaggagaacaagugcaacggcaccgacgccaaggugaagcucaucaagcaggagcuggacaaguacaagaacgcggucacggagcugcagcuccugaugcagagcaccccggccgccggcuccgggagcgcgaucgccuccggcaucgccgucugcaaggugcugcaccucgagggcgaggugaacaagaucaagaacgcccugcuguccaccaacaaggccgucgugagccucuccaacggggugagcguccugaccuucaaggugcuggaccucaagaacuacaucgacaagcagcugcugcccauccugaacaagcagagcugcuccaucagcaacaucgagaccgucaucgaguuccagcagaagaacaaccgccuccuggagaucacgcgggaguucagcgugaacgcgggcgugaccacccccgucuccaccuacaugcugacgaacagcgagcuccugucccugaucaacgacaugccgaucaccaacgaccagaagaagcucaugagcaacaacgugcagaucgugcgccagcaguccuacagcaucaugugcaucaucaaggaggagguccuggccuacguggugcagcugccccucuacggggucaucgacacccccugcuggaagcugcacaccagcccccugugcacgaccaacaccaaggagggcuccaacaucugccucacccggacggaccgcgggugguacugcgacaacgccggcagcguguccuucuucccgcaggccgagaccugcaagguccagagcaaccggguguucugcgacaccaugaacucccggacccugcccagcgaggugaaccucugcaacaucgacaucuucaaccccaaguacgacugcaagaucaugacguccaagaccgacgucagcuccagcgugaucaccucccugggcgccaucgugagcugcuacgggaagaccaagugcacggcgagcaacaagaaccgcggcaucaucaagaccuucuccaacgggugcgacuacgucagcaacaagggcguggacaccguguccgucggcaacacccuguacuacgugaacaagcaggagggcaagagccucuacgugaagggggagcccaucaucaacuucuacgacccgcuggucuuccccuccgacgaguucgacgccagcaucucccaggugaacgagaagaucaaccagagccuggccuucauccggaaguccgacgagcuccugcacaacgugaacgucggcaagagcaccacgaacaucaugaucaccaccaucaucaucgugaucaucgugauccugcugcuccugaucgccgucgggcuguuccucuacugcaaggcccgcuccacccccgugacgcugagcaaggaccagcuguccgggaucaacaacaucgcguucagcaacugaggacuaguggaagcauuuuccuggcugauuaaaagaaauuacucagcuauggucaucuguuccuguuagaaggcuaugcagcauauuauauacuaugcgcauguuaugaaaugcauaauaaaaaauuuuaaaaaaucuaaaagaucuaaaaaaaaaaaaaaaaaaaaaaaaaaaaaaaaaaaaaaaaaaaaaaaaaaaaaaaaaaaaaaaaugcaucccccccccccccccccccccccccccccccaaaggcucuuuucagagccaccagaauu

SEQ ID NO: 13316 - RNA, 1979 nt, Artificial Sequence
  mRNA product Design c-4 comprising derived and/or modified sequence from HRSV(Memphis-37)__AIY60640.1__F_DSCav1_mut0 (opt1)
gggagaguccgcucagccagguugcagaagcggcuuagcguguguccuaaucuucucucugcguguagguaggccugugccgcaaacaagcuuaccauggagcugcccauccucaagaccaacgccaucaccacgauccuggccgcggugacccugugcuucgccagcucccagaacaucaccgaggaguucuaccagagcacgugcuccgccgucagcaagggcuaccucuccgcccugcgcaccgggugguacaccagcgugaucaccaucgagcuguccaacaucaaggagaacaagugcaacggcaccgacgccaaggugaagcucaucaagcaggagcuggacaaguacaagaacgcggucacggagcugcagcuccugaugcagagcaccccggccgccggguccggcagcgccaucgcguccgggaucgccgugugcaaggugcugcaccucgagggcgaggucaacaagaucaagaacgcccugcugagcaccaacaaggccguggugucccucagcaacggcgucuccgugcugaccuucaaggugcuggaccucaagaacuacaucgacaagcagcugcugcccauccucaacaagcagagcugcuccaucagcaacaucgagacggucaucgaguuccagcagaagaacaaccggcugcuggagaucacccgcgaguucuccgugaacgccggggugaccacccccgucagcacguacaugcucaccaacagcgagcugcugucccucaucaacgacaugcccaucaccaacgaccagaagaagcugaugagcaacaacgugcagaucgugcggcagcaguccuacagcaucaugugcaucaucaaggaggagguccuggcguacguggugcagcucccgcuguacggcgucaucgacacccccugcuggaagcugcacacgagcccccucugcaccaccaacaccaaggagggguccaacaucugccugacgcgcaccgaccggggcugguacugcgacaacgccggguccgugagcuucuucccccaggccgagaccugcaaggugcaguccaaccgcgucuucugcgacaccaugaacagccggacgcucccguccgaggugaaccugugcaacaucgacaucuucaaccccaaguacgacugcaagaucaugaccagcaagaccgacgucuccagcuccgugaucaccagccugggcgccaucguguccugcuacggcaagacgaagugcaccgccagcaacaagaaccgggggaucaucaagaccuucuccaacggcugcgacuacgucagcaacaaggggguggacaccgugagcgucggcaacacgcucuacuacgugaacaagcaggagggcaagucccuguacgugaagggggagcccaucaucaacuucuacgacccccuggucuucccgagcgacgaguucgacgcguccaucagccaggugaacgagaagaucaaccagucccucgccuucauccgcaagagcgacgagcugcugcacaacgugaacgucggcaaguccaccaccaacaucaugaucaccaccaucaucaucgugaucaucgugauccuccugcugcucaucgccgucgggcuguuccuguacugcaaggcccggagcacgcccgugacccuguccaaggaccagcucagcggcaucaacaacaucgccuucuccaacugaggacuaguggaagcauuuuccuggcugauuaaaagaaauuacucagcuauggucaucuguuccuguuagaaggcuaugcagcauauuauauacuaugcgcauguuaugaaaugcauaauaaaaaauuuuaaaaaaucuaaaagaucuaaaaaaaaaaaaaaaaaaaaaaaaaaaaaaaaaaaaaaaaaaaaaaaaaaaaaaaaaaaaaaaaugcaucccccccccccccccccccccccccccccccaaaggcucuuuucagagccaccagaauu

SEQ ID NO: 13317 - RNA, 1979 nt, Artificial Sequence
  mRNA product Design c-4 comprising derived and/or modified sequence from HRSV(Memphis-37)__AIY60640.1__F_DSCav1_mut0 (opt2)
gggagaguccgcucagccagguugcagaagcggcuuagcguguguccuaaucuucucucugcguguagguaggccugugccgcaaacaagcuuaccauggagcuccccauccucaagaccaacgccaucaccaccauccucgccgccgucacccucugcuucgccuccucccagaacaucaccgaggaguucuaccaguccaccugcuccgccgucuccaagggcuaccucuccgcccuccgcaccggcugguacaccuccgucaucaccaucgagcucuccaacaucaaggagaacaagugcaacggcaccgacgccaaggucaagcucaucaagcaggagcucgacaaguacaagaacgccgucaccgagcuccagcuccucaugcaguccacccccgccgccggcuccggcuccgccaucgccuccggcaucgccgucugcaagguccuccaccucgagggcgaggucaacaagaucaagaacgcccuccucuccaccaacaaggccgucgucucccucuccaacggcgucuccguccucaccuucaagguccucgaccucaagaacuacaucgacaagcagcuccuccccauccucaacaagcaguccugcuccaucuccaacaucgagaccgucaucgaguuccagcagaagaacaaccgccuccucgagaucacccgcgaguucuccgucaacgccggcgucaccacccccgucuccaccuacaugcucaccaacuccgagcuccucucccucaucaacgacaugcccaucaccaacgaccagaagaagcucauguccaacaacguccagaucguccgccagcaguccuacuccaucaugugcaucaucaaggaggagguccucgccuacgucguccagcucccccucuacggcgucaucgacacccccugcuggaagcuccacaccuccccccucugcaccaccaacaccaaggagggcuccaacaucugccucacccgcaccgaccgcggcugguacugcgacaacgccggcuccgucuccuucuucccccaggccgagaccugcaagguccaguccaaccgcgucuucugcgacaccaugaacucccgcacccuccccuccgaggucaaccucugcaacaucgacaucuucaaccccaaguacgacugcaagaucaugaccuccaagaccgacgucuccuccuccgucaucaccucccucggcgccaucgucuccugcuacggcaagaccaagugcaccgccuccaacaagaaccgcggcaucaucaagaccuucuccaacggcugcgacuacgucuccaacaagggcgucgacaccgucuccgucggcaacacccucuacuacgucaacaagcaggagggcaagucccucuacgucaagggcgagcccaucaucaacuucuacgacccccucgucuuccccuccgacgaguucgacgccuccaucucccaggucaacgagaagaucaaccagucccucgccuucauccgcaaguccgacgagcuccuccacaacgucaacgucggcaaguccaccaccaacaucaugaucaccaccaucaucaucgucaucaucgucauccuccuccuccucaucgccgucggccucuuccucuacugcaaggcccgcuccacccccgucacccucuccaaggaccagcucuccggcaucaacaacaucgccuucuccaacugaggacuaguggaagcauuuuccuggcugauuaaaagaaauuacucagcuauggucaucuguuccuguuagaaggcuaugcagcauauuauauacuaugcgcauguuaugaaaugcauaauaaaaaauuuuaaaaaaucuaaaagaucuaaaaaaaaaaaaaaaaaaaaaaaaaaaaaaaaaaaaaaaaaaaaaaaaaaaaaaaaaaaaaaaaugcaucccccccccccccccccccccccccccccccaaaggcucuuuucagagccaccagaauu

SEQ ID NO: 13318 - RNA, 1979 nt, Artificial Sequence
  mRNA product Design c-4 comprising derived and/or modified sequence from HRSV(Memphis-37)__AIY60640.1__F_DSCav1_mut0 (opt3)
gggagaguccgcucagccagguugcagaagcggcuuagcguguguccuaaucuucucucugcguguagguaggccugugccgcaaacaagcuuaccauggagcugcccauccucaagaccaacgccauuacaacuauacuugcugcagugacgcugugcuucgccagcucccagaauaucaccgaagaguuuuaccaaucuacauguucagcggucaguaaaggcuauuugagcgcuuuaagaacugggugguacaccuccguuauuacaaucgaacugucuaacauuaaggagaauaaaugcaacggaaccgacgccaaggugaaacuaaucaagcaggaacucgauaaguauaaaaaugcaguaacugagcugcagcuucugaugcagucgaccccugccgcugguucaggcagcgcaauagccagugggaucgcuguguguaaggucuugcaccucgagggagaagugaacaaaauuaagaaugcccugcuguccacaaacaaagcgguugugucucucagcaauggcgucuccguguuaacguucaagguacuggaccuuaagaacuacaucgauaaacaauugcugccaauucuaaauaagcagucaugcaguaucagcaacauagagacuguuauugaauuucagcagaaaaauaacaggcuccuggagaucacccgggaguucucugugaaugccggugucacaacuccgguguccaccuauaugcuuacaaacucagaacuguugagccucauuaacgacaugcccaucaccaaugaucaaaagaaacugaugaguaacaaugugcagaucguccgccagcagucuuacuccauuauguguauaaucaaggaggaaguuuuagcauaugugguacaacugccucucuacggggugauugacacgccaugcuggaaacuucauacuagcccccuguguacaaccaacacuaaggagggaucgaauaucugcuugacacgaaccgaucguggcugguacugugacaacgcuggcucugucuccuuuuucccucaggccgaaacgugcaaggugcagucaaauagaguguuuugugauaccaugaacaguagaacacugccaagcgaggugaaucucugcaacauagacauuuucaaucccaaauaugauugcaagaucaugacuuccaaaaccgacgucucuagcucagugaucacaagucugggggcaauuguauccuguuacggaaagacuaaaugcaccgcuagcaacaagaauagggguaucauuaagacauuuucuaacggcugugauuauguuucaaauaaagggguggacaccgucagugugggaaacacucuuuacuaugucaacaagcaagagggcaaaagccuguacgugaagggugaaccuauaaucaauuucuaugacccauugguuuuuccguccgaugaguucgacgccucuauuucgcagguuaacgagaaaaucaaucagagccucgcguuuauccggaaguccgaugaacuguuacacaacguaaaugucgggaagucaacgacaaacauuaugauaaccacuaucauuaucgugauuaucguuauacugcuacuccugaucgccgugggacuuuucuuguacugcaaagcacgcaguacccccgucacacugucuaaggaccagcucagcggcauuaauaacaucgcuuucuccaauugaggacuaguggaagcauuuuccuggcugauuaaaagaaauuacucagcuauggucaucuguuccuguuagaaggcuaugcagcauauuauauacuaugcgcauguuaugaaaugcauaauaaaaaauuuuaaaaaaucuaaaagaucuaaaaaaaaaaaaaaaaaaaaaaaaaaaaaaaaaaaaaaaaaaaaaaaaaaaaaaaaaaaaaaaaugcaucccccccccccccccccccccccccccccccaaaggcucuuuucagagccaccagaauu

SEQ ID NO: 13319 - RNA, 1979 nt, Artificial Sequence
  mRNA product Design c-4 comprising derived and/or modified sequence from HRSV(Memphis-37)__AIY60640.1__F_DSCav1_mut0 (opt4)
gggagaguccgcucagccagguugcagaagcggcuuagcguguguccuaaucuucucucugcguguagguaggccugugccgcaaacaagcuuaccauggagcugcccauccugaagaccaacgccaucaccaccauccuggccgccgugacccugugcuucgccagcagccagaacaucaccgaggaguucuaccagagcaccugcagcgccgugagcaagggcuaccugagcgcccugagaaccggcugguacaccagcgugaucaccaucgagcugagcaacaucaaggagaacaagugcaacggcaccgacgccaaggugaagcugaucaagcaggagcuggacaaguacaagaacgccgugaccgagcugcagcugcugaugcagagcacccccgccgccggcagcggcagcgccaucgccagcggcaucgccgugugcaaggugcugcaccuggagggcgaggugaacaagaucaagaacgcccugcugagcaccaacaaggccguggugagccugagcaacggcgugagcgugcugaccuucaaggugcuggaccugaagaacuacaucgacaagcagcugcugcccauccugaacaagcagagcugcagcaucagcaacaucgagaccgugaucgaguuccagcagaagaacaacagacugcuggagaucaccagagaguucagcgugaacgccggcgugaccacccccgugagcaccuacaugcugaccaacagcgagcugcugagccugaucaacgacaugcccaucaccaacgaccagaagaagcugaugagcaacaacgugcagaucgugagacagcagagcuacagcaucaugugcaucaucaaggaggaggugcuggccuacguggugcagcugccccuguacggcgugaucgacacccccugcuggaagcugcacaccagcccccugugcaccaccaacaccaaggagggcagcaacaucugccugaccagaaccgacagaggcugguacugcgacaacgccggcagcgugagcuucuucccccaggccgagaccugcaaggugcagagcaacagaguguucugcgacaccaugaacagcagaacccugcccagcgaggugaaccugugcaacaucgacaucuucaaccccaaguacgacugcaagaucaugaccagcaagaccgacgugagcagcagcgugaucaccagccugggcgccaucgugagcugcuacggcaagaccaagugcaccgccagcaacaagaacagaggcaucaucaagaccuucagcaacggcugcgacuacgugagcaacaagggcguggacaccgugagcgugggcaacacccuguacuacgugaacaagcaggagggcaagagccuguacgugaagggcgagcccaucaucaacuucuacgacccccugguguuccccagcgacgaguucgacgccagcaucagccaggugaacgagaagaucaaccagagccuggccuucaucagaaagagcgacgagcugcugcacaacgugaacgugggcaagagcaccaccaacaucaugaucaccaccaucaucaucgugaucaucgugauccugcugcugcugaucgccgugggccuguuccuguacugcaaggccagaagcacccccgugacccugagcaaggaccagcugagcggcaucaacaacaucgccuucagcaacugaggacuaguggaagcauuuuccuggcugauuaaaagaaauuacucagcuauggucaucuguuccuguuagaaggcuaugcagcauauuauauacuaugcgcauguuaugaaaugcauaauaaaaaauuuuaaaaaaucuaaaagaucuaaaaaaaaaaaaaaaaaaaaaaaaaaaaaaaaaaaaaaaaaaaaaaaaaaaaaaaaaaaaaaaaugcaucccccccccccccccccccccccccccccccaaaggcucuuuucagagccaccagaauu

SEQ ID NO: 13320 - RNA, 1979 nt, Artificial Sequence
  mRNA product Design c-4 comprising derived and/or modified sequence from HRSV(Memphis-37)__AIY60640.1__F_DSCav1_mut0 (opt5)
gggagaguccgcucagccagguugcagaagcggcuuagcguguguccuaaucuucucucugcguguagguaggccugugccgcaaacaagcuuaccauggagcugcccauccucaagaccaacgccauuacaacgauccuggcugccgugacccuuugcuucgcgagcucccagaauauuacagaagaguuuuaccaaucuaccuguagcgcugucuccaaaggcuaucugucugcccucagaacagggugguacaccagcguuaucacaauugaacuguccaacaucaaggagaauaaaugcaacggaaccgacgccaaggugaaacuuaucaagcaggaacuggauaaguauaaaaaugcugugacggagcuccagcugcugaugcagucuaccccugccgcuggcagcggguccgccauugcgagcggaaucgccgucuguaaggugcuccaccuggagggcgaaguuaacaaaauuaagaaugcccuucugucuacaaacaaagcuguggucucccucagcaauggggugucuguucugaccuucaaggugcuugaccugaagaacuacaucgauaaacaacuccugccgauucugaauaagcaguccugcagcaucucuaacauugagacagucaucgaauuucagcagaaaaauaaccggcuccuggagaucacccgcgaguucuccgugaaugcuggagugacgacacccgucagcaccuauaugcuuacaaacuccgaacugcucucucugauuaacgacaugccuaucaccaaugaucaaaagaaacuuaugagcaacaauguucagauugugagacagcaguccuacagcaucauguguauuaucaaggaggaagugcuggccuaugucgugcaacucccccuguacggcguuaucgacaccccuugcuggaaacugcauacaucuccccucuguacgaccaacacaaaggagggcuccaauauuugccugacccggacagaucgcgggugguacugugacaacgcgggaagcgugagcuuuuucccucaggccgaaaccugcaagguccagucuaauagaguguuuugugauacgaugaacuccagaacacugccgucugagguuaaucucugcaacaucgacauuuucaaucccaaauaugauugcaagaucaugaccagcaaaaccgacguguccagcucugucauuacaucccugggcgcuaucgugagcuguuacgggaagaccaaaugcacagccucuaacaagaaucggggaaucauuaagacguuuuccaacggcugugauuaugucagcaauaaagggguggacaccguuuccgugggaaacacacuuuacuaugucaacaagcaagagggcaaaucucuguacgugaagggcgaaccuaucauuaauuucuaugacccccucguuuuuccuagcgaugaguucgacgcuuccaucucucaggugaacgaaaagauuaaucagagccuggccuuuauccgcaaguccgaugagcugcuccacaacgucaauguggggaaaagcaccacaaacauuaugaucaccacgaucauuaucgugauuaucguuauucugcuucugcucaucgccgucggacuguuccuguacugcaaagcuagaucuacccccgugacacuuuccaaggaccagcucagcggcaucaauaacauugcguucucuaauugaggacuaguggaagcauuuuccuggcugauuaaaagaaauuacucagcuauggucaucuguuccuguuagaaggcuaugcagcauauuauauacuaugcgcauguuaugaaaugcauaauaaaaaauuuuaaaaaaucuaaaagaucuaaaaaaaaaaaaaaaaaaaaaaaaaaaaaaaaaaaaaaaaaaaaaaaaaaaaaaaaaaaaaaaaugcaucccccccccccccccccccccccccccccccaaaggcucuuuucagagccaccagaauu

SEQ ID NO: 13321 - RNA, 1979 nt, Artificial Sequence
  mRNA product Design c-4 comprising derived and/or modified sequence from HRSV(Memphis-37)__AIY60640.1__F_DSCav1_mut0 (opt6)
gggagaguccgcucagccagguugcagaagcggcuuagcguguguccuaaucuucucucugcguguagguaggccugugccgcaaacaagcuuaccauggaauuaccaaucuuaaaaacaaacgccauaacaaccauccucgcagcaguaacccuaugcuuugcauccucacaaaacauaacugaagaauuuuaccaaucaacaugcucagcaguaucaaaaggauaucuaucagcccucagaacaggaugguacacaucagucauuacaaucgaacuuucaaacauaaaagaaaauaaauguaacggcacagaugccaaaguaaaauuaauuaaacaagaacuugacaaauacaaaaaugccguaacagaacuacaacuacuaaugcaaaguacuccugcugcaggaagcggaucugcaauagcaucagguauagcaguauguaaaguucuacaccuagaaggcgaaguaaacaaaauuaaaaacgcacuacucucaacaaauaaagcaguugucucccuaucaaacggaguaucaguauuaacuuucaaaguacuagaccucaaaaacuauauagacaaacaacuauuaccaauacuaaacaaacaaagcugcucuaucuccaacaucgaaacaguaauagaauuucaacaaaaaaauaauagacuacuugaaauaaccagagaauuuucaguaaacgccggaguaacaacaccaguaucaacuuacaugcuaacaaacuccgaacuacuaucauuaauaaacgacaugcccauaacaaacgaccaaaaaaaauuaaugucaaacaacguccaaaucguacgacaacaauccuauuccauaauguguauaauaaaagaagaaguacuagcauacguaguacaauuaccauuauauggaguaauagauaccccuugcuggaaacuacacacaucaccccuaugcacuacaaauacgaaagaagguucaaauauaugcuuaacuagaaccgauagagguugguauugugacaacgcuggaucaguaucauuuuucccacaagcagaaacaugcaaaguacaaucaaacagaguauuuugcgacacuaugaacucaagaacuuuaccauccgaaguuaaucuauguaacauagauauauuuaacccaaaauacgacugcaaaauaaugacaucaaaaacagauguaucaucaucaguuauaaccucccucggagcaauaguaucaugcuauggaaaaacaaaaugcacagcaucaaacaaaaaucguggaauuauaaaaacauucucaaacggcugugacuacgucagcaauaaaggaguagacacagucucaguaggaaacacuuuauacuauguuaacaaacaagaaggaaaaucacucuacgucaaaggcgaaccaauaauaaauuucuaugacccacucguauucccauccgacgaauuugacgcaucaauaucacaaguaaaugaaaaaauaaaccaaagccuagcauuuauacgaaaaucagacgaacuacuacacaacguaaacguagguaaaagcacaaccaauauaaugauaacaacaauaaucauaguaauaaucguaauauuacuauuacuaauagcuguaggauuguuccuauacugcaaagcaagaucaacaccaguaaccuuaucuaaggaccaacuaucaggaaucaauaacauugccuucucaaacuaaggacuaguggaagcauuuuccuggcugauuaaaagaaauuacucagcuauggucaucuguuccuguuagaaggcuaugcagcauauuauauacuaugcgcauguuaugaaaugcauaauaaaaaauuuuaaaaaaucuaaaagaucuaaaaaaaaaaaaaaaaaaaaaaaaaaaaaaaaaaaaaaaaaaaaaaaaaaaaaaaaaaaaaaaaugcaucccccccccccccccccccccccccccccccaaaggcucuuuucagagccaccagaauu

SEQ ID NO: 13322 - RNA, 1979 nt, Artificial Sequence
  mRNA product Design c-4 comprising derived and/or modified sequence from HRSV(Memphis-37)__AIY60640.1__F_DSCav1_mut0 (opt11)
gggagaguccgcucagccagguugcagaagcggcuuagcguguguccuaaucuucucucugcguguagguaggccugugccgcaaacaagcuuaccauggaacuaccuauccuuaaaaccaacgcaaucaccaccauccuugccgcagucacacucugcuucgcauccucacagaacaucaccgaagaguucuaucaaucaaccugcuccgccguauccaaaggauaccucucagcccuccgcaccggcugguauaccucagucauaacaaucgaauuaucaaauaucaaggagaacaaaugcaacggcaccgacgccaaagucaaacucauaaaacaagaacuagacaaauacaaaaacgccgugacagaacuccaacuccucaugcaguccacccccgcagccggauccggcucagcaaucgccucgggcauugcaguaugcaaaguccuccaccucgaaggcgaagucaacaaaaucaaaaacgcccuccucuccaccaacaaagccgucgucucccucuccaacggcguaucuguccucacuuucaagguccucgaccucaaaaacuacaucgacaagcaacuacuuccaauccucaacaagcaauccugcucaaucucaaacaucgaaaccguaauagaguuccaacaaaagaacaaccgccuccucgaaaucacccgcgaguucuccguuaacgccggugucacuaccccagucagcaccuacaugcucaccaacuccgaacuccuuucucugaucaacgacaugccaaucaccaacgaucaaaagaaauuaauguccaacaacguccagaucguccgccaacaaagcuacagcaucaugugcaucauaaaagaagaaguacuugcguacguaguucaacuaccccuuuacggcguaaucgacaccccaugcuggaaacuccacaccuccccacuaugcaccaccaacaccaaagaaggauccaacaucugccuaacccgcaccgaccgcggcugguacugcgacaacgcugggagcgucucauucuucccacaagcagaaaccugcaaaguccaaucgaaccgcguauucugcgacaccaugaacuccagaacccuaccaagcgaagucaaucuuugcaacaucgacauauuuaaccccaaauacgacugcaaaaucaugacaucaaagaccgacgucucaucuucagucauuaccucacucggcgcaauugucagcugcuacggaaagaccaaauguaccgccuccaauaaaaaccguggaaucauaaaaaccuuuagcaacggcugcgacuacgucuccaacaaaggagucgacaccgucuccgucggcaacacccucuacuacgucaacaaacaagaaggaaaaucccucuacgugaaaggcgaacccauaauaaacuucuacgacccccuagucuuccccucugacgaguucgacgccuccaucucccaagucaacgaaaagauaaaucaaucacuagccuucauacgcaaaucugacgaacuucuccacaacgucaacgucggcaaauccaccaccaacauaaugaucacaacgauaauaaucgugaucauaguaauccuacuucuccucaucgcaguaggucuauuccuauacugcaaagcccgcagcacccccgucacccuaucaaaagaccaacucuccggcaucaacaacaucgccuucucaaacuaaggacuaguggaagcauuuuccuggcugauuaaaagaaauuacucagcuauggucaucuguuccuguuagaaggcuaugcagcauauuauauacuaugcgcauguuaugaaaugcauaauaaaaaauuuuaaaaaaucuaaaagaucuaaaaaaaaaaaaaaaaaaaaaaaaaaaaaaaaaaaaaaaaaaaaaaaaaaaaaaaaaaaaaaaaugcaucccccccccccccccccccccccccccccccaaaggcucuuuucagagccaccagaauu

SEQ ID NO: 13323 - RNA, 1897 nt, Artificial Sequence
  mRNA product Design c-5 comprising derived and/or modified sequence from HRSV(Memphis-37)__AIY60640.1__F_DSCav1_mut0 (opt1)
gggagagcggcucggccauuuugucccagucaguccggaggcugcggcugcagaaguaccgccugcggaguaacugcaaagaagcuuaccauggagcugcccauccucaagaccaacgccaucaccacgauccuggccgcggugacccugugcuucgccagcucccagaacaucaccgaggaguucuaccagagcacgugcuccgccgucagcaagggcuaccucuccgcccugcgcaccgggugguacaccagcgugaucaccaucgagcuguccaacaucaaggagaacaagugcaacggcaccgacgccaaggugaagcucaucaagcaggagcuggacaaguacaagaacgcggucacggagcugcagcuccugaugcagagcaccccggccgccggcuccgggagcgcgaucgccuccggcaucgccgucugcaaggugcugcaccucgagggcgaggugaacaagaucaagaacgcccugcuguccaccaacaaggccgucgugagccucuccaacggggugagcguccugaccuucaaggugcuggaccucaagaacuacaucgacaagcagcugcugcccauccugaacaagcagagcugcuccaucagcaacaucgagaccgucaucgaguuccagcagaagaacaaccgccuccuggagaucacgcgggaguucagcgugaacgcgggcgugaccacccccgucuccaccuacaugcugacgaacagcgagcuccugucccugaucaacgacaugccgaucaccaacgaccagaagaagcucaugagcaacaacgugcagaucgugcgccagcaguccuacagcaucaugugcaucaucaaggaggagguccuggccuacguggugcagcugccccucuacggggucaucgacacccccugcuggaagcugcacaccagcccccugugcacgaccaacaccaaggagggcuccaacaucugccucacccggacggaccgcgggugguacugcgacaacgccggcagcguguccuucuucccgcaggccgagaccugcaagguccagagcaaccggguguucugcgacaccaugaacucccggacccugcccagcgaggugaaccucugcaacaucgacaucuucaaccccaaguacgacugcaagaucaugacguccaagaccgacgucagcuccagcgugaucaccucccugggcgccaucgugagcugcuacgggaagaccaagugcacggcgagcaacaagaaccgcggcaucaucaagaccuucuccaacgggugcgacuacgucagcaacaagggcguggacaccguguccgucggcaacacccuguacuacgugaacaagcaggagggcaagagccucuacgugaagggggagcccaucaucaacuucuacgacccgcuggucuuccccuccgacgaguucgacgccagcaucucccaggugaacgagaagaucaaccagagccuggccuucauccggaaguccgacgagcuccugcacaacgugaacgucggcaagagcaccacgaacaucaugaucaccaccaucaucaucgugaucaucgugauccugcugcuccugaucgccgucgggcuguuccucuacugcaaggcccgcuccacccccgugacgcugagcaaggaccagcuguccgggaucaacaacaucgcguucagcaacugaggacuagucccuguucccagagcccacuuuuuuuucuuuuuuugaaauaaaauagccugucuuucagaucuaaaaaaaaaaaaaaaaaaaaaaaaaaaaaaaaaaaaaaaaaaaaaaaaaaaaaaaaaaaaaaaaugcaucccccccccccccccccccccccccccccccaaaggcucuuuucagagccaccagaauu

SEQ ID NO: 13324 - RNA, 1897 nt, Artificial Sequence
  mRNA product Design c-5 comprising derived and/or modified sequence from HRSV(Memphis-37)__AIY60640.1__F_DSCav1_mut0 (opt1)
gggagagcggcucggccauuuugucccagucaguccggaggcugcggcugcagaaguaccgccugcggaguaacugcaaagaagcuuaccauggagcugcccauccucaagaccaacgccaucaccacgauccuggccgcggugacccugugcuucgccagcucccagaacaucaccgaggaguucuaccagagcacgugcuccgccgucagcaagggcuaccucuccgcccugcgcaccgggugguacaccagcgugaucaccaucgagcuguccaacaucaaggagaacaagugcaacggcaccgacgccaaggugaagcucaucaagcaggagcuggacaaguacaagaacgcggucacggagcugcagcuccugaugcagagcaccccggccgccggguccggcagcgccaucgcguccgggaucgccgugugcaaggugcugcaccucgagggcgaggucaacaagaucaagaacgcccugcugagcaccaacaaggccguggugucccucagcaacggcgucuccgugcugaccuucaaggugcuggaccucaagaacuacaucgacaagcagcugcugcccauccucaacaagcagagcugcuccaucagcaacaucgagacggucaucgaguuccagcagaagaacaaccggcugcuggagaucacccgcgaguucuccgugaacgccggggugaccacccccgucagcacguacaugcucaccaacagcgagcugcugucccucaucaacgacaugcccaucaccaacgaccagaagaagcugaugagcaacaacgugcagaucgugcggcagcaguccuacagcaucaugugcaucaucaaggaggagguccuggcguacguggugcagcucccgcuguacggcgucaucgacacccccugcuggaagcugcacacgagcccccucugcaccaccaacaccaaggagggguccaacaucugccugacgcgcaccgaccggggcugguacugcgacaacgccggguccgugagcuucuucccccaggccgagaccugcaaggugcaguccaaccgcgucuucugcgacaccaugaacagccggacgcucccguccgaggugaaccugugcaacaucgacaucuucaaccccaaguacgacugcaagaucaugaccagcaagaccgacgucuccagcuccgugaucaccagccugggcgccaucguguccugcuacggcaagacgaagugcaccgccagcaacaagaaccgggggaucaucaagaccuucuccaacggcugcgacuacgucagcaacaaggggguggacaccgugagcgucggcaacacgcucuacuacgugaacaagcaggagggcaagucccuguacgugaagggggagcccaucaucaacuucuacgacccccuggucuucccgagcgacgaguucgacgcguccaucagccaggugaacgagaagaucaaccagucccucgccuucauccgcaagagcgacgagcugcugcacaacgugaacgucggcaaguccaccaccaacaucaugaucaccaccaucaucaucgugaucaucgugauccuccugcugcucaucgccgucgggcuguuccuguacugcaaggcccggagcacgcccgugacccuguccaaggaccagcucagcggcaucaacaacaucgccuucuccaacugaggacuagucccuguucccagagcccacuuuuuuuucuuuuuuugaaauaaaauagccugucuuucagaucuaaaaaaaaaaaaaaaaaaaaaaaaaaaaaaaaaaaaaaaaaaaaaaaaaaaaaaaaaaaaaaaaugcaucccccccccccccccccccccccccccccccaaaggcucuuuucagagccaccagaauu

SEQ ID NO: 13325 - RNA, 1897 nt, Artificial Sequence
  mRNA product Design c-5 comprising derived and/or modified sequence from HRSV(Memphis-37)__AIY60640.1__F_DSCav1_mut0 (opt2)
gggagagcggcucggccauuuugucccagucaguccggaggcugcggcugcagaaguaccgccugcggaguaacugcaaagaagcuuaccauggagcuccccauccucaagaccaacgccaucaccaccauccucgccgccgucacccucugcuucgccuccucccagaacaucaccgaggaguucuaccaguccaccugcuccgccgucuccaagggcuaccucuccgcccuccgcaccggcugguacaccuccgucaucaccaucgagcucuccaacaucaaggagaacaagugcaacggcaccgacgccaaggucaagcucaucaagcaggagcucgacaaguacaagaacgccgucaccgagcuccagcuccucaugcaguccacccccgccgccggcuccggcuccgccaucgccuccggcaucgccgucugcaagguccuccaccucgagggcgaggucaacaagaucaagaacgcccuccucuccaccaacaaggccgucgucucccucuccaacggcgucuccguccucaccuucaagguccucgaccucaagaacuacaucgacaagcagcuccuccccauccucaacaagcaguccugcuccaucuccaacaucgagaccgucaucgaguuccagcagaagaacaaccgccuccucgagaucacccgcgaguucuccgucaacgccggcgucaccacccccgucuccaccuacaugcucaccaacuccgagcuccucucccucaucaacgacaugcccaucaccaacgaccagaagaagcucauguccaacaacguccagaucguccgccagcaguccuacuccaucaugugcaucaucaaggaggagguccucgccuacgucguccagcucccccucuacggcgucaucgacacccccugcuggaagcuccacaccuccccccucugcaccaccaacaccaaggagggcuccaacaucugccucacccgcaccgaccgcggcugguacugcgacaacgccggcuccgucuccuucuucccccaggccgagaccugcaagguccaguccaaccgcgucuucugcgacaccaugaacucccgcacccuccccuccgaggucaaccucugcaacaucgacaucuucaaccccaaguacgacugcaagaucaugaccuccaagaccgacgucuccuccuccgucaucaccucccucggcgccaucgucuccugcuacggcaagaccaagugcaccgccuccaacaagaaccgcggcaucaucaagaccuucuccaacggcugcgacuacgucuccaacaagggcgucgacaccgucuccgucggcaacacccucuacuacgucaacaagcaggagggcaagucccucuacgucaagggcgagcccaucaucaacuucuacgacccccucgucuuccccuccgacgaguucgacgccuccaucucccaggucaacgagaagaucaaccagucccucgccuucauccgcaaguccgacgagcuccuccacaacgucaacgucggcaaguccaccaccaacaucaugaucaccaccaucaucaucgucaucaucgucauccuccuccuccucaucgccgucggccucuuccucuacugcaaggcccgcuccacccccgucacccucuccaaggaccagcucuccggcaucaacaacaucgccuucuccaacugaggacuagucccuguucccagagcccacuuuuuuuucuuuuuuugaaauaaaauagccugucuuucagaucuaaaaaaaaaaaaaaaaaaaaaaaaaaaaaaaaaaaaaaaaaaaaaaaaaaaaaaaaaaaaaaaaugcaucccccccccccccccccccccccccccccccaaaggcucuuuucagagccaccagaauu

SEQ ID NO: 13326 - RNA, 1897 nt, Artificial Sequence
  mRNA product Design c-5 comprising derived and/or modified sequence from HRSV(Memphis-37)__AIY60640.1__F_DSCav1_mut0 (opt3)
gggagagcggcucggccauuuugucccagucaguccggaggcugcggcugcagaaguaccgccugcggaguaacugcaaagaagcuuaccauggagcugcccauccucaagaccaacgccauuacaacuauacuugcugcagugacgcugugcuucgccagcucccagaauaucaccgaagaguuuuaccaaucuacauguucagcggucaguaaaggcuauuugagcgcuuuaagaacugggugguacaccuccguuauuacaaucgaacugucuaacauuaaggagaauaaaugcaacggaaccgacgccaaggugaaacuaaucaagcaggaacucgauaaguauaaaaaugcaguaacugagcugcagcuucugaugcagucgaccccugccgcugguucaggcagcgcaauagccagugggaucgcuguguguaaggucuugcaccucgagggagaagugaacaaaauuaagaaugcccugcuguccacaaacaaagcgguugugucucucagcaauggcgucuccguguuaacguucaagguacuggaccuuaagaacuacaucgauaaacaauugcugccaauucuaaauaagcagucaugcaguaucagcaacauagagacuguuauugaauuucagcagaaaaauaacaggcuccuggagaucacccgggaguucucugugaaugccggugucacaacuccgguguccaccuauaugcuuacaaacucagaacuguugagccucauuaacgacaugcccaucaccaaugaucaaaagaaacugaugaguaacaaugugcagaucguccgccagcagucuuacuccauuauguguauaaucaaggaggaaguuuuagcauaugugguacaacugccucucuacggggugauugacacgccaugcuggaaacuucauacuagcccccuguguacaaccaacacuaaggagggaucgaauaucugcuugacacgaaccgaucguggcugguacugugacaacgcuggcucugucuccuuuuucccucaggccgaaacgugcaaggugcagucaaauagaguguuuugugauaccaugaacaguagaacacugccaagcgaggugaaucucugcaacauagacauuuucaaucccaaauaugauugcaagaucaugacuuccaaaaccgacgucucuagcucagugaucacaagucugggggcaauuguauccuguuacggaaagacuaaaugcaccgcuagcaacaagaauagggguaucauuaagacauuuucuaacggcugugauuauguuucaaauaaagggguggacaccgucagugugggaaacacucuuuacuaugucaacaagcaagagggcaaaagccuguacgugaagggugaaccuauaaucaauuucuaugacccauugguuuuuccguccgaugaguucgacgccucuauuucgcagguuaacgagaaaaucaaucagagccucgcguuuauccggaaguccgaugaacuguuacacaacguaaaugucgggaagucaacgacaaacauuaugauaaccacuaucauuaucgugauuaucguuauacugcuacuccugaucgccgugggacuuuucuuguacugcaaagcacgcaguacccccgucacacugucuaaggaccagcucagcggcauuaauaacaucgcuuucuccaauugaggacuagucccuguucccagagcccacuuuuuuuucuuuuuuugaaauaaaauagccugucuuucagaucuaaaaaaaaaaaaaaaaaaaaaaaaaaaaaaaaaaaaaaaaaaaaaaaaaaaaaaaaaaaaaaaaugcaucccccccccccccccccccccccccccccccaaaggcucuuuucagagccaccagaauu

SEQ ID NO: 13327 - RNA, 1897 nt, Artificial Sequence
  mRNA product Design c-5 comprising derived and/or modified sequence from HRSV(Memphis-37)__AIY60640.1__F_DSCav1_mut0 (opt4)
gggagagcggcucggccauuuugucccagucaguccggaggcugcggcugcagaaguaccgccugcggaguaacugcaaagaagcuuaccauggagcugcccauccugaagaccaacgccaucaccaccauccuggccgccgugacccugugcuucgccagcagccagaacaucaccgaggaguucuaccagagcaccugcagcgccgugagcaagggcuaccugagcgcccugagaaccggcugguacaccagcgugaucaccaucgagcugagcaacaucaaggagaacaagugcaacggcaccgacgccaaggugaagcugaucaagcaggagcuggacaaguacaagaacgccgugaccgagcugcagcugcugaugcagagcacccccgccgccggcagcggcagcgccaucgccagcggcaucgccgugugcaaggugcugcaccuggagggcgaggugaacaagaucaagaacgcccugcugagcaccaacaaggccguggugagccugagcaacggcgugagcgugcugaccuucaaggugcuggaccugaagaacuacaucgacaagcagcugcugcccauccugaacaagcagagcugcagcaucagcaacaucgagaccgugaucgaguuccagcagaagaacaacagacugcuggagaucaccagagaguucagcgugaacgccggcgugaccacccccgugagcaccuacaugcugaccaacagcgagcugcugagccugaucaacgacaugcccaucaccaacgaccagaagaagcugaugagcaacaacgugcagaucgugagacagcagagcuacagcaucaugugcaucaucaaggaggaggugcuggccuacguggugcagcugccccuguacggcgugaucgacacccccugcuggaagcugcacaccagcccccugugcaccaccaacaccaaggagggcagcaacaucugccugaccagaaccgacagaggcugguacugcgacaacgccggcagcgugagcuucuucccccaggccgagaccugcaaggugcagagcaacagaguguucugcgacaccaugaacagcagaacccugcccagcgaggugaaccugugcaacaucgacaucuucaaccccaaguacgacugcaagaucaugaccagcaagaccgacgugagcagcagcgugaucaccagccugggcgccaucgugagcugcuacggcaagaccaagugcaccgccagcaacaagaacagaggcaucaucaagaccuucagcaacggcugcgacuacgugagcaacaagggcguggacaccgugagcgugggcaacacccuguacuacgugaacaagcaggagggcaagagccuguacgugaagggcgagcccaucaucaacuucuacgacccccugguguuccccagcgacgaguucgacgccagcaucagccaggugaacgagaagaucaaccagagccuggccuucaucagaaagagcgacgagcugcugcacaacgugaacgugggcaagagcaccaccaacaucaugaucaccaccaucaucaucgugaucaucgugauccugcugcugcugaucgccgugggccuguuccuguacugcaaggccagaagcacccccgugacccugagcaaggaccagcugagcggcaucaacaacaucgccuucagcaacugaggacuagucccuguucccagagcccacuuuuuuuucuuuuuuugaaauaaaauagccugucuuucagaucuaaaaaaaaaaaaaaaaaaaaaaaaaaaaaaaaaaaaaaaaaaaaaaaaaaaaaaaaaaaaaaaaugcaucccccccccccccccccccccccccccccccaaaggcucuuuucagagccaccagaauu

SEQ ID NO: 13328 - RNA, 1897 nt, Artificial Sequence
  mRNA product Design c-5 comprising derived and/or modified sequence from HRSV(Memphis-37)__AIY60640.1__F_DSCav1_mut0 (opt5)
gggagagcggcucggccauuuugucccagucaguccggaggcugcggcugcagaaguaccgccugcggaguaacugcaaagaagcuuaccauggagcugcccauccucaagaccaacgccauuacaacgauccuggcugccgugacccuuugcuucgcgagcucccagaauauuacagaagaguuuuaccaaucuaccuguagcgcugucuccaaaggcuaucugucugcccucagaacagggugguacaccagcguuaucacaauugaacuguccaacaucaaggagaauaaaugcaacggaaccgacgccaaggugaaacuuaucaagcaggaacuggauaaguauaaaaaugcugugacggagcuccagcugcugaugcagucuaccccugccgcuggcagcggguccgccauugcgagcggaaucgccgucuguaaggugcuccaccuggagggcgaaguuaacaaaauuaagaaugcccuucugucuacaaacaaagcuguggucucccucagcaauggggugucuguucugaccuucaaggugcuugaccugaagaacuacaucgauaaacaacuccugccgauucugaauaagcaguccugcagcaucucuaacauugagacagucaucgaauuucagcagaaaaauaaccggcuccuggagaucacccgcgaguucuccgugaaugcuggagugacgacacccgucagcaccuauaugcuuacaaacuccgaacugcucucucugauuaacgacaugccuaucaccaaugaucaaaagaaacuuaugagcaacaauguucagauugugagacagcaguccuacagcaucauguguauuaucaaggaggaagugcuggccuaugucgugcaacucccccuguacggcguuaucgacaccccuugcuggaaacugcauacaucuccccucuguacgaccaacacaaaggagggcuccaauauuugccugacccggacagaucgcgggugguacugugacaacgcgggaagcgugagcuuuuucccucaggccgaaaccugcaagguccagucuaauagaguguuuugugauacgaugaacuccagaacacugccgucugagguuaaucucugcaacaucgacauuuucaaucccaaauaugauugcaagaucaugaccagcaaaaccgacguguccagcucugucauuacaucccugggcgcuaucgugagcuguuacgggaagaccaaaugcacagccucuaacaagaaucggggaaucauuaagacguuuuccaacggcugugauuaugucagcaauaaagggguggacaccguuuccgugggaaacacacuuuacuaugucaacaagcaagagggcaaaucucuguacgugaagggcgaaccuaucauuaauuucuaugacccccucguuuuuccuagcgaugaguucgacgcuuccaucucucaggugaacgaaaagauuaaucagagccuggccuuuauccgcaaguccgaugagcugcuccacaacgucaauguggggaaaagcaccacaaacauuaugaucaccacgaucauuaucgugauuaucguuauucugcuucugcucaucgccgucggacuguuccuguacugcaaagcuagaucuacccccgugacacuuuccaaggaccagcucagcggcaucaauaacauugcguucucuaauugaggacuagucccuguucccagagcccacuuuuuuuucuuuuuuugaaauaaaauagccugucuuucagaucuaaaaaaaaaaaaaaaaaaaaaaaaaaaaaaaaaaaaaaaaaaaaaaaaaaaaaaaaaaaaaaaaugcaucccccccccccccccccccccccccccccccaaaggcucuuuucagagccaccagaauu

SEQ ID NO: 13329 - RNA, 1897 nt, Artificial Sequence
  mRNA product Design c-5 comprising derived and/or modified sequence from HRSV(Memphis-37)__AIY60640.1__F_DSCav1_mut0 (opt6)
gggagagcggcucggccauuuugucccagucaguccggaggcugcggcugcagaaguaccgccugcggaguaacugcaaagaagcuuaccauggaauuaccaaucuuaaaaacaaacgccauaacaaccauccucgcagcaguaacccuaugcuuugcauccucacaaaacauaacugaagaauuuuaccaaucaacaugcucagcaguaucaaaaggauaucuaucagcccucagaacaggaugguacacaucagucauuacaaucgaacuuucaaacauaaaagaaaauaaauguaacggcacagaugccaaaguaaaauuaauuaaacaagaacuugacaaauacaaaaaugccguaacagaacuacaacuacuaaugcaaaguacuccugcugcaggaagcggaucugcaauagcaucagguauagcaguauguaaaguucuacaccuagaaggcgaaguaaacaaaauuaaaaacgcacuacucucaacaaauaaagcaguugucucccuaucaaacggaguaucaguauuaacuuucaaaguacuagaccucaaaaacuauauagacaaacaacuauuaccaauacuaaacaaacaaagcugcucuaucuccaacaucgaaacaguaauagaauuucaacaaaaaaauaauagacuacuugaaauaaccagagaauuuucaguaaacgccggaguaacaacaccaguaucaacuuacaugcuaacaaacuccgaacuacuaucauuaauaaacgacaugcccauaacaaacgaccaaaaaaaauuaaugucaaacaacguccaaaucguacgacaacaauccuauuccauaauguguauaauaaaagaagaaguacuagcauacguaguacaauuaccauuauauggaguaauagauaccccuugcuggaaacuacacacaucaccccuaugcacuacaaauacgaaagaagguucaaauauaugcuuaacuagaaccgauagagguugguauugugacaacgcuggaucaguaucauuuuucccacaagcagaaacaugcaaaguacaaucaaacagaguauuuugcgacacuaugaacucaagaacuuuaccauccgaaguuaaucuauguaacauagauauauuuaacccaaaauacgacugcaaaauaaugacaucaaaaacagauguaucaucaucaguuauaaccucccucggagcaauaguaucaugcuauggaaaaacaaaaugcacagcaucaaacaaaaaucguggaauuauaaaaacauucucaaacggcugugacuacgucagcaauaaaggaguagacacagucucaguaggaaacacuuuauacuauguuaacaaacaagaaggaaaaucacucuacgucaaaggcgaaccaauaauaaauuucuaugacccacucguauucccauccgacgaauuugacgcaucaauaucacaaguaaaugaaaaaauaaaccaaagccuagcauuuauacgaaaaucagacgaacuacuacacaacguaaacguagguaaaagcacaaccaauauaaugauaacaacaauaaucauaguaauaaucguaauauuacuauuacuaauagcuguaggauuguuccuauacugcaaagcaagaucaacaccaguaaccuuaucuaaggaccaacuaucaggaaucaauaacauugccuucucaaacuaaggacuagucccuguucccagagcccacuuuuuuuucuuuuuuugaaauaaaauagccugucuuucagaucuaaaaaaaaaaaaaaaaaaaaaaaaaaaaaaaaaaaaaaaaaaaaaaaaaaaaaaaaaaaaaaaaugcaucccccccccccccccccccccccccccccccaaaggcucuuuucagagccaccagaauu

SEQ ID NO: 13330 - RNA, 1897 nt, Artificial Sequence
  mRNA product Design c-5 comprising derived and/or modified sequence from HRSV(Memphis-37)__AIY60640.1__F_DSCav1_mut0 (opt11)
gggagagcggcucggccauuuugucccagucaguccggaggcugcggcugcagaaguaccgccugcggaguaacugcaaagaagcuuaccauggaacuaccuauccuuaaaaccaacgcaaucaccaccauccuugccgcagucacacucugcuucgcauccucacagaacaucaccgaagaguucuaucaaucaaccugcuccgccguauccaaaggauaccucucagcccuccgcaccggcugguauaccucagucauaacaaucgaauuaucaaauaucaaggagaacaaaugcaacggcaccgacgccaaagucaaacucauaaaacaagaacuagacaaauacaaaaacgccgugacagaacuccaacuccucaugcaguccacccccgcagccggauccggcucagcaaucgccucgggcauugcaguaugcaaaguccuccaccucgaaggcgaagucaacaaaaucaaaaacgcccuccucuccaccaacaaagccgucgucucccucuccaacggcguaucuguccucacuuucaagguccucgaccucaaaaacuacaucgacaagcaacuacuuccaauccucaacaagcaauccugcucaaucucaaacaucgaaaccguaauagaguuccaacaaaagaacaaccgccuccucgaaaucacccgcgaguucuccguuaacgccggugucacuaccccagucagcaccuacaugcucaccaacuccgaacuccuuucucugaucaacgacaugccaaucaccaacgaucaaaagaaauuaauguccaacaacguccagaucguccgccaacaaagcuacagcaucaugugcaucauaaaagaagaaguacuugcguacguaguucaacuaccccuuuacggcguaaucgacaccccaugcuggaaacuccacaccuccccacuaugcaccaccaacaccaaagaaggauccaacaucugccuaacccgcaccgaccgcggcugguacugcgacaacgcugggagcgucucauucuucccacaagcagaaaccugcaaaguccaaucgaaccgcguauucugcgacaccaugaacuccagaacccuaccaagcgaagucaaucuuugcaacaucgacauauuuaaccccaaauacgacugcaaaaucaugacaucaaagaccgacgucucaucuucagucauuaccucacucggcgcaauugucagcugcuacggaaagaccaaauguaccgccuccaauaaaaaccguggaaucauaaaaaccuuuagcaacggcugcgacuacgucuccaacaaaggagucgacaccgucuccgucggcaacacccucuacuacgucaacaaacaagaaggaaaaucccucuacgugaaaggcgaacccauaauaaacuucuacgacccccuagucuuccccucugacgaguucgacgccuccaucucccaagucaacgaaaagauaaaucaaucacuagccuucauacgcaaaucugacgaacuucuccacaacgucaacgucggcaaauccaccaccaacauaaugaucacaacgauaauaaucgugaucauaguaauccuacuucuccucaucgcaguaggucuauuccuauacugcaaagcccgcagcacccccgucacccuaucaaaagaccaacucuccggcaucaacaacaucgccuucucaaacuaaggacuagucccuguucccagagcccacuuuuuuuucuuuuuuugaaauaaaauagccugucuuucagaucuaaaaaaaaaaaaaaaaaaaaaaaaaaaaaaaaaaaaaaaaaaaaaaaaaaaaaaaaaaaaaaaaugcaucccccccccccccccccccccccccccccccaaaggcucuuuucagagccaccagaauu

SEQ ID NO: 13331 - RNA, 1906 nt, Artificial Sequence
  mRNA product Design d-1 comprising derived and/or modified sequence from HRSV(Memphis-37)__AIY60640.1__F_DSCav1_mut0 (opt1)
gggagacccgugacccggaaguuguacggcuacgcgacuuucccucccacaaacccucgcgcccuuccuuuccuacuugggcccggcagaaagcuuaccauggagcugcccauccucaagaccaacgccaucaccacgauccuggccgcggugacccugugcuucgccagcucccagaacaucaccgaggaguucuaccagagcacgugcuccgccgucagcaagggcuaccucuccgcccugcgcaccgggugguacaccagcgugaucaccaucgagcuguccaacaucaaggagaacaagugcaacggcaccgacgccaaggugaagcucaucaagcaggagcuggacaaguacaagaacgcggucacggagcugcagcuccugaugcagagcaccccggccgccggcuccgggagcgcgaucgccuccggcaucgccgucugcaaggugcugcaccucgagggcgaggugaacaagaucaagaacgcccugcuguccaccaacaaggccgucgugagccucuccaacggggugagcguccugaccuucaaggugcuggaccucaagaacuacaucgacaagcagcugcugcccauccugaacaagcagagcugcuccaucagcaacaucgagaccgucaucgaguuccagcagaagaacaaccgccuccuggagaucacgcgggaguucagcgugaacgcgggcgugaccacccccgucuccaccuacaugcugacgaacagcgagcuccugucccugaucaacgacaugccgaucaccaacgaccagaagaagcucaugagcaacaacgugcagaucgugcgccagcaguccuacagcaucaugugcaucaucaaggaggagguccuggccuacguggugcagcugccccucuacggggucaucgacacccccugcuggaagcugcacaccagcccccugugcacgaccaacaccaaggagggcuccaacaucugccucacccggacggaccgcgggugguacugcgacaacgccggcagcguguccuucuucccgcaggccgagaccugcaagguccagagcaaccggguguucugcgacaccaugaacucccggacccugcccagcgaggugaaccucugcaacaucgacaucuucaaccccaaguacgacugcaagaucaugacguccaagaccgacgucagcuccagcgugaucaccucccugggcgccaucgugagcugcuacgggaagaccaagugcacggcgagcaacaagaaccgcggcaucaucaagaccuucuccaacgggugcgacuacgucagcaacaagggcguggacaccguguccgucggcaacacccuguacuacgugaacaagcaggagggcaagagccucuacgugaagggggagcccaucaucaacuucuacgacccgcuggucuuccccuccgacgaguucgacgccagcaucucccaggugaacgagaagaucaaccagagccuggccuucauccggaaguccgacgagcuccugcacaacgugaacgucggcaagagcaccacgaacaucaugaucaccaccaucaucaucgugaucaucgugauccugcugcuccugaucgccgucgggcuguuccucuacugcaaggcccgcuccacccccgugacgcugagcaaggaccagcuguccgggaucaacaacaucgcguucagcaacugaggacuagucccuguucccagagcccacuuuuuuuucuuuuuuugaaauaaaauagccugucuuucagaucuaaaaaaaaaaaaaaaaaaaaaaaaaaaaaaaaaaaaaaaaaaaaaaaaaaaaaaaaaaaaaaaaugcaucccccccccccccccccccccccccccccccaaaggcucuuuucagagccaccagaauu

SEQ ID NO: 13332 - RNA, 1906 nt, Artificial Sequence
  mRNA product Design d-1 comprising derived and/or modified sequence from HRSV(Memphis-37)__AIY60640.1__F_DSCav1_mut0 (opt1)
gggagacccgugacccggaaguuguacggcuacgcgacuuucccucccacaaacccucgcgcccuuccuuuccuacuugggcccggcagaaagcuuaccauggagcugcccauccucaagaccaacgccaucaccacgauccuggccgcggugacccugugcuucgccagcucccagaacaucaccgaggaguucuaccagagcacgugcuccgccgucagcaagggcuaccucuccgcccugcgcaccgggugguacaccagcgugaucaccaucgagcuguccaacaucaaggagaacaagugcaacggcaccgacgccaaggugaagcucaucaagcaggagcuggacaaguacaagaacgcggucacggagcugcagcuccugaugcagagcaccccggccgccggguccggcagcgccaucgcguccgggaucgccgugugcaaggugcugcaccucgagggcgaggucaacaagaucaagaacgcccugcugagcaccaacaaggccguggugucccucagcaacggcgucuccgugcugaccuucaaggugcuggaccucaagaacuacaucgacaagcagcugcugcccauccucaacaagcagagcugcuccaucagcaacaucgagacggucaucgaguuccagcagaagaacaaccggcugcuggagaucacccgcgaguucuccgugaacgccggggugaccacccccgucagcacguacaugcucaccaacagcgagcugcugucccucaucaacgacaugcccaucaccaacgaccagaagaagcugaugagcaacaacgugcagaucgugcggcagcaguccuacagcaucaugugcaucaucaaggaggagguccuggcguacguggugcagcucccgcuguacggcgucaucgacacccccugcuggaagcugcacacgagcccccucugcaccaccaacaccaaggagggguccaacaucugccugacgcgcaccgaccggggcugguacugcgacaacgccggguccgugagcuucuucccccaggccgagaccugcaaggugcaguccaaccgcgucuucugcgacaccaugaacagccggacgcucccguccgaggugaaccugugcaacaucgacaucuucaaccccaaguacgacugcaagaucaugaccagcaagaccgacgucuccagcuccgugaucaccagccugggcgccaucguguccugcuacggcaagacgaagugcaccgccagcaacaagaaccgggggaucaucaagaccuucuccaacggcugcgacuacgucagcaacaaggggguggacaccgugagcgucggcaacacgcucuacuacgugaacaagcaggagggcaagucccuguacgugaagggggagcccaucaucaacuucuacgacccccuggucuucccgagcgacgaguucgacgcguccaucagccaggugaacgagaagaucaaccagucccucgccuucauccgcaagagcgacgagcugcugcacaacgugaacgucggcaaguccaccaccaacaucaugaucaccaccaucaucaucgugaucaucgugauccuccugcugcucaucgccgucgggcuguuccuguacugcaaggcccggagcacgcccgugacccuguccaaggaccagcucagcggcaucaacaacaucgccuucuccaacugaggacuagucccuguucccagagcccacuuuuuuuucuuuuuuugaaauaaaauagccugucuuucagaucuaaaaaaaaaaaaaaaaaaaaaaaaaaaaaaaaaaaaaaaaaaaaaaaaaaaaaaaaaaaaaaaaugcaucccccccccccccccccccccccccccccccaaaggcucuuuucagagccaccagaauu

SEQ ID NO: 13333 - RNA, 1906 nt, Artificial Sequence
  mRNA product Design d-1 comprising derived and/or modified sequence from HRSV(Memphis-37)__AIY60640.1__F_DSCav1_mut0 (opt2)
gggagacccgugacccggaaguuguacggcuacgcgacuuucccucccacaaacccucgcgcccuuccuuuccuacuugggcccggcagaaagcuuaccauggagcuccccauccucaagaccaacgccaucaccaccauccucgccgccgucacccucugcuucgccuccucccagaacaucaccgaggaguucuaccaguccaccugcuccgccgucuccaagggcuaccucuccgcccuccgcaccggcugguacaccuccgucaucaccaucgagcucuccaacaucaaggagaacaagugcaacggcaccgacgccaaggucaagcucaucaagcaggagcucgacaaguacaagaacgccgucaccgagcuccagcuccucaugcaguccacccccgccgccggcuccggcuccgccaucgccuccggcaucgccgucugcaagguccuccaccucgagggcgaggucaacaagaucaagaacgcccuccucuccaccaacaaggccgucgucucccucuccaacggcgucuccguccucaccuucaagguccucgaccucaagaacuacaucgacaagcagcuccuccccauccucaacaagcaguccugcuccaucuccaacaucgagaccgucaucgaguuccagcagaagaacaaccgccuccucgagaucacccgcgaguucuccgucaacgccggcgucaccacccccgucuccaccuacaugcucaccaacuccgagcuccucucccucaucaacgacaugcccaucaccaacgaccagaagaagcucauguccaacaacguccagaucguccgccagcaguccuacuccaucaugugcaucaucaaggaggagguccucgccuacgucguccagcucccccucuacggcgucaucgacacccccugcuggaagcuccacaccuccccccucugcaccaccaacaccaaggagggcuccaacaucugccucacccgcaccgaccgcggcugguacugcgacaacgccggcuccgucuccuucuucccccaggccgagaccugcaagguccaguccaaccgcgucuucugcgacaccaugaacucccgcacccuccccuccgaggucaaccucugcaacaucgacaucuucaaccccaaguacgacugcaagaucaugaccuccaagaccgacgucuccuccuccgucaucaccucccucggcgccaucgucuccugcuacggcaagaccaagugcaccgccuccaacaagaaccgcggcaucaucaagaccuucuccaacggcugcgacuacgucuccaacaagggcgucgacaccgucuccgucggcaacacccucuacuacgucaacaagcaggagggcaagucccucuacgucaagggcgagcccaucaucaacuucuacgacccccucgucuuccccuccgacgaguucgacgccuccaucucccaggucaacgagaagaucaaccagucccucgccuucauccgcaaguccgacgagcuccuccacaacgucaacgucggcaaguccaccaccaacaucaugaucaccaccaucaucaucgucaucaucgucauccuccuccuccucaucgccgucggccucuuccucuacugcaaggcccgcuccacccccgucacccucuccaaggaccagcucuccggcaucaacaacaucgccuucuccaacugaggacuagucccuguucccagagcccacuuuuuuuucuuuuuuugaaauaaaauagccugucuuucagaucuaaaaaaaaaaaaaaaaaaaaaaaaaaaaaaaaaaaaaaaaaaaaaaaaaaaaaaaaaaaaaaaaugcaucccccccccccccccccccccccccccccccaaaggcucuuuucagagccaccagaauu

SEQ ID NO: 13334 - RNA, 1906 nt, Artificial Sequence
  mRNA product Design d-1 comprising derived and/or modified sequence from HRSV(Memphis-37)__AIY60640.1__F_DSCav1_mut0 (opt3)
gggagacccgugacccggaaguuguacggcuacgcgacuuucccucccacaaacccucgcgcccuuccuuuccuacuugggcccggcagaaagcuuaccauggagcugcccauccucaagaccaacgccauuacaacuauacuugcugcagugacgcugugcuucgccagcucccagaauaucaccgaagaguuuuaccaaucuacauguucagcggucaguaaaggcuauuugagcgcuuuaagaacugggugguacaccuccguuauuacaaucgaacugucuaacauuaaggagaauaaaugcaacggaaccgacgccaaggugaaacuaaucaagcaggaacucgauaaguauaaaaaugcaguaacugagcugcagcuucugaugcagucgaccccugccgcugguucaggcagcgcaauagccagugggaucgcuguguguaaggucuugcaccucgagggagaagugaacaaaauuaagaaugcccugcuguccacaaacaaagcgguugugucucucagcaauggcgucuccguguuaacguucaagguacuggaccuuaagaacuacaucgauaaacaauugcugccaauucuaaauaagcagucaugcaguaucagcaacauagagacuguuauugaauuucagcagaaaaauaacaggcuccuggagaucacccgggaguucucugugaaugccggugucacaacuccgguguccaccuauaugcuuacaaacucagaacuguugagccucauuaacgacaugcccaucaccaaugaucaaaagaaacugaugaguaacaaugugcagaucguccgccagcagucuuacuccauuauguguauaaucaaggaggaaguuuuagcauaugugguacaacugccucucuacggggugauugacacgccaugcuggaaacuucauacuagcccccuguguacaaccaacacuaaggagggaucgaauaucugcuugacacgaaccgaucguggcugguacugugacaacgcuggcucugucuccuuuuucccucaggccgaaacgugcaaggugcagucaaauagaguguuuugugauaccaugaacaguagaacacugccaagcgaggugaaucucugcaacauagacauuuucaaucccaaauaugauugcaagaucaugacuuccaaaaccgacgucucuagcucagugaucacaagucugggggcaauuguauccuguuacggaaagacuaaaugcaccgcuagcaacaagaauagggguaucauuaagacauuuucuaacggcugugauuauguuucaaauaaagggguggacaccgucagugugggaaacacucuuuacuaugucaacaagcaagagggcaaaagccuguacgugaagggugaaccuauaaucaauuucuaugacccauugguuuuuccguccgaugaguucgacgccucuauuucgcagguuaacgagaaaaucaaucagagccucgcguuuauccggaaguccgaugaacuguuacacaacguaaaugucgggaagucaacgacaaacauuaugauaaccacuaucauuaucgugauuaucguuauacugcuacuccugaucgccgugggacuuuucuuguacugcaaagcacgcaguacccccgucacacugucuaaggaccagcucagcggcauuaauaacaucgcuuucuccaauugaggacuagucccuguucccagagcccacuuuuuuuucuuuuuuugaaauaaaauagccugucuuucagaucuaaaaaaaaaaaaaaaaaaaaaaaaaaaaaaaaaaaaaaaaaaaaaaaaaaaaaaaaaaaaaaaaugcaucccccccccccccccccccccccccccccccaaaggcucuuuucagagccaccagaauu

SEQ ID NO: 13335 - RNA, 1906 nt, Artificial Sequence
  mRNA product Design d-1 comprising derived and/or modified sequence from HRSV(Memphis-37)__AIY60640.1__F_DSCav1_mut0 (opt4)
gggagacccgugacccggaaguuguacggcuacgcgacuuucccucccacaaacccucgcgcccuuccuuuccuacuugggcccggcagaaagcuuaccauggagcugcccauccugaagaccaacgccaucaccaccauccuggccgccgugacccugugcuucgccagcagccagaacaucaccgaggaguucuaccagagcaccugcagcgccgugagcaagggcuaccugagcgcccugagaaccggcugguacaccagcgugaucaccaucgagcugagcaacaucaaggagaacaagugcaacggcaccgacgccaaggugaagcugaucaagcaggagcuggacaaguacaagaacgccgugaccgagcugcagcugcugaugcagagcacccccgccgccggcagcggcagcgccaucgccagcggcaucgccgugugcaaggugcugcaccuggagggcgaggugaacaagaucaagaacgcccugcugagcaccaacaaggccguggugagccugagcaacggcgugagcgugcugaccuucaaggugcuggaccugaagaacuacaucgacaagcagcugcugcccauccugaacaagcagagcugcagcaucagcaacaucgagaccgugaucgaguuccagcagaagaacaacagacugcuggagaucaccagagaguucagcgugaacgccggcgugaccacccccgugagcaccuacaugcugaccaacagcgagcugcugagccugaucaacgacaugcccaucaccaacgaccagaagaagcugaugagcaacaacgugcagaucgugagacagcagagcuacagcaucaugugcaucaucaaggaggaggugcuggccuacguggugcagcugccccuguacggcgugaucgacacccccugcuggaagcugcacaccagcccccugugcaccaccaacaccaaggagggcagcaacaucugccugaccagaaccgacagaggcugguacugcgacaacgccggcagcgugagcuucuucccccaggccgagaccugcaaggugcagagcaacagaguguucugcgacaccaugaacagcagaacccugcccagcgaggugaaccugugcaacaucgacaucuucaaccccaaguacgacugcaagaucaugaccagcaagaccgacgugagcagcagcgugaucaccagccugggcgccaucgugagcugcuacggcaagaccaagugcaccgccagcaacaagaacagaggcaucaucaagaccuucagcaacggcugcgacuacgugagcaacaagggcguggacaccgugagcgugggcaacacccuguacuacgugaacaagcaggagggcaagagccuguacgugaagggcgagcccaucaucaacuucuacgacccccugguguuccccagcgacgaguucgacgccagcaucagccaggugaacgagaagaucaaccagagccuggccuucaucagaaagagcgacgagcugcugcacaacgugaacgugggcaagagcaccaccaacaucaugaucaccaccaucaucaucgugaucaucgugauccugcugcugcugaucgccgugggccuguuccuguacugcaaggccagaagcacccccgugacccugagcaaggaccagcugagcggcaucaacaacaucgccuucagcaacugaggacuagucccuguucccagagcccacuuuuuuuucuuuuuuugaaauaaaauagccugucuuucagaucuaaaaaaaaaaaaaaaaaaaaaaaaaaaaaaaaaaaaaaaaaaaaaaaaaaaaaaaaaaaaaaaaugcaucccccccccccccccccccccccccccccccaaaggcucuuuucagagccaccagaauu

SEQ ID NO: 13336 - RNA, 1906 nt, Artificial Sequence
  mRNA product Design d-1 comprising derived and/or modified sequence from HRSV(Memphis-37)__AIY60640.1__F_DSCav1_mut0 (opt5)
gggagacccgugacccggaaguuguacggcuacgcgacuuucccucccacaaacccucgcgcccuuccuuuccuacuugggcccggcagaaagcuuaccauggagcugcccauccucaagaccaacgccauuacaacgauccuggcugccgugacccuuugcuucgcgagcucccagaauauuacagaagaguuuuaccaaucuaccuguagcgcugucuccaaaggcuaucugucugcccucagaacagggugguacaccagcguuaucacaauugaacuguccaacaucaaggagaauaaaugcaacggaaccgacgccaaggugaaacuuaucaagcaggaacuggauaaguauaaaaaugcugugacggagcuccagcugcugaugcagucuaccccugccgcuggcagcggguccgccauugcgagcggaaucgccgucuguaaggugcuccaccuggagggcgaaguuaacaaaauuaagaaugcccuucugucuacaaacaaagcuguggucucccucagcaauggggugucuguucugaccuucaaggugcuugaccugaagaacuacaucgauaaacaacuccugccgauucugaauaagcaguccugcagcaucucuaacauugagacagucaucgaauuucagcagaaaaauaaccggcuccuggagaucacccgcgaguucuccgugaaugcuggagugacgacacccgucagcaccuauaugcuuacaaacuccgaacugcucucucugauuaacgacaugccuaucaccaaugaucaaaagaaacuuaugagcaacaauguucagauugugagacagcaguccuacagcaucauguguauuaucaaggaggaagugcuggccuaugucgugcaacucccccuguacggcguuaucgacaccccuugcuggaaacugcauacaucuccccucuguacgaccaacacaaaggagggcuccaauauuugccugacccggacagaucgcgggugguacugugacaacgcgggaagcgugagcuuuuucccucaggccgaaaccugcaagguccagucuaauagaguguuuugugauacgaugaacuccagaacacugccgucugagguuaaucucugcaacaucgacauuuucaaucccaaauaugauugcaagaucaugaccagcaaaaccgacguguccagcucugucauuacaucccugggcgcuaucgugagcuguuacgggaagaccaaaugcacagccucuaacaagaaucggggaaucauuaagacguuuuccaacggcugugauuaugucagcaauaaagggguggacaccguuuccgugggaaacacacuuuacuaugucaacaagcaagagggcaaaucucuguacgugaagggcgaaccuaucauuaauuucuaugacccccucguuuuuccuagcgaugaguucgacgcuuccaucucucaggugaacgaaaagauuaaucagagccuggccuuuauccgcaaguccgaugagcugcuccacaacgucaauguggggaaaagcaccacaaacauuaugaucaccacgaucauuaucgugauuaucguuauucugcuucugcucaucgccgucggacuguuccuguacugcaaagcuagaucuacccccgugacacuuuccaaggaccagcucagcggcaucaauaacauugcguucucuaauugaggacuagucccuguucccagagcccacuuuuuuuucuuuuuuugaaauaaaauagccugucuuucagaucuaaaaaaaaaaaaaaaaaaaaaaaaaaaaaaaaaaaaaaaaaaaaaaaaaaaaaaaaaaaaaaaaugcaucccccccccccccccccccccccccccccccaaaggcucuuuucagagccaccagaauu

SEQ ID NO: 13337 - RNA, 1906 nt, Artificial Sequence
  mRNA product Design d-1 comprising derived and/or modified sequence from HRSV(Memphis-37)__AIY60640.1__F_DSCav1_mut0 (opt6)
gggagacccgugacccggaaguuguacggcuacgcgacuuucccucccacaaacccucgcgcccuuccuuuccuacuugggcccggcagaaagcuuaccauggaauuaccaaucuuaaaaacaaacgccauaacaaccauccucgcagcaguaacccuaugcuuugcauccucacaaaacauaacugaagaauuuuaccaaucaacaugcucagcaguaucaaaaggauaucuaucagcccucagaacaggaugguacacaucagucauuacaaucgaacuuucaaacauaaaagaaaauaaauguaacggcacagaugccaaaguaaaauuaauuaaacaagaacuugacaaauacaaaaaugccguaacagaacuacaacuacuaaugcaaaguacuccugcugcaggaagcggaucugcaauagcaucagguauagcaguauguaaaguucuacaccuagaaggcgaaguaaacaaaauuaaaaacgcacuacucucaacaaauaaagcaguugucucccuaucaaacggaguaucaguauuaacuuucaaaguacuagaccucaaaaacuauauagacaaacaacuauuaccaauacuaaacaaacaaagcugcucuaucuccaacaucgaaacaguaauagaauuucaacaaaaaaauaauagacuacuugaaauaaccagagaauuuucaguaaacgccggaguaacaacaccaguaucaacuuacaugcuaacaaacuccgaacuacuaucauuaauaaacgacaugcccauaacaaacgaccaaaaaaaauuaaugucaaacaacguccaaaucguacgacaacaauccuauuccauaauguguauaauaaaagaagaaguacuagcauacguaguacaauuaccauuauauggaguaauagauaccccuugcuggaaacuacacacaucaccccuaugcacuacaaauacgaaagaagguucaaauauaugcuuaacuagaaccgauagagguugguauugugacaacgcuggaucaguaucauuuuucccacaagcagaaacaugcaaaguacaaucaaacagaguauuuugcgacacuaugaacucaagaacuuuaccauccgaaguuaaucuauguaacauagauauauuuaacccaaaauacgacugcaaaauaaugacaucaaaaacagauguaucaucaucaguuauaaccucccucggagcaauaguaucaugcuauggaaaaacaaaaugcacagcaucaaacaaaaaucguggaauuauaaaaacauucucaaacggcugugacuacgucagcaauaaaggaguagacacagucucaguaggaaacacuuuauacuauguuaacaaacaagaaggaaaaucacucuacgucaaaggcgaaccaauaauaaauuucuaugacccacucguauucccauccgacgaauuugacgcaucaauaucacaaguaaaugaaaaaauaaaccaaagccuagcauuuauacgaaaaucagacgaacuacuacacaacguaaacguagguaaaagcacaaccaauauaaugauaacaacaauaaucauaguaauaaucguaauauuacuauuacuaauagcuguaggauuguuccuauacugcaaagcaagaucaacaccaguaaccuuaucuaaggaccaacuaucaggaaucaauaacauugccuucucaaacuaaggacuagucccuguucccagagcccacuuuuuuuucuuuuuuugaaauaaaauagccugucuuucagaucuaaaaaaaaaaaaaaaaaaaaaaaaaaaaaaaaaaaaaaaaaaaaaaaaaaaaaaaaaaaaaaaaugcaucccccccccccccccccccccccccccccccaaaggcucuuuucagagccaccagaauu

SEQ ID NO: 13338 - RNA, 1906 nt, Artificial Sequence
  mRNA product Design d-1 comprising derived and/or modified sequence from HRSV(Memphis-37)__AIY60640.1__F_DSCav1_mut0 (opt11)
gggagacccgugacccggaaguuguacggcuacgcgacuuucccucccacaaacccucgcgcccuuccuuuccuacuugggcccggcagaaagcuuaccauggaacuaccuauccuuaaaaccaacgcaaucaccaccauccuugccgcagucacacucugcuucgcauccucacagaacaucaccgaagaguucuaucaaucaaccugcuccgccguauccaaaggauaccucucagcccuccgcaccggcugguauaccucagucauaacaaucgaauuaucaaauaucaaggagaacaaaugcaacggcaccgacgccaaagucaaacucauaaaacaagaacuagacaaauacaaaaacgccgugacagaacuccaacuccucaugcaguccacccccgcagccggauccggcucagcaaucgccucgggcauugcaguaugcaaaguccuccaccucgaaggcgaagucaacaaaaucaaaaacgcccuccucuccaccaacaaagccgucgucucccucuccaacggcguaucuguccucacuuucaagguccucgaccucaaaaacuacaucgacaagcaacuacuuccaauccucaacaagcaauccugcucaaucucaaacaucgaaaccguaauagaguuccaacaaaagaacaaccgccuccucgaaaucacccgcgaguucuccguuaacgccggugucacuaccccagucagcaccuacaugcucaccaacuccgaacuccuuucucugaucaacgacaugccaaucaccaacgaucaaaagaaauuaauguccaacaacguccagaucguccgccaacaaagcuacagcaucaugugcaucauaaaagaagaaguacuugcguacguaguucaacuaccccuuuacggcguaaucgacaccccaugcuggaaacuccacaccuccccacuaugcaccaccaacaccaaagaaggauccaacaucugccuaacccgcaccgaccgcggcugguacugcgacaacgcugggagcgucucauucuucccacaagcagaaaccugcaaaguccaaucgaaccgcguauucugcgacaccaugaacuccagaacccuaccaagcgaagucaaucuuugcaacaucgacauauuuaaccccaaauacgacugcaaaaucaugacaucaaagaccgacgucucaucuucagucauuaccucacucggcgcaauugucagcugcuacggaaagaccaaauguaccgccuccaauaaaaaccguggaaucauaaaaaccuuuagcaacggcugcgacuacgucuccaacaaaggagucgacaccgucuccgucggcaacacccucuacuacgucaacaaacaagaaggaaaaucccucuacgugaaaggcgaacccauaauaaacuucuacgacccccuagucuuccccucugacgaguucgacgccuccaucucccaagucaacgaaaagauaaaucaaucacuagccuucauacgcaaaucugacgaacuucuccacaacgucaacgucggcaaauccaccaccaacauaaugaucacaacgauaauaaucgugaucauaguaauccuacuucuccucaucgcaguaggucuauuccuauacugcaaagcccgcagcacccccgucacccuaucaaaagaccaacucuccggcaucaacaacaucgccuucucaaacuaaggacuagucccuguucccagagcccacuuuuuuuucuuuuuuugaaauaaaauagccugucuuucagaucuaaaaaaaaaaaaaaaaaaaaaaaaaaaaaaaaaaaaaaaaaaaaaaaaaaaaaaaaaaaaaaaaugcaucccccccccccccccccccccccccccccccaaaggcucuuuucagagccaccagaauu

SEQ ID NO: 13339 - RNA, 1961 nt, Artificial Sequence
  mRNA product Design d-2 comprising derived and/or modified sequence from HRSV(Memphis-37)__AIY60640.1__F_DSCav1_mut0 (opt1)
gggagagcggcucggccauuuugucccagucaguccggaggcugcggcugcagaaguaccgccugcggaguaacugcaaagaagcuuaccauggagcugcccauccucaagaccaacgccaucaccacgauccuggccgcggugacccugugcuucgccagcucccagaacaucaccgaggaguucuaccagagcacgugcuccgccgucagcaagggcuaccucuccgcccugcgcaccgggugguacaccagcgugaucaccaucgagcuguccaacaucaaggagaacaagugcaacggcaccgacgccaaggugaagcucaucaagcaggagcuggacaaguacaagaacgcggucacggagcugcagcuccugaugcagagcaccccggccgccggcuccgggagcgcgaucgccuccggcaucgccgucugcaaggugcugcaccucgagggcgaggugaacaagaucaagaacgcccugcuguccaccaacaaggccgucgugagccucuccaacggggugagcguccugaccuucaaggugcuggaccucaagaacuacaucgacaagcagcugcugcccauccugaacaagcagagcugcuccaucagcaacaucgagaccgucaucgaguuccagcagaagaacaaccgccuccuggagaucacgcgggaguucagcgugaacgcgggcgugaccacccccgucuccaccuacaugcugacgaacagcgagcuccugucccugaucaacgacaugccgaucaccaacgaccagaagaagcucaugagcaacaacgugcagaucgugcgccagcaguccuacagcaucaugugcaucaucaaggaggagguccuggccuacguggugcagcugccccucuacggggucaucgacacccccugcuggaagcugcacaccagcccccugugcacgaccaacaccaaggagggcuccaacaucugccucacccggacggaccgcgggugguacugcgacaacgccggcagcguguccuucuucccgcaggccgagaccugcaagguccagagcaaccggguguucugcgacaccaugaacucccggacccugcccagcgaggugaaccucugcaacaucgacaucuucaaccccaaguacgacugcaagaucaugacguccaagaccgacgucagcuccagcgugaucaccucccugggcgccaucgugagcugcuacgggaagaccaagugcacggcgagcaacaagaaccgcggcaucaucaagaccuucuccaacgggugcgacuacgucagcaacaagggcguggacaccguguccgucggcaacacccuguacuacgugaacaagcaggagggcaagagccucuacgugaagggggagcccaucaucaacuucuacgacccgcuggucuuccccuccgacgaguucgacgccagcaucucccaggugaacgagaagaucaaccagagccuggccuucauccggaaguccgacgagcuccugcacaacgugaacgucggcaagagcaccacgaacaucaugaucaccaccaucaucaucgugaucaucgugauccugcugcuccugaucgccgucgggcuguuccucuacugcaaggcccgcuccacccccgugacgcugagcaaggaccagcuguccgggaucaacaacaucgcguucagcaacugaggacuaguaauaaggaaacuguaugaaugucugugggcaggaagugaagagauccuucuguaaagguuuuuggaauuaugucugcugaauaauaaacuuuuuugaaauaauaaaucugguagaaaaaugagaucuaaaaaaaaaaaaaaaaaaaaaaaaaaaaaaaaaaaaaaaaaaaaaaaaaaaaaaaaaaaaaaaaugcaucccccccccccccccccccccccccccccccaaaggcucuuuucagagccaccagaauu

SEQ ID NO: 13340 - RNA, 1961 nt, Artificial Sequence
  mRNA product Design d-2 comprising derived and/or modified sequence from HRSV(Memphis-37)__AIY60640.1__F_DSCav1_mut0 (opt1)
gggagagcggcucggccauuuugucccagucaguccggaggcugcggcugcagaaguaccgccugcggaguaacugcaaagaagcuuaccauggagcugcccauccucaagaccaacgccaucaccacgauccuggccgcggugacccugugcuucgccagcucccagaacaucaccgaggaguucuaccagagcacgugcuccgccgucagcaagggcuaccucuccgcccugcgcaccgggugguacaccagcgugaucaccaucgagcuguccaacaucaaggagaacaagugcaacggcaccgacgccaaggugaagcucaucaagcaggagcuggacaaguacaagaacgcggucacggagcugcagcuccugaugcagagcaccccggccgccggguccggcagcgccaucgcguccgggaucgccgugugcaaggugcugcaccucgagggcgaggucaacaagaucaagaacgcccugcugagcaccaacaaggccguggugucccucagcaacggcgucuccgugcugaccuucaaggugcuggaccucaagaacuacaucgacaagcagcugcugcccauccucaacaagcagagcugcuccaucagcaacaucgagacggucaucgaguuccagcagaagaacaaccggcugcuggagaucacccgcgaguucuccgugaacgccggggugaccacccccgucagcacguacaugcucaccaacagcgagcugcugucccucaucaacgacaugcccaucaccaacgaccagaagaagcugaugagcaacaacgugcagaucgugcggcagcaguccuacagcaucaugugcaucaucaaggaggagguccuggcguacguggugcagcucccgcuguacggcgucaucgacacccccugcuggaagcugcacacgagcccccucugcaccaccaacaccaaggagggguccaacaucugccugacgcgcaccgaccggggcugguacugcgacaacgccggguccgugagcuucuucccccaggccgagaccugcaaggugcaguccaaccgcgucuucugcgacaccaugaacagccggacgcucccguccgaggugaaccugugcaacaucgacaucuucaaccccaaguacgacugcaagaucaugaccagcaagaccgacgucuccagcuccgugaucaccagccugggcgccaucguguccugcuacggcaagacgaagugcaccgccagcaacaagaaccgggggaucaucaagaccuucuccaacggcugcgacuacgucagcaacaaggggguggacaccgugagcgucggcaacacgcucuacuacgugaacaagcaggagggcaagucccuguacgugaagggggagcccaucaucaacuucuacgacccccuggucuucccgagcgacgaguucgacgcguccaucagccaggugaacgagaagaucaaccagucccucgccuucauccgcaagagcgacgagcugcugcacaacgugaacgucggcaaguccaccaccaacaucaugaucaccaccaucaucaucgugaucaucgugauccuccugcugcucaucgccgucgggcuguuccuguacugcaaggcccggagcacgcccgugacccuguccaaggaccagcucagcggcaucaacaacaucgccuucuccaacugaggacuaguaauaaggaaacuguaugaaugucugugggcaggaagugaagagauccuucuguaaagguuuuuggaauuaugucugcugaauaauaaacuuuuuugaaauaauaaaucugguagaaaaaugagaucuaaaaaaaaaaaaaaaaaaaaaaaaaaaaaaaaaaaaaaaaaaaaaaaaaaaaaaaaaaaaaaaaugcaucccccccccccccccccccccccccccccccaaaggcucuuuucagagccaccagaauu

SEQ ID NO: 13341 - RNA, 1961 nt, Artificial Sequence
  mRNA product Design d-2 comprising derived and/or modified sequence from HRSV(Memphis-37)__AIY60640.1__F_DSCav1_mut0 (opt2)
gggagagcggcucggccauuuugucccagucaguccggaggcugcggcugcagaaguaccgccugcggaguaacugcaaagaagcuuaccauggagcuccccauccucaagaccaacgccaucaccaccauccucgccgccgucacccucugcuucgccuccucccagaacaucaccgaggaguucuaccaguccaccugcuccgccgucuccaagggcuaccucuccgcccuccgcaccggcugguacaccuccgucaucaccaucgagcucuccaacaucaaggagaacaagugcaacggcaccgacgccaaggucaagcucaucaagcaggagcucgacaaguacaagaacgccgucaccgagcuccagcuccucaugcaguccacccccgccgccggcuccggcuccgccaucgccuccggcaucgccgucugcaagguccuccaccucgagggcgaggucaacaagaucaagaacgcccuccucuccaccaacaaggccgucgucucccucuccaacggcgucuccguccucaccuucaagguccucgaccucaagaacuacaucgacaagcagcuccuccccauccucaacaagcaguccugcuccaucuccaacaucgagaccgucaucgaguuccagcagaagaacaaccgccuccucgagaucacccgcgaguucuccgucaacgccggcgucaccacccccgucuccaccuacaugcucaccaacuccgagcuccucucccucaucaacgacaugcccaucaccaacgaccagaagaagcucauguccaacaacguccagaucguccgccagcaguccuacuccaucaugugcaucaucaaggaggagguccucgccuacgucguccagcucccccucuacggcgucaucgacacccccugcuggaagcuccacaccuccccccucugcaccaccaacaccaaggagggcuccaacaucugccucacccgcaccgaccgcggcugguacugcgacaacgccggcuccgucuccuucuucccccaggccgagaccugcaagguccaguccaaccgcgucuucugcgacaccaugaacucccgcacccuccccuccgaggucaaccucugcaacaucgacaucuucaaccccaaguacgacugcaagaucaugaccuccaagaccgacgucuccuccuccgucaucaccucccucggcgccaucgucuccugcuacggcaagaccaagugcaccgccuccaacaagaaccgcggcaucaucaagaccuucuccaacggcugcgacuacgucuccaacaagggcgucgacaccgucuccgucggcaacacccucuacuacgucaacaagcaggagggcaagucccucuacgucaagggcgagcccaucaucaacuucuacgacccccucgucuuccccuccgacgaguucgacgccuccaucucccaggucaacgagaagaucaaccagucccucgccuucauccgcaaguccgacgagcuccuccacaacgucaacgucggcaaguccaccaccaacaucaugaucaccaccaucaucaucgucaucaucgucauccuccuccuccucaucgccgucggccucuuccucuacugcaaggcccgcuccacccccgucacccucuccaaggaccagcucuccggcaucaacaacaucgccuucuccaacugaggacuaguaauaaggaaacuguaugaaugucugugggcaggaagugaagagauccuucuguaaagguuuuuggaauuaugucugcugaauaauaaacuuuuuugaaauaauaaaucugguagaaaaaugagaucuaaaaaaaaaaaaaaaaaaaaaaaaaaaaaaaaaaaaaaaaaaaaaaaaaaaaaaaaaaaaaaaaugcaucccccccccccccccccccccccccccccccaaaggcucuuuucagagccaccagaauu

SEQ ID NO: 13342 - RNA, 1961 nt, Artificial Sequence
  mRNA product Design d-2 comprising derived and/or modified sequence from HRSV(Memphis-37)__AIY60640.1__F_DSCav1_mut0 (opt3)
gggagagcggcucggccauuuugucccagucaguccggaggcugcggcugcagaaguaccgccugcggaguaacugcaaagaagcuuaccauggagcugcccauccucaagaccaacgccauuacaacuauacuugcugcagugacgcugugcuucgccagcucccagaauaucaccgaagaguuuuaccaaucuacauguucagcggucaguaaaggcuauuugagcgcuuuaagaacugggugguacaccuccguuauuacaaucgaacugucuaacauuaaggagaauaaaugcaacggaaccgacgccaaggugaaacuaaucaagcaggaacucgauaaguauaaaaaugcaguaacugagcugcagcuucugaugcagucgaccccugccgcugguucaggcagcgcaauagccagugggaucgcuguguguaaggucuugcaccucgagggagaagugaacaaaauuaagaaugcccugcuguccacaaacaaagcgguugugucucucagcaauggcgucuccguguuaacguucaagguacuggaccuuaagaacuacaucgauaaacaauugcugccaauucuaaauaagcagucaugcaguaucagcaacauagagacuguuauugaauuucagcagaaaaauaacaggcuccuggagaucacccgggaguucucugugaaugccggugucacaacuccgguguccaccuauaugcuuacaaacucagaacuguugagccucauuaacgacaugcccaucaccaaugaucaaaagaaacugaugaguaacaaugugcagaucguccgccagcagucuuacuccauuauguguauaaucaaggaggaaguuuuagcauaugugguacaacugccucucuacggggugauugacacgccaugcuggaaacuucauacuagcccccuguguacaaccaacacuaaggagggaucgaauaucugcuugacacgaaccgaucguggcugguacugugacaacgcuggcucugucuccuuuuucccucaggccgaaacgugcaaggugcagucaaauagaguguuuugugauaccaugaacaguagaacacugccaagcgaggugaaucucugcaacauagacauuuucaaucccaaauaugauugcaagaucaugacuuccaaaaccgacgucucuagcucagugaucacaagucugggggcaauuguauccuguuacggaaagacuaaaugcaccgcuagcaacaagaauagggguaucauuaagacauuuucuaacggcugugauuauguuucaaauaaagggguggacaccgucagugugggaaacacucuuuacuaugucaacaagcaagagggcaaaagccuguacgugaagggugaaccuauaaucaauuucuaugacccauugguuuuuccguccgaugaguucgacgccucuauuucgcagguuaacgagaaaaucaaucagagccucgcguuuauccggaaguccgaugaacuguuacacaacguaaaugucgggaagucaacgacaaacauuaugauaaccacuaucauuaucgugauuaucguuauacugcuacuccugaucgccgugggacuuuucuuguacugcaaagcacgcaguacccccgucacacugucuaaggaccagcucagcggcauuaauaacaucgcuuucuccaauugaggacuaguaauaaggaaacuguaugaaugucugugggcaggaagugaagagauccuucuguaaagguuuuuggaauuaugucugcugaauaauaaacuuuuuugaaauaauaaaucugguagaaaaaugagaucuaaaaaaaaaaaaaaaaaaaaaaaaaaaaaaaaaaaaaaaaaaaaaaaaaaaaaaaaaaaaaaaaugcaucccccccccccccccccccccccccccccccaaaggcucuuuucagagccaccagaauu

SEQ ID NO: 13343 - RNA, 1961 nt, Artificial Sequence
  mRNA product Design d-2 comprising derived and/or modified sequence from HRSV(Memphis-37)__AIY60640.1__F_DSCav1_mut0 (opt4)
gggagagcggcucggccauuuugucccagucaguccggaggcugcggcugcagaaguaccgccugcggaguaacugcaaagaagcuuaccauggagcugcccauccugaagaccaacgccaucaccaccauccuggccgccgugacccugugcuucgccagcagccagaacaucaccgaggaguucuaccagagcaccugcagcgccgugagcaagggcuaccugagcgcccugagaaccggcugguacaccagcgugaucaccaucgagcugagcaacaucaaggagaacaagugcaacggcaccgacgccaaggugaagcugaucaagcaggagcuggacaaguacaagaacgccgugaccgagcugcagcugcugaugcagagcacccccgccgccggcagcggcagcgccaucgccagcggcaucgccgugugcaaggugcugcaccuggagggcgaggugaacaagaucaagaacgcccugcugagcaccaacaaggccguggugagccugagcaacggcgugagcgugcugaccuucaaggugcuggaccugaagaacuacaucgacaagcagcugcugcccauccugaacaagcagagcugcagcaucagcaacaucgagaccgugaucgaguuccagcagaagaacaacagacugcuggagaucaccagagaguucagcgugaacgccggcgugaccacccccgugagcaccuacaugcugaccaacagcgagcugcugagccugaucaacgacaugcccaucaccaacgaccagaagaagcugaugagcaacaacgugcagaucgugagacagcagagcuacagcaucaugugcaucaucaaggaggaggugcuggccuacguggugcagcugccccuguacggcgugaucgacacccccugcuggaagcugcacaccagcccccugugcaccaccaacaccaaggagggcagcaacaucugccugaccagaaccgacagaggcugguacugcgacaacgccggcagcgugagcuucuucccccaggccgagaccugcaaggugcagagcaacagaguguucugcgacaccaugaacagcagaacccugcccagcgaggugaaccugugcaacaucgacaucuucaaccccaaguacgacugcaagaucaugaccagcaagaccgacgugagcagcagcgugaucaccagccugggcgccaucgugagcugcuacggcaagaccaagugcaccgccagcaacaagaacagaggcaucaucaagaccuucagcaacggcugcgacuacgugagcaacaagggcguggacaccgugagcgugggcaacacccuguacuacgugaacaagcaggagggcaagagccuguacgugaagggcgagcccaucaucaacuucuacgacccccugguguuccccagcgacgaguucgacgccagcaucagccaggugaacgagaagaucaaccagagccuggccuucaucagaaagagcgacgagcugcugcacaacgugaacgugggcaagagcaccaccaacaucaugaucaccaccaucaucaucgugaucaucgugauccugcugcugcugaucgccgugggccuguuccuguacugcaaggccagaagcacccccgugacccugagcaaggaccagcugagcggcaucaacaacaucgccuucagcaacugaggacuaguaauaaggaaacuguaugaaugucugugggcaggaagugaagagauccuucuguaaagguuuuuggaauuaugucugcugaauaauaaacuuuuuugaaauaauaaaucugguagaaaaaugagaucuaaaaaaaaaaaaaaaaaaaaaaaaaaaaaaaaaaaaaaaaaaaaaaaaaaaaaaaaaaaaaaaaugcaucccccccccccccccccccccccccccccccaaaggcucuuuucagagccaccagaauu

SEQ ID NO: 13344 - RNA, 1961 nt, Artificial Sequence
  mRNA product Design d-2 comprising derived and/or modified sequence from HRSV(Memphis-37)__AIY60640.1__F_DSCav1_mut0 (opt5)
gggagagcggcucggccauuuugucccagucaguccggaggcugcggcugcagaaguaccgccugcggaguaacugcaaagaagcuuaccauggagcugcccauccucaagaccaacgccauuacaacgauccuggcugccgugacccuuugcuucgcgagcucccagaauauuacagaagaguuuuaccaaucuaccuguagcgcugucuccaaaggcuaucugucugcccucagaacagggugguacaccagcguuaucacaauugaacuguccaacaucaaggagaauaaaugcaacggaaccgacgccaaggugaaacuuaucaagcaggaacuggauaaguauaaaaaugcugugacggagcuccagcugcugaugcagucuaccccugccgcuggcagcggguccgccauugcgagcggaaucgccgucuguaaggugcuccaccuggagggcgaaguuaacaaaauuaagaaugcccuucugucuacaaacaaagcuguggucucccucagcaauggggugucuguucugaccuucaaggugcuugaccugaagaacuacaucgauaaacaacuccugccgauucugaauaagcaguccugcagcaucucuaacauugagacagucaucgaauuucagcagaaaaauaaccggcuccuggagaucacccgcgaguucuccgugaaugcuggagugacgacacccgucagcaccuauaugcuuacaaacuccgaacugcucucucugauuaacgacaugccuaucaccaaugaucaaaagaaacuuaugagcaacaauguucagauugugagacagcaguccuacagcaucauguguauuaucaaggaggaagugcuggccuaugucgugcaacucccccuguacggcguuaucgacaccccuugcuggaaacugcauacaucuccccucuguacgaccaacacaaaggagggcuccaauauuugccugacccggacagaucgcgggugguacugugacaacgcgggaagcgugagcuuuuucccucaggccgaaaccugcaagguccagucuaauagaguguuuugugauacgaugaacuccagaacacugccgucugagguuaaucucugcaacaucgacauuuucaaucccaaauaugauugcaagaucaugaccagcaaaaccgacguguccagcucugucauuacaucccugggcgcuaucgugagcuguuacgggaagaccaaaugcacagccucuaacaagaaucggggaaucauuaagacguuuuccaacggcugugauuaugucagcaauaaagggguggacaccguuuccgugggaaacacacuuuacuaugucaacaagcaagagggcaaaucucuguacgugaagggcgaaccuaucauuaauuucuaugacccccucguuuuuccuagcgaugaguucgacgcuuccaucucucaggugaacgaaaagauuaaucagagccuggccuuuauccgcaaguccgaugagcugcuccacaacgucaauguggggaaaagcaccacaaacauuaugaucaccacgaucauuaucgugauuaucguuauucugcuucugcucaucgccgucggacuguuccuguacugcaaagcuagaucuacccccgugacacuuuccaaggaccagcucagcggcaucaauaacauugcguucucuaauugaggacuaguaauaaggaaacuguaugaaugucugugggcaggaagugaagagauccuucuguaaagguuuuuggaauuaugucugcugaauaauaaacuuuuuugaaauaauaaaucugguagaaaaaugagaucuaaaaaaaaaaaaaaaaaaaaaaaaaaaaaaaaaaaaaaaaaaaaaaaaaaaaaaaaaaaaaaaaugcaucccccccccccccccccccccccccccccccaaaggcucuuuucagagccaccagaauu

SEQ ID NO: 13345 - RNA, 1961 nt, Artificial Sequence
  mRNA product Design d-2 comprising derived and/or modified sequence from HRSV(Memphis-37)__AIY60640.1__F_DSCav1_mut0 (opt6)
gggagagcggcucggccauuuugucccagucaguccggaggcugcggcugcagaaguaccgccugcggaguaacugcaaagaagcuuaccauggaauuaccaaucuuaaaaacaaacgccauaacaaccauccucgcagcaguaacccuaugcuuugcauccucacaaaacauaacugaagaauuuuaccaaucaacaugcucagcaguaucaaaaggauaucuaucagcccucagaacaggaugguacacaucagucauuacaaucgaacuuucaaacauaaaagaaaauaaauguaacggcacagaugccaaaguaaaauuaauuaaacaagaacuugacaaauacaaaaaugccguaacagaacuacaacuacuaaugcaaaguacuccugcugcaggaagcggaucugcaauagcaucagguauagcaguauguaaaguucuacaccuagaaggcgaaguaaacaaaauuaaaaacgcacuacucucaacaaauaaagcaguugucucccuaucaaacggaguaucaguauuaacuuucaaaguacuagaccucaaaaacuauauagacaaacaacuauuaccaauacuaaacaaacaaagcugcucuaucuccaacaucgaaacaguaauagaauuucaacaaaaaaauaauagacuacuugaaauaaccagagaauuuucaguaaacgccggaguaacaacaccaguaucaacuuacaugcuaacaaacuccgaacuacuaucauuaauaaacgacaugcccauaacaaacgaccaaaaaaaauuaaugucaaacaacguccaaaucguacgacaacaauccuauuccauaauguguauaauaaaagaagaaguacuagcauacguaguacaauuaccauuauauggaguaauagauaccccuugcuggaaacuacacacaucaccccuaugcacuacaaauacgaaagaagguucaaauauaugcuuaacuagaaccgauagagguugguauugugacaacgcuggaucaguaucauuuuucccacaagcagaaacaugcaaaguacaaucaaacagaguauuuugcgacacuaugaacucaagaacuuuaccauccgaaguuaaucuauguaacauagauauauuuaacccaaaauacgacugcaaaauaaugacaucaaaaacagauguaucaucaucaguuauaaccucccucggagcaauaguaucaugcuauggaaaaacaaaaugcacagcaucaaacaaaaaucguggaauuauaaaaacauucucaaacggcugugacuacgucagcaauaaaggaguagacacagucucaguaggaaacacuuuauacuauguuaacaaacaagaaggaaaaucacucuacgucaaaggcgaaccaauaauaaauuucuaugacccacucguauucccauccgacgaauuugacgcaucaauaucacaaguaaaugaaaaaauaaaccaaagccuagcauuuauacgaaaaucagacgaacuacuacacaacguaaacguagguaaaagcacaaccaauauaaugauaacaacaauaaucauaguaauaaucguaauauuacuauuacuaauagcuguaggauuguuccuauacugcaaagcaagaucaacaccaguaaccuuaucuaaggaccaacuaucaggaaucaauaacauugccuucucaaacuaaggacuaguaauaaggaaacuguaugaaugucugugggcaggaagugaagagauccuucuguaaagguuuuuggaauuaugucugcugaauaauaaacuuuuuugaaauaauaaaucugguagaaaaaugagaucuaaaaaaaaaaaaaaaaaaaaaaaaaaaaaaaaaaaaaaaaaaaaaaaaaaaaaaaaaaaaaaaaugcaucccccccccccccccccccccccccccccccaaaggcucuuuucagagccaccagaauu

SEQ ID NO: 13346 - RNA, 1961 nt, Artificial Sequence
  mRNA product Design d-2 comprising derived and/or modified sequence from HRSV(Memphis-37)__AIY60640.1__F_DSCav1_mut0 (opt11)
gggagagcggcucggccauuuugucccagucaguccggaggcugcggcugcagaaguaccgccugcggaguaacugcaaagaagcuuaccauggaacuaccuauccuuaaaaccaacgcaaucaccaccauccuugccgcagucacacucugcuucgcauccucacagaacaucaccgaagaguucuaucaaucaaccugcuccgccguauccaaaggauaccucucagcccuccgcaccggcugguauaccucagucauaacaaucgaauuaucaaauaucaaggagaacaaaugcaacggcaccgacgccaaagucaaacucauaaaacaagaacuagacaaauacaaaaacgccgugacagaacuccaacuccucaugcaguccacccccgcagccggauccggcucagcaaucgccucgggcauugcaguaugcaaaguccuccaccucgaaggcgaagucaacaaaaucaaaaacgcccuccucuccaccaacaaagccgucgucucccucuccaacggcguaucuguccucacuuucaagguccucgaccucaaaaacuacaucgacaagcaacuacuuccaauccucaacaagcaauccugcucaaucucaaacaucgaaaccguaauagaguuccaacaaaagaacaaccgccuccucgaaaucacccgcgaguucuccguuaacgccggugucacuaccccagucagcaccuacaugcucaccaacuccgaacuccuuucucugaucaacgacaugccaaucaccaacgaucaaaagaaauuaauguccaacaacguccagaucguccgccaacaaagcuacagcaucaugugcaucauaaaagaagaaguacuugcguacguaguucaacuaccccuuuacggcguaaucgacaccccaugcuggaaacuccacaccuccccacuaugcaccaccaacaccaaagaaggauccaacaucugccuaacccgcaccgaccgcggcugguacugcgacaacgcugggagcgucucauucuucccacaagcagaaaccugcaaaguccaaucgaaccgcguauucugcgacaccaugaacuccagaacccuaccaagcgaagucaaucuuugcaacaucgacauauuuaaccccaaauacgacugcaaaaucaugacaucaaagaccgacgucucaucuucagucauuaccucacucggcgcaauugucagcugcuacggaaagaccaaauguaccgccuccaauaaaaaccguggaaucauaaaaaccuuuagcaacggcugcgacuacgucuccaacaaaggagucgacaccgucuccgucggcaacacccucuacuacgucaacaaacaagaaggaaaaucccucuacgugaaaggcgaacccauaauaaacuucuacgacccccuagucuuccccucugacgaguucgacgccuccaucucccaagucaacgaaaagauaaaucaaucacuagccuucauacgcaaaucugacgaacuucuccacaacgucaacgucggcaaauccaccaccaacauaaugaucacaacgauaauaaucgugaucauaguaauccuacuucuccucaucgcaguaggucuauuccuauacugcaaagcccgcagcacccccgucacccuaucaaaagaccaacucuccggcaucaacaacaucgccuucucaaacuaaggacuaguaauaaggaaacuguaugaaugucugugggcaggaagugaagagauccuucuguaaagguuuuuggaauuaugucugcugaauaauaaacuuuuuugaaauaauaaaucugguagaaaaaugagaucuaaaaaaaaaaaaaaaaaaaaaaaaaaaaaaaaaaaaaaaaaaaaaaaaaaaaaaaaaaaaaaaaugcaucccccccccccccccccccccccccccccccaaaggcucuuuucagagccaccagaauu

SEQ ID NO: 13347 - RNA, 2277 nt, Artificial Sequence
  mRNA product Design d-3 comprising derived and/or modified sequence from HRSV(Memphis-37)__AIY60640.1__F_DSCav1_mut0 (opt1)
gggagagggcgcuuggcuugcaaggacccugagcugcggcauugaagcacacccaacccaacucgacugaagucagccucacugaaccggaucugagaaucuucucucucugggcuugccagggcucuccgaaccuagcuagcauccucuucaauuccaacuagaaagcuuaccauggagcugcccauccucaagaccaacgccaucaccacgauccuggccgcggugacccugugcuucgccagcucccagaacaucaccgaggaguucuaccagagcacgugcuccgccgucagcaagggcuaccucuccgcccugcgcaccgggugguacaccagcgugaucaccaucgagcuguccaacaucaaggagaacaagugcaacggcaccgacgccaaggugaagcucaucaagcaggagcuggacaaguacaagaacgcggucacggagcugcagcuccugaugcagagcaccccggccgccggcuccgggagcgcgaucgccuccggcaucgccgucugcaaggugcugcaccucgagggcgaggugaacaagaucaagaacgcccugcuguccaccaacaaggccgucgugagccucuccaacggggugagcguccugaccuucaaggugcuggaccucaagaacuacaucgacaagcagcugcugcccauccugaacaagcagagcugcuccaucagcaacaucgagaccgucaucgaguuccagcagaagaacaaccgccuccuggagaucacgcgggaguucagcgugaacgcgggcgugaccacccccgucuccaccuacaugcugacgaacagcgagcuccugucccugaucaacgacaugccgaucaccaacgaccagaagaagcucaugagcaacaacgugcagaucgugcgccagcaguccuacagcaucaugugcaucaucaaggaggagguccuggccuacguggugcagcugccccucuacggggucaucgacacccccugcuggaagcugcacaccagcccccugugcacgaccaacaccaaggagggcuccaacaucugccucacccggacggaccgcgggugguacugcgacaacgccggcagcguguccuucuucccgcaggccgagaccugcaagguccagagcaaccggguguucugcgacaccaugaacucccggacccugcccagcgaggugaaccucugcaacaucgacaucuucaaccccaaguacgacugcaagaucaugacguccaagaccgacgucagcuccagcgugaucaccucccugggcgccaucgugagcugcuacgggaagaccaagugcacggcgagcaacaagaaccgcggcaucaucaagaccuucuccaacgggugcgacuacgucagcaacaagggcguggacaccguguccgucggcaacacccuguacuacgugaacaagcaggagggcaagagccucuacgugaagggggagcccaucaucaacuucuacgacccgcuggucuuccccuccgacgaguucgacgccagcaucucccaggugaacgagaagaucaaccagagccuggccuucauccggaaguccgacgagcuccugcacaacgugaacgucggcaagagcaccacgaacaucaugaucaccaccaucaucaucgugaucaucgugauccugcugcuccugaucgccgucgggcuguuccucuacugcaaggcccgcuccacccccgugacgcugagcaaggaccagcuguccgggaucaacaacaucgcguucagcaacugaggacuagugaagggaacacccaaauuuaauucagccuuaagcacaauuaauuaagagugaaacguaauuguacaagcaguuggucacccaccauagggcaugaucaacaccgcaaccuuuccuuuuucccccagugauucugaaaaaccccucuucccuucagcuugcuuagauguuccaaauuuaguaagcuuaaggcggccuacagaagaaaaagaaaaaaaaggccacaaaaguucccucucacuuucaguaaauaaaauaaaagcagcaacagaaauaaagaaauaaaugaaauucaaaaugaaauaaauauuguguugugcagcauuaaaaaaucaauaaaaauuaaaaaugagcaagaucuaaaaaaaaaaaaaaaaaaaaaaaaaaaaaaaaaaaaaaaaaaaaaaaaaaaaaaaaaaaaaaaaugcaucccccccccccccccccccccccccccccccaaaggcucuuuucagagccaccagaauu

SEQ ID NO: 13348 - RNA, 2277 nt, Artificial Sequence
  mRNA product Design d-3 comprising derived and/or modified sequence from HRSV(Memphis-37)__AIY60640.1__F_DSCav1_mut0 (opt1)
gggagagggcgcuuggcuugcaaggacccugagcugcggcauugaagcacacccaacccaacucgacugaagucagccucacugaaccggaucugagaaucuucucucucugggcuugccagggcucuccgaaccuagcuagcauccucuucaauuccaacuagaaagcuuaccauggagcugcccauccucaagaccaacgccaucaccacgauccuggccgcggugacccugugcuucgccagcucccagaacaucaccgaggaguucuaccagagcacgugcuccgccgucagcaagggcuaccucuccgcccugcgcaccgggugguacaccagcgugaucaccaucgagcuguccaacaucaaggagaacaagugcaacggcaccgacgccaaggugaagcucaucaagcaggagcuggacaaguacaagaacgcggucacggagcugcagcuccugaugcagagcaccccggccgccggguccggcagcgccaucgcguccgggaucgccgugugcaaggugcugcaccucgagggcgaggucaacaagaucaagaacgcccugcugagcaccaacaaggccguggugucccucagcaacggcgucuccgugcugaccuucaaggugcuggaccucaagaacuacaucgacaagcagcugcugcccauccucaacaagcagagcugcuccaucagcaacaucgagacggucaucgaguuccagcagaagaacaaccggcugcuggagaucacccgcgaguucuccgugaacgccggggugaccacccccgucagcacguacaugcucaccaacagcgagcugcugucccucaucaacgacaugcccaucaccaacgaccagaagaagcugaugagcaacaacgugcagaucgugcggcagcaguccuacagcaucaugugcaucaucaaggaggagguccuggcguacguggugcagcucccgcuguacggcgucaucgacacccccugcuggaagcugcacacgagcccccucugcaccaccaacaccaaggagggguccaacaucugccugacgcgcaccgaccggggcugguacugcgacaacgccggguccgugagcuucuucccccaggccgagaccugcaaggugcaguccaaccgcgucuucugcgacaccaugaacagccggacgcucccguccgaggugaaccugugcaacaucgacaucuucaaccccaaguacgacugcaagaucaugaccagcaagaccgacgucuccagcuccgugaucaccagccugggcgccaucguguccugcuacggcaagacgaagugcaccgccagcaacaagaaccgggggaucaucaagaccuucuccaacggcugcgacuacgucagcaacaaggggguggacaccgugagcgucggcaacacgcucuacuacgugaacaagcaggagggcaagucccuguacgugaagggggagcccaucaucaacuucuacgacccccuggucuucccgagcgacgaguucgacgcguccaucagccaggugaacgagaagaucaaccagucccucgccuucauccgcaagagcgacgagcugcugcacaacgugaacgucggcaaguccaccaccaacaucaugaucaccaccaucaucaucgugaucaucgugauccuccugcugcucaucgccgucgggcuguuccuguacugcaaggcccggagcacgcccgugacccuguccaaggaccagcucagcggcaucaacaacaucgccuucuccaacugaggacuagugaagggaacacccaaauuuaauucagccuuaagcacaauuaauuaagagugaaacguaauuguacaagcaguuggucacccaccauagggcaugaucaacaccgcaaccuuuccuuuuucccccagugauucugaaaaaccccucuucccuucagcuugcuuagauguuccaaauuuaguaagcuuaaggcggccuacagaagaaaaagaaaaaaaaggccacaaaaguucccucucacuuucaguaaauaaaauaaaagcagcaacagaaauaaagaaauaaaugaaauucaaaaugaaauaaauauuguguugugcagcauuaaaaaaucaauaaaaauuaaaaaugagcaagaucuaaaaaaaaaaaaaaaaaaaaaaaaaaaaaaaaaaaaaaaaaaaaaaaaaaaaaaaaaaaaaaaaugcaucccccccccccccccccccccccccccccccaaaggcucuuuucagagccaccagaauu

SEQ ID NO: 13349 - RNA, 2277 nt, Artificial Sequence
  mRNA product Design d-3 comprising derived and/or modified sequence from HRSV(Memphis-37)__AIY60640.1__F_DSCav1_mut0 (opt2)
gggagagggcgcuuggcuugcaaggacccugagcugcggcauugaagcacacccaacccaacucgacugaagucagccucacugaaccggaucugagaaucuucucucucugggcuugccagggcucuccgaaccuagcuagcauccucuucaauuccaacuagaaagcuuaccauggagcuccccauccucaagaccaacgccaucaccaccauccucgccgccgucacccucugcuucgccuccucccagaacaucaccgaggaguucuaccaguccaccugcuccgccgucuccaagggcuaccucuccgcccuccgcaccggcugguacaccuccgucaucaccaucgagcucuccaacaucaaggagaacaagugcaacggcaccgacgccaaggucaagcucaucaagcaggagcucgacaaguacaagaacgccgucaccgagcuccagcuccucaugcaguccacccccgccgccggcuccggcuccgccaucgccuccggcaucgccgucugcaagguccuccaccucgagggcgaggucaacaagaucaagaacgcccuccucuccaccaacaaggccgucgucucccucuccaacggcgucuccguccucaccuucaagguccucgaccucaagaacuacaucgacaagcagcuccuccccauccucaacaagcaguccugcuccaucuccaacaucgagaccgucaucgaguuccagcagaagaacaaccgccuccucgagaucacccgcgaguucuccgucaacgccggcgucaccacccccgucuccaccuacaugcucaccaacuccgagcuccucucccucaucaacgacaugcccaucaccaacgaccagaagaagcucauguccaacaacguccagaucguccgccagcaguccuacuccaucaugugcaucaucaaggaggagguccucgccuacgucguccagcucccccucuacggcgucaucgacacccccugcuggaagcuccacaccuccccccucugcaccaccaacaccaaggagggcuccaacaucugccucacccgcaccgaccgcggcugguacugcgacaacgccggcuccgucuccuucuucccccaggccgagaccugcaagguccaguccaaccgcgucuucugcgacaccaugaacucccgcacccuccccuccgaggucaaccucugcaacaucgacaucuucaaccccaaguacgacugcaagaucaugaccuccaagaccgacgucuccuccuccgucaucaccucccucggcgccaucgucuccugcuacggcaagaccaagugcaccgccuccaacaagaaccgcggcaucaucaagaccuucuccaacggcugcgacuacgucuccaacaagggcgucgacaccgucuccgucggcaacacccucuacuacgucaacaagcaggagggcaagucccucuacgucaagggcgagcccaucaucaacuucuacgacccccucgucuuccccuccgacgaguucgacgccuccaucucccaggucaacgagaagaucaaccagucccucgccuucauccgcaaguccgacgagcuccuccacaacgucaacgucggcaaguccaccaccaacaucaugaucaccaccaucaucaucgucaucaucgucauccuccuccuccucaucgccgucggccucuuccucuacugcaaggcccgcuccacccccgucacccucuccaaggaccagcucuccggcaucaacaacaucgccuucuccaacugaggacuagugaagggaacacccaaauuuaauucagccuuaagcacaauuaauuaagagugaaacguaauuguacaagcaguuggucacccaccauagggcaugaucaacaccgcaaccuuuccuuuuucccccagugauucugaaaaaccccucuucccuucagcuugcuuagauguuccaaauuuaguaagcuuaaggcggccuacagaagaaaaagaaaaaaaaggccacaaaaguucccucucacuuucaguaaauaaaauaaaagcagcaacagaaauaaagaaauaaaugaaauucaaaaugaaauaaauauuguguugugcagcauuaaaaaaucaauaaaaauuaaaaaugagcaagaucuaaaaaaaaaaaaaaaaaaaaaaaaaaaaaaaaaaaaaaaaaaaaaaaaaaaaaaaaaaaaaaaaugcaucccccccccccccccccccccccccccccccaaaggcucuuuucagagccaccagaauu

SEQ ID NO: 13350 - RNA, 2277 nt, Artificial Sequence
  mRNA product Design d-3 comprising derived and/or modified sequence from HRSV(Memphis-37)__AIY60640.1__F_DSCav1_mut0 (opt3)
gggagagggcgcuuggcuugcaaggacccugagcugcggcauugaagcacacccaacccaacucgacugaagucagccucacugaaccggaucugagaaucuucucucucugggcuugccagggcucuccgaaccuagcuagcauccucuucaauuccaacuagaaagcuuaccauggagcugcccauccucaagaccaacgccauuacaacuauacuugcugcagugacgcugugcuucgccagcucccagaauaucaccgaagaguuuuaccaaucuacauguucagcggucaguaaaggcuauuugagcgcuuuaagaacugggugguacaccuccguuauuacaaucgaacugucuaacauuaaggagaauaaaugcaacggaaccgacgccaaggugaaacuaaucaagcaggaacucgauaaguauaaaaaugcaguaacugagcugcagcuucugaugcagucgaccccugccgcugguucaggcagcgcaauagccagugggaucgcuguguguaaggucuugcaccucgagggagaagugaacaaaauuaagaaugcccugcuguccacaaacaaagcgguugugucucucagcaauggcgucuccguguuaacguucaagguacuggaccuuaagaacuacaucgauaaacaauugcugccaauucuaaauaagcagucaugcaguaucagcaacauagagacuguuauugaauuucagcagaaaaauaacaggcuccuggagaucacccgggaguucucugugaaugccggugucacaacuccgguguccaccuauaugcuuacaaacucagaacuguugagccucauuaacgacaugcccaucaccaaugaucaaaagaaacugaugaguaacaaugugcagaucguccgccagcagucuuacuccauuauguguauaaucaaggaggaaguuuuagcauaugugguacaacugccucucuacggggugauugacacgccaugcuggaaacuucauacuagcccccuguguacaaccaacacuaaggagggaucgaauaucugcuugacacgaaccgaucguggcugguacugugacaacgcuggcucugucuccuuuuucccucaggccgaaacgugcaaggugcagucaaauagaguguuuugugauaccaugaacaguagaacacugccaagcgaggugaaucucugcaacauagacauuuucaaucccaaauaugauugcaagaucaugacuuccaaaaccgacgucucuagcucagugaucacaagucugggggcaauuguauccuguuacggaaagacuaaaugcaccgcuagcaacaagaauagggguaucauuaagacauuuucuaacggcugugauuauguuucaaauaaagggguggacaccgucagugugggaaacacucuuuacuaugucaacaagcaagagggcaaaagccuguacgugaagggugaaccuauaaucaauuucuaugacccauugguuuuuccguccgaugaguucgacgccucuauuucgcagguuaacgagaaaaucaaucagagccucgcguuuauccggaaguccgaugaacuguuacacaacguaaaugucgggaagucaacgacaaacauuaugauaaccacuaucauuaucgugauuaucguuauacugcuacuccugaucgccgugggacuuuucuuguacugcaaagcacgcaguacccccgucacacugucuaaggaccagcucagcggcauuaauaacaucgcuuucuccaauugaggacuagugaagggaacacccaaauuuaauucagccuuaagcacaauuaauuaagagugaaacguaauuguacaagcaguuggucacccaccauagggcaugaucaacaccgcaaccuuuccuuuuucccccagugauucugaaaaaccccucuucccuucagcuugcuuagauguuccaaauuuaguaagcuuaaggcggccuacagaagaaaaagaaaaaaaaggccacaaaaguucccucucacuuucaguaaauaaaauaaaagcagcaacagaaauaaagaaauaaaugaaauucaaaaugaaauaaauauuguguugugcagcauuaaaaaaucaauaaaaauuaaaaaugagcaagaucuaaaaaaaaaaaaaaaaaaaaaaaaaaaaaaaaaaaaaaaaaaaaaaaaaaaaaaaaaaaaaaaaugcaucccccccccccccccccccccccccccccccaaaggcucuuuucagagccaccagaauu

SEQ ID NO: 13351 - RNA, 2277 nt, Artificial Sequence
  mRNA product Design d-3 comprising derived and/or modified sequence from HRSV(Memphis-37)__AIY60640.1__F_DSCav1_mut0 (opt4)
gggagagggcgcuuggcuugcaaggacccugagcugcggcauugaagcacacccaacccaacucgacugaagucagccucacugaaccggaucugagaaucuucucucucugggcuugccagggcucuccgaaccuagcuagcauccucuucaauuccaacuagaaagcuuaccauggagcugcccauccugaagaccaacgccaucaccaccauccuggccgccgugacccugugcuucgccagcagccagaacaucaccgaggaguucuaccagagcaccugcagcgccgugagcaagggcuaccugagcgcccugagaaccggcugguacaccagcgugaucaccaucgagcugagcaacaucaaggagaacaagugcaacggcaccgacgccaaggugaagcugaucaagcaggagcuggacaaguacaagaacgccgugaccgagcugcagcugcugaugcagagcacccccgccgccggcagcggcagcgccaucgccagcggcaucgccgugugcaaggugcugcaccuggagggcgaggugaacaagaucaagaacgcccugcugagcaccaacaaggccguggugagccugagcaacggcgugagcgugcugaccuucaaggugcuggaccugaagaacuacaucgacaagcagcugcugcccauccugaacaagcagagcugcagcaucagcaacaucgagaccgugaucgaguuccagcagaagaacaacagacugcuggagaucaccagagaguucagcgugaacgccggcgugaccacccccgugagcaccuacaugcugaccaacagcgagcugcugagccugaucaacgacaugcccaucaccaacgaccagaagaagcugaugagcaacaacgugcagaucgugagacagcagagcuacagcaucaugugcaucaucaaggaggaggugcuggccuacguggugcagcugccccuguacggcgugaucgacacccccugcuggaagcugcacaccagcccccugugcaccaccaacaccaaggagggcagcaacaucugccugaccagaaccgacagaggcugguacugcgacaacgccggcagcgugagcuucuucccccaggccgagaccugcaaggugcagagcaacagaguguucugcgacaccaugaacagcagaacccugcccagcgaggugaaccugugcaacaucgacaucuucaaccccaaguacgacugcaagaucaugaccagcaagaccgacgugagcagcagcgugaucaccagccugggcgccaucgugagcugcuacggcaagaccaagugcaccgccagcaacaagaacagaggcaucaucaagaccuucagcaacggcugcgacuacgugagcaacaagggcguggacaccgugagcgugggcaacacccuguacuacgugaacaagcaggagggcaagagccuguacgugaagggcgagcccaucaucaacuucuacgacccccugguguuccccagcgacgaguucgacgccagcaucagccaggugaacgagaagaucaaccagagccuggccuucaucagaaagagcgacgagcugcugcacaacgugaacgugggcaagagcaccaccaacaucaugaucaccaccaucaucaucgugaucaucgugauccugcugcugcugaucgccgugggccuguuccuguacugcaaggccagaagcacccccgugacccugagcaaggaccagcugagcggcaucaacaacaucgccuucagcaacugaggacuagugaagggaacacccaaauuuaauucagccuuaagcacaauuaauuaagagugaaacguaauuguacaagcaguuggucacccaccauagggcaugaucaacaccgcaaccuuuccuuuuucccccagugauucugaaaaaccccucuucccuucagcuugcuuagauguuccaaauuuaguaagcuuaaggcggccuacagaagaaaaagaaaaaaaaggccacaaaaguucccucucacuuucaguaaauaaaauaaaagcagcaacagaaauaaagaaauaaaugaaauucaaaaugaaauaaauauuguguugugcagcauuaaaaaaucaauaaaaauuaaaaaugagcaagaucuaaaaaaaaaaaaaaaaaaaaaaaaaaaaaaaaaaaaaaaaaaaaaaaaaaaaaaaaaaaaaaaaugcaucccccccccccccccccccccccccccccccaaaggcucuuuucagagccaccagaauu

SEQ ID NO: 13352 - RNA, 2277 nt, Artificial Sequence
  mRNA product Design d-3 comprising derived and/or modified sequence from HRSV(Memphis-37)__AIY60640.1__F_DSCav1_mut0 (opt5)
gggagagggcgcuuggcuugcaaggacccugagcugcggcauugaagcacacccaacccaacucgacugaagucagccucacugaaccggaucugagaaucuucucucucugggcuugccagggcucuccgaaccuagcuagcauccucuucaauuccaacuagaaagcuuaccauggagcugcccauccucaagaccaacgccauuacaacgauccuggcugccgugacccuuugcuucgcgagcucccagaauauuacagaagaguuuuaccaaucuaccuguagcgcugucuccaaaggcuaucugucugcccucagaacagggugguacaccagcguuaucacaauugaacuguccaacaucaaggagaauaaaugcaacggaaccgacgccaaggugaaacuuaucaagcaggaacuggauaaguauaaaaaugcugugacggagcuccagcugcugaugcagucuaccccugccgcuggcagcggguccgccauugcgagcggaaucgccgucuguaaggugcuccaccuggagggcgaaguuaacaaaauuaagaaugcccuucugucuacaaacaaagcuguggucucccucagcaauggggugucuguucugaccuucaaggugcuugaccugaagaacuacaucgauaaacaacuccugccgauucugaauaagcaguccugcagcaucucuaacauugagacagucaucgaauuucagcagaaaaauaaccggcuccuggagaucacccgcgaguucuccgugaaugcuggagugacgacacccgucagcaccuauaugcuuacaaacuccgaacugcucucucugauuaacgacaugccuaucaccaaugaucaaaagaaacuuaugagcaacaauguucagauugugagacagcaguccuacagcaucauguguauuaucaaggaggaagugcuggccuaugucgugcaacucccccuguacggcguuaucgacaccccuugcuggaaacugcauacaucuccccucuguacgaccaacacaaaggagggcuccaauauuugccugacccggacagaucgcgggugguacugugacaacgcgggaagcgugagcuuuuucccucaggccgaaaccugcaagguccagucuaauagaguguuuugugauacgaugaacuccagaacacugccgucugagguuaaucucugcaacaucgacauuuucaaucccaaauaugauugcaagaucaugaccagcaaaaccgacguguccagcucugucauuacaucccugggcgcuaucgugagcuguuacgggaagaccaaaugcacagccucuaacaagaaucggggaaucauuaagacguuuuccaacggcugugauuaugucagcaauaaagggguggacaccguuuccgugggaaacacacuuuacuaugucaacaagcaagagggcaaaucucuguacgugaagggcgaaccuaucauuaauuucuaugacccccucguuuuuccuagcgaugaguucgacgcuuccaucucucaggugaacgaaaagauuaaucagagccuggccuuuauccgcaaguccgaugagcugcuccacaacgucaauguggggaaaagcaccacaaacauuaugaucaccacgaucauuaucgugauuaucguuauucugcuucugcucaucgccgucggacuguuccuguacugcaaagcuagaucuacccccgugacacuuuccaaggaccagcucagcggcaucaauaacauugcguucucuaauugaggacuagugaagggaacacccaaauuuaauucagccuuaagcacaauuaauuaagagugaaacguaauuguacaagcaguuggucacccaccauagggcaugaucaacaccgcaaccuuuccuuuuucccccagugauucugaaaaaccccucuucccuucagcuugcuuagauguuccaaauuuaguaagcuuaaggcggccuacagaagaaaaagaaaaaaaaggccacaaaaguucccucucacuuucaguaaauaaaauaaaagcagcaacagaaauaaagaaauaaaugaaauucaaaaugaaauaaauauuguguugugcagcauuaaaaaaucaauaaaaauuaaaaaugagcaagaucuaaaaaaaaaaaaaaaaaaaaaaaaaaaaaaaaaaaaaaaaaaaaaaaaaaaaaaaaaaaaaaaaugcaucccccccccccccccccccccccccccccccaaaggcucuuuucagagccaccagaauu

SEQ ID NO: 13353 - RNA, 2277 nt, Artificial Sequence
  mRNA product Design d-3 comprising derived and/or modified sequence from HRSV(Memphis-37)__AIY60640.1__F_DSCav1_mut0 (opt6)
gggagagggcgcuuggcuugcaaggacccugagcugcggcauugaagcacacccaacccaacucgacugaagucagccucacugaaccggaucugagaaucuucucucucugggcuugccagggcucuccgaaccuagcuagcauccucuucaauuccaacuagaaagcuuaccauggaauuaccaaucuuaaaaacaaacgccauaacaaccauccucgcagcaguaacccuaugcuuugcauccucacaaaacauaacugaagaauuuuaccaaucaacaugcucagcaguaucaaaaggauaucuaucagcccucagaacaggaugguacacaucagucauuacaaucgaacuuucaaacauaaaagaaaauaaauguaacggcacagaugccaaaguaaaauuaauuaaacaagaacuugacaaauacaaaaaugccguaacagaacuacaacuacuaaugcaaaguacuccugcugcaggaagcggaucugcaauagcaucagguauagcaguauguaaaguucuacaccuagaaggcgaaguaaacaaaauuaaaaacgcacuacucucaacaaauaaagcaguugucucccuaucaaacggaguaucaguauuaacuuucaaaguacuagaccucaaaaacuauauagacaaacaacuauuaccaauacuaaacaaacaaagcugcucuaucuccaacaucgaaacaguaauagaauuucaacaaaaaaauaauagacuacuugaaauaaccagagaauuuucaguaaacgccggaguaacaacaccaguaucaacuuacaugcuaacaaacuccgaacuacuaucauuaauaaacgacaugcccauaacaaacgaccaaaaaaaauuaaugucaaacaacguccaaaucguacgacaacaauccuauuccauaauguguauaauaaaagaagaaguacuagcauacguaguacaauuaccauuauauggaguaauagauaccccuugcuggaaacuacacacaucaccccuaugcacuacaaauacgaaagaagguucaaauauaugcuuaacuagaaccgauagagguugguauugugacaacgcuggaucaguaucauuuuucccacaagcagaaacaugcaaaguacaaucaaacagaguauuuugcgacacuaugaacucaagaacuuuaccauccgaaguuaaucuauguaacauagauauauuuaacccaaaauacgacugcaaaauaaugacaucaaaaacagauguaucaucaucaguuauaaccucccucggagcaauaguaucaugcuauggaaaaacaaaaugcacagcaucaaacaaaaaucguggaauuauaaaaacauucucaaacggcugugacuacgucagcaauaaaggaguagacacagucucaguaggaaacacuuuauacuauguuaacaaacaagaaggaaaaucacucuacgucaaaggcgaaccaauaauaaauuucuaugacccacucguauucccauccgacgaauuugacgcaucaauaucacaaguaaaugaaaaaauaaaccaaagccuagcauuuauacgaaaaucagacgaacuacuacacaacguaaacguagguaaaagcacaaccaauauaaugauaacaacaauaaucauaguaauaaucguaauauuacuauuacuaauagcuguaggauuguuccuauacugcaaagcaagaucaacaccaguaaccuuaucuaaggaccaacuaucaggaaucaauaacauugccuucucaaacuaaggacuagugaagggaacacccaaauuuaauucagccuuaagcacaauuaauuaagagugaaacguaauuguacaagcaguuggucacccaccauagggcaugaucaacaccgcaaccuuuccuuuuucccccagugauucugaaaaaccccucuucccuucagcuugcuuagauguuccaaauuuaguaagcuuaaggcggccuacagaagaaaaagaaaaaaaaggccacaaaaguucccucucacuuucaguaaauaaaauaaaagcagcaacagaaauaaagaaauaaaugaaauucaaaaugaaauaaauauuguguugugcagcauuaaaaaaucaauaaaaauuaaaaaugagcaagaucuaaaaaaaaaaaaaaaaaaaaaaaaaaaaaaaaaaaaaaaaaaaaaaaaaaaaaaaaaaaaaaaaugcaucccccccccccccccccccccccccccccccaaaggcucuuuucagagccaccagaauu

SEQ ID NO: 13354 - RNA, 2277 nt, Artificial Sequence
  mRNA product Design d-3 comprising derived and/or modified sequence from HRSV(Memphis-37)__AIY60640.1__F_DSCav1_mut0 (opt11)
gggagagggcgcuuggcuugcaaggacccugagcugcggcauugaagcacacccaacccaacucgacugaagucagccucacugaaccggaucugagaaucuucucucucugggcuugccagggcucuccgaaccuagcuagcauccucuucaauuccaacuagaaagcuuaccauggaacuaccuauccuuaaaaccaacgcaaucaccaccauccuugccgcagucacacucugcuucgcauccucacagaacaucaccgaagaguucuaucaaucaaccugcuccgccguauccaaaggauaccucucagcccuccgcaccggcugguauaccucagucauaacaaucgaauuaucaaauaucaaggagaacaaaugcaacggcaccgacgccaaagucaaacucauaaaacaagaacuagacaaauacaaaaacgccgugacagaacuccaacuccucaugcaguccacccccgcagccggauccggcucagcaaucgccucgggcauugcaguaugcaaaguccuccaccucgaaggcgaagucaacaaaaucaaaaacgcccuccucuccaccaacaaagccgucgucucccucuccaacggcguaucuguccucacuuucaagguccucgaccucaaaaacuacaucgacaagcaacuacuuccaauccucaacaagcaauccugcucaaucucaaacaucgaaaccguaauagaguuccaacaaaagaacaaccgccuccucgaaaucacccgcgaguucuccguuaacgccggugucacuaccccagucagcaccuacaugcucaccaacuccgaacuccuuucucugaucaacgacaugccaaucaccaacgaucaaaagaaauuaauguccaacaacguccagaucguccgccaacaaagcuacagcaucaugugcaucauaaaagaagaaguacuugcguacguaguucaacuaccccuuuacggcguaaucgacaccccaugcuggaaacuccacaccuccccacuaugcaccaccaacaccaaagaaggauccaacaucugccuaacccgcaccgaccgcggcugguacugcgacaacgcugggagcgucucauucuucccacaagcagaaaccugcaaaguccaaucgaaccgcguauucugcgacaccaugaacuccagaacccuaccaagcgaagucaaucuuugcaacaucgacauauuuaaccccaaauacgacugcaaaaucaugacaucaaagaccgacgucucaucuucagucauuaccucacucggcgcaauugucagcugcuacggaaagaccaaauguaccgccuccaauaaaaaccguggaaucauaaaaaccuuuagcaacggcugcgacuacgucuccaacaaaggagucgacaccgucuccgucggcaacacccucuacuacgucaacaaacaagaaggaaaaucccucuacgugaaaggcgaacccauaauaaacuucuacgacccccuagucuuccccucugacgaguucgacgccuccaucucccaagucaacgaaaagauaaaucaaucacuagccuucauacgcaaaucugacgaacuucuccacaacgucaacgucggcaaauccaccaccaacauaaugaucacaacgauaauaaucgugaucauaguaauccuacuucuccucaucgcaguaggucuauuccuauacugcaaagcccgcagcacccccgucacccuaucaaaagaccaacucuccggcaucaacaacaucgccuucucaaacuaaggacuagugaagggaacacccaaauuuaauucagccuuaagcacaauuaauuaagagugaaacguaauuguacaagcaguuggucacccaccauagggcaugaucaacaccgcaaccuuuccuuuuucccccagugauucugaaaaaccccucuucccuucagcuugcuuagauguuccaaauuuaguaagcuuaaggcggccuacagaagaaaaagaaaaaaaaggccacaaaaguucccucucacuuucaguaaauaaaauaaaagcagcaacagaaauaaagaaauaaaugaaauucaaaaugaaauaaauauuguguugugcagcauuaaaaaaucaauaaaaauuaaaaaugagcaagaucuaaaaaaaaaaaaaaaaaaaaaaaaaaaaaaaaaaaaaaaaaaaaaaaaaaaaaaaaaaaaaaaaugcaucccccccccccccccccccccccccccccccaaaggcucuuuucagagccaccagaauu

SEQ ID NO: 13355 - RNA, 1960 nt, Artificial Sequence
  mRNA product Design d-4 comprising derived and/or modified sequence from HRSV(Memphis-37)__AIY60640.1__F_DSCav1_mut0 (opt1)
gggagagucccgcagucggcguccagcggcucugcuuguucgugugugugucguugcaggccuuauucaagcuuaccauggagcugcccauccucaagaccaacgccaucaccacgauccuggccgcggugacccugugcuucgccagcucccagaacaucaccgaggaguucuaccagagcacgugcuccgccgucagcaagggcuaccucuccgcccugcgcaccgggugguacaccagcgugaucaccaucgagcuguccaacaucaaggagaacaagugcaacggcaccgacgccaaggugaagcucaucaagcaggagcuggacaaguacaagaacgcggucacggagcugcagcuccugaugcagagcaccccggccgccggcuccgggagcgcgaucgccuccggcaucgccgucugcaaggugcugcaccucgagggcgaggugaacaagaucaagaacgcccugcuguccaccaacaaggccgucgugagccucuccaacggggugagcguccugaccuucaaggugcuggaccucaagaacuacaucgacaagcagcugcugcccauccugaacaagcagagcugcuccaucagcaacaucgagaccgucaucgaguuccagcagaagaacaaccgccuccuggagaucacgcgggaguucagcgugaacgcgggcgugaccacccccgucuccaccuacaugcugacgaacagcgagcuccugucccugaucaacgacaugccgaucaccaacgaccagaagaagcucaugagcaacaacgugcagaucgugcgccagcaguccuacagcaucaugugcaucaucaaggaggagguccuggccuacguggugcagcugccccucuacggggucaucgacacccccugcuggaagcugcacaccagcccccugugcacgaccaacaccaaggagggcuccaacaucugccucacccggacggaccgcgggugguacugcgacaacgccggcagcguguccuucuucccgcaggccgagaccugcaagguccagagcaaccggguguucugcgacaccaugaacucccggacccugcccagcgaggugaaccucugcaacaucgacaucuucaaccccaaguacgacugcaagaucaugacguccaagaccgacgucagcuccagcgugaucaccucccugggcgccaucgugagcugcuacgggaagaccaagugcacggcgagcaacaagaaccgcggcaucaucaagaccuucuccaacgggugcgacuacgucagcaacaagggcguggacaccguguccgucggcaacacccuguacuacgugaacaagcaggagggcaagagccucuacgugaagggggagcccaucaucaacuucuacgacccgcuggucuuccccuccgacgaguucgacgccagcaucucccaggugaacgagaagaucaaccagagccuggccuucauccggaaguccgacgagcuccugcacaacgugaacgucggcaagagcaccacgaacaucaugaucaccaccaucaucaucgugaucaucgugauccugcugcuccugaucgccgucgggcuguuccucuacugcaaggcccgcuccacccccgugacgcugagcaaggaccagcuguccgggaucaacaacaucgcguucagcaacugaggacuaguggaagcauuuuccuggcugauuaaaagaaauuacucagcuauggucaucuguuccuguuagaaggcuaugcagcauauuauauacuaugcgcauguuaugaaaugcauaauaaaaaauuuuaaaaaaucuaaaagaucuaaaaaaaaaaaaaaaaaaaaaaaaaaaaaaaaaaaaaaaaaaaaaaaaaaaaaaaaaaaaaaaaugcaucccccccccccccccccccccccccccccccaaaggcucuuuucagagccaccagaauu

SEQ ID NO: 13356 - RNA, 1960 nt, Artificial Sequence
  mRNA product Design d-4 comprising derived and/or modified sequence from HRSV(Memphis-37)__AIY60640.1__F_DSCav1_mut0 (opt1)
gggagagucccgcagucggcguccagcggcucugcuuguucgugugugugucguugcaggccuuauucaagcuuaccauggagcugcccauccucaagaccaacgccaucaccacgauccuggccgcggugacccugugcuucgccagcucccagaacaucaccgaggaguucuaccagagcacgugcuccgccgucagcaagggcuaccucuccgcccugcgcaccgggugguacaccagcgugaucaccaucgagcuguccaacaucaaggagaacaagugcaacggcaccgacgccaaggugaagcucaucaagcaggagcuggacaaguacaagaacgcggucacggagcugcagcuccugaugcagagcaccccggccgccggguccggcagcgccaucgcguccgggaucgccgugugcaaggugcugcaccucgagggcgaggucaacaagaucaagaacgcccugcugagcaccaacaaggccguggugucccucagcaacggcgucuccgugcugaccuucaaggugcuggaccucaagaacuacaucgacaagcagcugcugcccauccucaacaagcagagcugcuccaucagcaacaucgagacggucaucgaguuccagcagaagaacaaccggcugcuggagaucacccgcgaguucuccgugaacgccggggugaccacccccgucagcacguacaugcucaccaacagcgagcugcugucccucaucaacgacaugcccaucaccaacgaccagaagaagcugaugagcaacaacgugcagaucgugcggcagcaguccuacagcaucaugugcaucaucaaggaggagguccuggcguacguggugcagcucccgcuguacggcgucaucgacacccccugcuggaagcugcacacgagcccccucugcaccaccaacaccaaggagggguccaacaucugccugacgcgcaccgaccggggcugguacugcgacaacgccggguccgugagcuucuucccccaggccgagaccugcaaggugcaguccaaccgcgucuucugcgacaccaugaacagccggacgcucccguccgaggugaaccugugcaacaucgacaucuucaaccccaaguacgacugcaagaucaugaccagcaagaccgacgucuccagcuccgugaucaccagccugggcgccaucguguccugcuacggcaagacgaagugcaccgccagcaacaagaaccgggggaucaucaagaccuucuccaacggcugcgacuacgucagcaacaaggggguggacaccgugagcgucggcaacacgcucuacuacgugaacaagcaggagggcaagucccuguacgugaagggggagcccaucaucaacuucuacgacccccuggucuucccgagcgacgaguucgacgcguccaucagccaggugaacgagaagaucaaccagucccucgccuucauccgcaagagcgacgagcugcugcacaacgugaacgucggcaaguccaccaccaacaucaugaucaccaccaucaucaucgugaucaucgugauccuccugcugcucaucgccgucgggcuguuccuguacugcaaggcccggagcacgcccgugacccuguccaaggaccagcucagcggcaucaacaacaucgccuucuccaacugaggacuaguggaagcauuuuccuggcugauuaaaagaaauuacucagcuauggucaucuguuccuguuagaaggcuaugcagcauauuauauacuaugcgcauguuaugaaaugcauaauaaaaaauuuuaaaaaaucuaaaagaucuaaaaaaaaaaaaaaaaaaaaaaaaaaaaaaaaaaaaaaaaaaaaaaaaaaaaaaaaaaaaaaaaugcaucccccccccccccccccccccccccccccccaaaggcucuuuucagagccaccagaauu

SEQ ID NO: 13357 - RNA, 1960 nt, Artificial Sequence
  mRNA product Design d-4 comprising derived and/or modified sequence from HRSV(Memphis-37)__AIY60640.1__F_DSCav1_mut0 (opt2)
gggagagucccgcagucggcguccagcggcucugcuuguucgugugugugucguugcaggccuuauucaagcuuaccauggagcuccccauccucaagaccaacgccaucaccaccauccucgccgccgucacccucugcuucgccuccucccagaacaucaccgaggaguucuaccaguccaccugcuccgccgucuccaagggcuaccucuccgcccuccgcaccggcugguacaccuccgucaucaccaucgagcucuccaacaucaaggagaacaagugcaacggcaccgacgccaaggucaagcucaucaagcaggagcucgacaaguacaagaacgccgucaccgagcuccagcuccucaugcaguccacccccgccgccggcuccggcuccgccaucgccuccggcaucgccgucugcaagguccuccaccucgagggcgaggucaacaagaucaagaacgcccuccucuccaccaacaaggccgucgucucccucuccaacggcgucuccguccucaccuucaagguccucgaccucaagaacuacaucgacaagcagcuccuccccauccucaacaagcaguccugcuccaucuccaacaucgagaccgucaucgaguuccagcagaagaacaaccgccuccucgagaucacccgcgaguucuccgucaacgccggcgucaccacccccgucuccaccuacaugcucaccaacuccgagcuccucucccucaucaacgacaugcccaucaccaacgaccagaagaagcucauguccaacaacguccagaucguccgccagcaguccuacuccaucaugugcaucaucaaggaggagguccucgccuacgucguccagcucccccucuacggcgucaucgacacccccugcuggaagcuccacaccuccccccucugcaccaccaacaccaaggagggcuccaacaucugccucacccgcaccgaccgcggcugguacugcgacaacgccggcuccgucuccuucuucccccaggccgagaccugcaagguccaguccaaccgcgucuucugcgacaccaugaacucccgcacccuccccuccgaggucaaccucugcaacaucgacaucuucaaccccaaguacgacugcaagaucaugaccuccaagaccgacgucuccuccuccgucaucaccucccucggcgccaucgucuccugcuacggcaagaccaagugcaccgccuccaacaagaaccgcggcaucaucaagaccuucuccaacggcugcgacuacgucuccaacaagggcgucgacaccgucuccgucggcaacacccucuacuacgucaacaagcaggagggcaagucccucuacgucaagggcgagcccaucaucaacuucuacgacccccucgucuuccccuccgacgaguucgacgccuccaucucccaggucaacgagaagaucaaccagucccucgccuucauccgcaaguccgacgagcuccuccacaacgucaacgucggcaaguccaccaccaacaucaugaucaccaccaucaucaucgucaucaucgucauccuccuccuccucaucgccgucggccucuuccucuacugcaaggcccgcuccacccccgucacccucuccaaggaccagcucuccggcaucaacaacaucgccuucuccaacugaggacuaguggaagcauuuuccuggcugauuaaaagaaauuacucagcuauggucaucuguuccuguuagaaggcuaugcagcauauuauauacuaugcgcauguuaugaaaugcauaauaaaaaauuuuaaaaaaucuaaaagaucuaaaaaaaaaaaaaaaaaaaaaaaaaaaaaaaaaaaaaaaaaaaaaaaaaaaaaaaaaaaaaaaaugcaucccccccccccccccccccccccccccccccaaaggcucuuuucagagccaccagaauu

SEQ ID NO: 13358 - RNA, 1960 nt, Artificial Sequence
  mRNA product Design d-4 comprising derived and/or modified sequence from HRSV(Memphis-37)__AIY60640.1__F_DSCav1_mut0 (opt3)
gggagagucccgcagucggcguccagcggcucugcuuguucgugugugugucguugcaggccuuauucaagcuuaccauggagcugcccauccucaagaccaacgccauuacaacuauacuugcugcagugacgcugugcuucgccagcucccagaauaucaccgaagaguuuuaccaaucuacauguucagcggucaguaaaggcuauuugagcgcuuuaagaacugggugguacaccuccguuauuacaaucgaacugucuaacauuaaggagaauaaaugcaacggaaccgacgccaaggugaaacuaaucaagcaggaacucgauaaguauaaaaaugcaguaacugagcugcagcuucugaugcagucgaccccugccgcugguucaggcagcgcaauagccagugggaucgcuguguguaaggucuugcaccucgagggagaagugaacaaaauuaagaaugcccugcuguccacaaacaaagcgguugugucucucagcaauggcgucuccguguuaacguucaagguacuggaccuuaagaacuacaucgauaaacaauugcugccaauucuaaauaagcagucaugcaguaucagcaacauagagacuguuauugaauuucagcagaaaaauaacaggcuccuggagaucacccgggaguucucugugaaugccggugucacaacuccgguguccaccuauaugcuuacaaacucagaacuguugagccucauuaacgacaugcccaucaccaaugaucaaaagaaacugaugaguaacaaugugcagaucguccgccagcagucuuacuccauuauguguauaaucaaggaggaaguuuuagcauaugugguacaacugccucucuacggggugauugacacgccaugcuggaaacuucauacuagcccccuguguacaaccaacacuaaggagggaucgaauaucugcuugacacgaaccgaucguggcugguacugugacaacgcuggcucugucuccuuuuucccucaggccgaaacgugcaaggugcagucaaauagaguguuuugugauaccaugaacaguagaacacugccaagcgaggugaaucucugcaacauagacauuuucaaucccaaauaugauugcaagaucaugacuuccaaaaccgacgucucuagcucagugaucacaagucugggggcaauuguauccuguuacggaaagacuaaaugcaccgcuagcaacaagaauagggguaucauuaagacauuuucuaacggcugugauuauguuucaaauaaagggguggacaccgucagugugggaaacacucuuuacuaugucaacaagcaagagggcaaaagccuguacgugaagggugaaccuauaaucaauuucuaugacccauugguuuuuccguccgaugaguucgacgccucuauuucgcagguuaacgagaaaaucaaucagagccucgcguuuauccggaaguccgaugaacuguuacacaacguaaaugucgggaagucaacgacaaacauuaugauaaccacuaucauuaucgugauuaucguuauacugcuacuccugaucgccgugggacuuuucuuguacugcaaagcacgcaguacccccgucacacugucuaaggaccagcucagcggcauuaauaacaucgcuuucuccaauugaggacuaguggaagcauuuuccuggcugauuaaaagaaauuacucagcuauggucaucuguuccuguuagaaggcuaugcagcauauuauauacuaugcgcauguuaugaaaugcauaauaaaaaauuuuaaaaaaucuaaaagaucuaaaaaaaaaaaaaaaaaaaaaaaaaaaaaaaaaaaaaaaaaaaaaaaaaaaaaaaaaaaaaaaaugcaucccccccccccccccccccccccccccccccaaaggcucuuuucagagccaccagaauu

SEQ ID NO: 13359 - RNA, 1960 nt, Artificial Sequence
  mRNA product Design d-4 comprising derived and/or modified sequence from HRSV(Memphis-37)__AIY60640.1__F_DSCav1_mut0 (opt4)
gggagagucccgcagucggcguccagcggcucugcuuguucgugugugugucguugcaggccuuauucaagcuuaccauggagcugcccauccugaagaccaacgccaucaccaccauccuggccgccgugacccugugcuucgccagcagccagaacaucaccgaggaguucuaccagagcaccugcagcgccgugagcaagggcuaccugagcgcccugagaaccggcugguacaccagcgugaucaccaucgagcugagcaacaucaaggagaacaagugcaacggcaccgacgccaaggugaagcugaucaagcaggagcuggacaaguacaagaacgccgugaccgagcugcagcugcugaugcagagcacccccgccgccggcagcggcagcgccaucgccagcggcaucgccgugugcaaggugcugcaccuggagggcgaggugaacaagaucaagaacgcccugcugagcaccaacaaggccguggugagccugagcaacggcgugagcgugcugaccuucaaggugcuggaccugaagaacuacaucgacaagcagcugcugcccauccugaacaagcagagcugcagcaucagcaacaucgagaccgugaucgaguuccagcagaagaacaacagacugcuggagaucaccagagaguucagcgugaacgccggcgugaccacccccgugagcaccuacaugcugaccaacagcgagcugcugagccugaucaacgacaugcccaucaccaacgaccagaagaagcugaugagcaacaacgugcagaucgugagacagcagagcuacagcaucaugugcaucaucaaggaggaggugcuggccuacguggugcagcugccccuguacggcgugaucgacacccccugcuggaagcugcacaccagcccccugugcaccaccaacaccaaggagggcagcaacaucugccugaccagaaccgacagaggcugguacugcgacaacgccggcagcgugagcuucuucccccaggccgagaccugcaaggugcagagcaacagaguguucugcgacaccaugaacagcagaacccugcccagcgaggugaaccugugcaacaucgacaucuucaaccccaaguacgacugcaagaucaugaccagcaagaccgacgugagcagcagcgugaucaccagccugggcgccaucgugagcugcuacggcaagaccaagugcaccgccagcaacaagaacagaggcaucaucaagaccuucagcaacggcugcgacuacgugagcaacaagggcguggacaccgugagcgugggcaacacccuguacuacgugaacaagcaggagggcaagagccuguacgugaagggcgagcccaucaucaacuucuacgacccccugguguuccccagcgacgaguucgacgccagcaucagccaggugaacgagaagaucaaccagagccuggccuucaucagaaagagcgacgagcugcugcacaacgugaacgugggcaagagcaccaccaacaucaugaucaccaccaucaucaucgugaucaucgugauccugcugcugcugaucgccgugggccuguuccuguacugcaaggccagaagcacccccgugacccugagcaaggaccagcugagcggcaucaacaacaucgccuucagcaacugaggacuaguggaagcauuuuccuggcugauuaaaagaaauuacucagcuauggucaucuguuccuguuagaaggcuaugcagcauauuauauacuaugcgcauguuaugaaaugcauaauaaaaaauuuuaaaaaaucuaaaagaucuaaaaaaaaaaaaaaaaaaaaaaaaaaaaaaaaaaaaaaaaaaaaaaaaaaaaaaaaaaaaaaaaugcaucccccccccccccccccccccccccccccccaaaggcucuuuucagagccaccagaauu

SEQ ID NO: 13360 - RNA, 1960 nt, Artificial Sequence
  mRNA product Design d-4 comprising derived and/or modified sequence from HRSV(Memphis-37)__AIY60640.1__F_DSCav1_mut0 (opt5)
gggagagucccgcagucggcguccagcggcucugcuuguucgugugugugucguugcaggccuuauucaagcuuaccauggagcugcccauccucaagaccaacgccauuacaacgauccuggcugccgugacccuuugcuucgcgagcucccagaauauuacagaagaguuuuaccaaucuaccuguagcgcugucuccaaaggcuaucugucugcccucagaacagggugguacaccagcguuaucacaauugaacuguccaacaucaaggagaauaaaugcaacggaaccgacgccaaggugaaacuuaucaagcaggaacuggauaaguauaaaaaugcugugacggagcuccagcugcugaugcagucuaccccugccgcuggcagcggguccgccauugcgagcggaaucgccgucuguaaggugcuccaccuggagggcgaaguuaacaaaauuaagaaugcccuucugucuacaaacaaagcuguggucucccucagcaauggggugucuguucugaccuucaaggugcuugaccugaagaacuacaucgauaaacaacuccugccgauucugaauaagcaguccugcagcaucucuaacauugagacagucaucgaauuucagcagaaaaauaaccggcuccuggagaucacccgcgaguucuccgugaaugcuggagugacgacacccgucagcaccuauaugcuuacaaacuccgaacugcucucucugauuaacgacaugccuaucaccaaugaucaaaagaaacuuaugagcaacaauguucagauugugagacagcaguccuacagcaucauguguauuaucaaggaggaagugcuggccuaugucgugcaacucccccuguacggcguuaucgacaccccuugcuggaaacugcauacaucuccccucuguacgaccaacacaaaggagggcuccaauauuugccugacccggacagaucgcgggugguacugugacaacgcgggaagcgugagcuuuuucccucaggccgaaaccugcaagguccagucuaauagaguguuuugugauacgaugaacuccagaacacugccgucugagguuaaucucugcaacaucgacauuuucaaucccaaauaugauugcaagaucaugaccagcaaaaccgacguguccagcucugucauuacaucccugggcgcuaucgugagcuguuacgggaagaccaaaugcacagccucuaacaagaaucggggaaucauuaagacguuuuccaacggcugugauuaugucagcaauaaagggguggacaccguuuccgugggaaacacacuuuacuaugucaacaagcaagagggcaaaucucuguacgugaagggcgaaccuaucauuaauuucuaugacccccucguuuuuccuagcgaugaguucgacgcuuccaucucucaggugaacgaaaagauuaaucagagccuggccuuuauccgcaaguccgaugagcugcuccacaacgucaauguggggaaaagcaccacaaacauuaugaucaccacgaucauuaucgugauuaucguuauucugcuucugcucaucgccgucggacuguuccuguacugcaaagcuagaucuacccccgugacacuuuccaaggaccagcucagcggcaucaauaacauugcguucucuaauugaggacuaguggaagcauuuuccuggcugauuaaaagaaauuacucagcuauggucaucuguuccuguuagaaggcuaugcagcauauuauauacuaugcgcauguuaugaaaugcauaauaaaaaauuuuaaaaaaucuaaaagaucuaaaaaaaaaaaaaaaaaaaaaaaaaaaaaaaaaaaaaaaaaaaaaaaaaaaaaaaaaaaaaaaaugcaucccccccccccccccccccccccccccccccaaaggcucuuuucagagccaccagaauu

SEQ ID NO: 13361 - RNA, 1960 nt, Artificial Sequence
  mRNA product Design d-4 comprising derived and/or modified sequence from HRSV(Memphis-37)__AIY60640.1__F_DSCav1_mut0 (opt6)
gggagagucccgcagucggcguccagcggcucugcuuguucgugugugugucguugcaggccuuauucaagcuuaccauggaauuaccaaucuuaaaaacaaacgccauaacaaccauccucgcagcaguaacccuaugcuuugcauccucacaaaacauaacugaagaauuuuaccaaucaacaugcucagcaguaucaaaaggauaucuaucagcccucagaacaggaugguacacaucagucauuacaaucgaacuuucaaacauaaaagaaaauaaauguaacggcacagaugccaaaguaaaauuaauuaaacaagaacuugacaaauacaaaaaugccguaacagaacuacaacuacuaaugcaaaguacuccugcugcaggaagcggaucugcaauagcaucagguauagcaguauguaaaguucuacaccuagaaggcgaaguaaacaaaauuaaaaacgcacuacucucaacaaauaaagcaguugucucccuaucaaacggaguaucaguauuaacuuucaaaguacuagaccucaaaaacuauauagacaaacaacuauuaccaauacuaaacaaacaaagcugcucuaucuccaacaucgaaacaguaauagaauuucaacaaaaaaauaauagacuacuugaaauaaccagagaauuuucaguaaacgccggaguaacaacaccaguaucaacuuacaugcuaacaaacuccgaacuacuaucauuaauaaacgacaugcccauaacaaacgaccaaaaaaaauuaaugucaaacaacguccaaaucguacgacaacaauccuauuccauaauguguauaauaaaagaagaaguacuagcauacguaguacaauuaccauuauauggaguaauagauaccccuugcuggaaacuacacacaucaccccuaugcacuacaaauacgaaagaagguucaaauauaugcuuaacuagaaccgauagagguugguauugugacaacgcuggaucaguaucauuuuucccacaagcagaaacaugcaaaguacaaucaaacagaguauuuugcgacacuaugaacucaagaacuuuaccauccgaaguuaaucuauguaacauagauauauuuaacccaaaauacgacugcaaaauaaugacaucaaaaacagauguaucaucaucaguuauaaccucccucggagcaauaguaucaugcuauggaaaaacaaaaugcacagcaucaaacaaaaaucguggaauuauaaaaacauucucaaacggcugugacuacgucagcaauaaaggaguagacacagucucaguaggaaacacuuuauacuauguuaacaaacaagaaggaaaaucacucuacgucaaaggcgaaccaauaauaaauuucuaugacccacucguauucccauccgacgaauuugacgcaucaauaucacaaguaaaugaaaaaauaaaccaaagccuagcauuuauacgaaaaucagacgaacuacuacacaacguaaacguagguaaaagcacaaccaauauaaugauaacaacaauaaucauaguaauaaucguaauauuacuauuacuaauagcuguaggauuguuccuauacugcaaagcaagaucaacaccaguaaccuuaucuaaggaccaacuaucaggaaucaauaacauugccuucucaaacuaaggacuaguggaagcauuuuccuggcugauuaaaagaaauuacucagcuauggucaucuguuccuguuagaaggcuaugcagcauauuauauacuaugcgcauguuaugaaaugcauaauaaaaaauuuuaaaaaaucuaaaagaucuaaaaaaaaaaaaaaaaaaaaaaaaaaaaaaaaaaaaaaaaaaaaaaaaaaaaaaaaaaaaaaaaugcaucccccccccccccccccccccccccccccccaaaggcucuuuucagagccaccagaauu

SEQ ID NO: 13362 - RNA, 1960 nt, Artificial Sequence
  mRNA product Design d-4 comprising derived and/or modified sequence from HRSV(Memphis-37)__AIY60640.1__F_DSCav1_mut0 (opt11)
gggagagucccgcagucggcguccagcggcucugcuuguucgugugugugucguugcaggccuuauucaagcuuaccauggaacuaccuauccuuaaaaccaacgcaaucaccaccauccuugccgcagucacacucugcuucgcauccucacagaacaucaccgaagaguucuaucaaucaaccugcuccgccguauccaaaggauaccucucagcccuccgcaccggcugguauaccucagucauaacaaucgaauuaucaaauaucaaggagaacaaaugcaacggcaccgacgccaaagucaaacucauaaaacaagaacuagacaaauacaaaaacgccgugacagaacuccaacuccucaugcaguccacccccgcagccggauccggcucagcaaucgccucgggcauugcaguaugcaaaguccuccaccucgaaggcgaagucaacaaaaucaaaaacgcccuccucuccaccaacaaagccgucgucucccucuccaacggcguaucuguccucacuuucaagguccucgaccucaaaaacuacaucgacaagcaacuacuuccaauccucaacaagcaauccugcucaaucucaaacaucgaaaccguaauagaguuccaacaaaagaacaaccgccuccucgaaaucacccgcgaguucuccguuaacgccggugucacuaccccagucagcaccuacaugcucaccaacuccgaacuccuuucucugaucaacgacaugccaaucaccaacgaucaaaagaaauuaauguccaacaacguccagaucguccgccaacaaagcuacagcaucaugugcaucauaaaagaagaaguacuugcguacguaguucaacuaccccuuuacggcguaaucgacaccccaugcuggaaacuccacaccuccccacuaugcaccaccaacaccaaagaaggauccaacaucugccuaacccgcaccgaccgcggcugguacugcgacaacgcugggagcgucucauucuucccacaagcagaaaccugcaaaguccaaucgaaccgcguauucugcgacaccaugaacuccagaacccuaccaagcgaagucaaucuuugcaacaucgacauauuuaaccccaaauacgacugcaaaaucaugacaucaaagaccgacgucucaucuucagucauuaccucacucggcgcaauugucagcugcuacggaaagaccaaauguaccgccuccaauaaaaaccguggaaucauaaaaaccuuuagcaacggcugcgacuacgucuccaacaaaggagucgacaccgucuccgucggcaacacccucuacuacgucaacaaacaagaaggaaaaucccucuacgugaaaggcgaacccauaauaaacuucuacgacccccuagucuuccccucugacgaguucgacgccuccaucucccaagucaacgaaaagauaaaucaaucacuagccuucauacgcaaaucugacgaacuucuccacaacgucaacgucggcaaauccaccaccaacauaaugaucacaacgauaauaaucgugaucauaguaauccuacuucuccucaucgcaguaggucuauuccuauacugcaaagcccgcagcacccccgucacccuaucaaaagaccaacucuccggcaucaacaacaucgccuucucaaacuaaggacuaguggaagcauuuuccuggcugauuaaaagaaauuacucagcuauggucaucuguuccuguuagaaggcuaugcagcauauuauauacuaugcgcauguuaugaaaugcauaauaaaaaauuuuaaaaaaucuaaaagaucuaaaaaaaaaaaaaaaaaaaaaaaaaaaaaaaaaaaaaaaaaaaaaaaaaaaaaaaaaaaaaaaaugcaucccccccccccccccccccccccccccccccaaaggcucuuuucagagccaccagaauu

SEQ ID NO: 13363 - RNA, 2057 nt, Artificial Sequence
  mRNA product Design d-5 comprising derived and/or modified sequence from HRSV(Memphis-37)__AIY60640.1__F_DSCav1_mut0 (opt1)
gggagagggcgcuuggcuugcaaggacccugagcugcggcauugaagcacacccaacccaacucgacugaagucagccucacugaaccggaucugagaaucuucucucucugggcuugccagggcucuccgaaccuagcuagcauccucuucaauuccaacuagaaagcuuaccauggagcugcccauccucaagaccaacgccaucaccacgauccuggccgcggugacccugugcuucgccagcucccagaacaucaccgaggaguucuaccagagcacgugcuccgccgucagcaagggcuaccucuccgcccugcgcaccgggugguacaccagcgugaucaccaucgagcuguccaacaucaaggagaacaagugcaacggcaccgacgccaaggugaagcucaucaagcaggagcuggacaaguacaagaacgcggucacggagcugcagcuccugaugcagagcaccccggccgccggcuccgggagcgcgaucgccuccggcaucgccgucugcaaggugcugcaccucgagggcgaggugaacaagaucaagaacgcccugcuguccaccaacaaggccgucgugagccucuccaacggggugagcguccugaccuucaaggugcuggaccucaagaacuacaucgacaagcagcugcugcccauccugaacaagcagagcugcuccaucagcaacaucgagaccgucaucgaguuccagcagaagaacaaccgccuccuggagaucacgcgggaguucagcgugaacgcgggcgugaccacccccgucuccaccuacaugcugacgaacagcgagcuccugucccugaucaacgacaugccgaucaccaacgaccagaagaagcucaugagcaacaacgugcagaucgugcgccagcaguccuacagcaucaugugcaucaucaaggaggagguccuggccuacguggugcagcugccccucuacggggucaucgacacccccugcuggaagcugcacaccagcccccugugcacgaccaacaccaaggagggcuccaacaucugccucacccggacggaccgcgggugguacugcgacaacgccggcagcguguccuucuucccgcaggccgagaccugcaagguccagagcaaccggguguucugcgacaccaugaacucccggacccugcccagcgaggugaaccucugcaacaucgacaucuucaaccccaaguacgacugcaagaucaugacguccaagaccgacgucagcuccagcgugaucaccucccugggcgccaucgugagcugcuacgggaagaccaagugcacggcgagcaacaagaaccgcggcaucaucaagaccuucuccaacgggugcgacuacgucagcaacaagggcguggacaccguguccgucggcaacacccuguacuacgugaacaagcaggagggcaagagccucuacgugaagggggagcccaucaucaacuucuacgacccgcuggucuuccccuccgacgaguucgacgccagcaucucccaggugaacgagaagaucaaccagagccuggccuucauccggaaguccgacgagcuccugcacaacgugaacgucggcaagagcaccacgaacaucaugaucaccaccaucaucaucgugaucaucgugauccugcugcuccugaucgccgucgggcuguuccucuacugcaaggcccgcuccacccccgugacgcugagcaaggaccagcuguccgggaucaacaacaucgcguucagcaacugaggacuaguggaagcauuuuccuggcugauuaaaagaaauuacucagcuauggucaucuguuccuguuagaaggcuaugcagcauauuauauacuaugcgcauguuaugaaaugcauaauaaaaaauuuuaaaaaaucuaaaagaucuaaaaaaaaaaaaaaaaaaaaaaaaaaaaaaaaaaaaaaaaaaaaaaaaaaaaaaaaaaaaaaaaugcaucccccccccccccccccccccccccccccccaaaggcucuuuucagagccaccagaauu

SEQ ID NO: 13364 - RNA, 2057 nt, Artificial Sequence
  mRNA product Design d-5 comprising derived and/or modified sequence from HRSV(Memphis-37)__AIY60640.1__F_DSCav1_mut0 (opt1)
gggagagggcgcuuggcuugcaaggacccugagcugcggcauugaagcacacccaacccaacucgacugaagucagccucacugaaccggaucugagaaucuucucucucugggcuugccagggcucuccgaaccuagcuagcauccucuucaauuccaacuagaaagcuuaccauggagcugcccauccucaagaccaacgccaucaccacgauccuggccgcggugacccugugcuucgccagcucccagaacaucaccgaggaguucuaccagagcacgugcuccgccgucagcaagggcuaccucuccgcccugcgcaccgggugguacaccagcgugaucaccaucgagcuguccaacaucaaggagaacaagugcaacggcaccgacgccaaggugaagcucaucaagcaggagcuggacaaguacaagaacgcggucacggagcugcagcuccugaugcagagcaccccggccgccggguccggcagcgccaucgcguccgggaucgccgugugcaaggugcugcaccucgagggcgaggucaacaagaucaagaacgcccugcugagcaccaacaaggccguggugucccucagcaacggcgucuccgugcugaccuucaaggugcuggaccucaagaacuacaucgacaagcagcugcugcccauccucaacaagcagagcugcuccaucagcaacaucgagacggucaucgaguuccagcagaagaacaaccggcugcuggagaucacccgcgaguucuccgugaacgccggggugaccacccccgucagcacguacaugcucaccaacagcgagcugcugucccucaucaacgacaugcccaucaccaacgaccagaagaagcugaugagcaacaacgugcagaucgugcggcagcaguccuacagcaucaugugcaucaucaaggaggagguccuggcguacguggugcagcucccgcuguacggcgucaucgacacccccugcuggaagcugcacacgagcccccucugcaccaccaacaccaaggagggguccaacaucugccugacgcgcaccgaccggggcugguacugcgacaacgccggguccgugagcuucuucccccaggccgagaccugcaaggugcaguccaaccgcgucuucugcgacaccaugaacagccggacgcucccguccgaggugaaccugugcaacaucgacaucuucaaccccaaguacgacugcaagaucaugaccagcaagaccgacgucuccagcuccgugaucaccagccugggcgccaucguguccugcuacggcaagacgaagugcaccgccagcaacaagaaccgggggaucaucaagaccuucuccaacggcugcgacuacgucagcaacaaggggguggacaccgugagcgucggcaacacgcucuacuacgugaacaagcaggagggcaagucccuguacgugaagggggagcccaucaucaacuucuacgacccccuggucuucccgagcgacgaguucgacgcguccaucagccaggugaacgagaagaucaaccagucccucgccuucauccgcaagagcgacgagcugcugcacaacgugaacgucggcaaguccaccaccaacaucaugaucaccaccaucaucaucgugaucaucgugauccuccugcugcucaucgccgucgggcuguuccuguacugcaaggcccggagcacgcccgugacccuguccaaggaccagcucagcggcaucaacaacaucgccuucuccaacugaggacuaguggaagcauuuuccuggcugauuaaaagaaauuacucagcuauggucaucuguuccuguuagaaggcuaugcagcauauuauauacuaugcgcauguuaugaaaugcauaauaaaaaauuuuaaaaaaucuaaaagaucuaaaaaaaaaaaaaaaaaaaaaaaaaaaaaaaaaaaaaaaaaaaaaaaaaaaaaaaaaaaaaaaaugcaucccccccccccccccccccccccccccccccaaaggcucuuuucagagccaccagaauu

SEQ ID NO: 13365 - RNA, 2057 nt, Artificial Sequence
  mRNA product Design d-5 comprising derived and/or modified sequence from HRSV(Memphis-37)__AIY60640.1__F_DSCav1_mut0 (opt2)
gggagagggcgcuuggcuugcaaggacccugagcugcggcauugaagcacacccaacccaacucgacugaagucagccucacugaaccggaucugagaaucuucucucucugggcuugccagggcucuccgaaccuagcuagcauccucuucaauuccaacuagaaagcuuaccauggagcuccccauccucaagaccaacgccaucaccaccauccucgccgccgucacccucugcuucgccuccucccagaacaucaccgaggaguucuaccaguccaccugcuccgccgucuccaagggcuaccucuccgcccuccgcaccggcugguacaccuccgucaucaccaucgagcucuccaacaucaaggagaacaagugcaacggcaccgacgccaaggucaagcucaucaagcaggagcucgacaaguacaagaacgccgucaccgagcuccagcuccucaugcaguccacccccgccgccggcuccggcuccgccaucgccuccggcaucgccgucugcaagguccuccaccucgagggcgaggucaacaagaucaagaacgcccuccucuccaccaacaaggccgucgucucccucuccaacggcgucuccguccucaccuucaagguccucgaccucaagaacuacaucgacaagcagcuccuccccauccucaacaagcaguccugcuccaucuccaacaucgagaccgucaucgaguuccagcagaagaacaaccgccuccucgagaucacccgcgaguucuccgucaacgccggcgucaccacccccgucuccaccuacaugcucaccaacuccgagcuccucucccucaucaacgacaugcccaucaccaacgaccagaagaagcucauguccaacaacguccagaucguccgccagcaguccuacuccaucaugugcaucaucaaggaggagguccucgccuacgucguccagcucccccucuacggcgucaucgacacccccugcuggaagcuccacaccuccccccucugcaccaccaacaccaaggagggcuccaacaucugccucacccgcaccgaccgcggcugguacugcgacaacgccggcuccgucuccuucuucccccaggccgagaccugcaagguccaguccaaccgcgucuucugcgacaccaugaacucccgcacccuccccuccgaggucaaccucugcaacaucgacaucuucaaccccaaguacgacugcaagaucaugaccuccaagaccgacgucuccuccuccgucaucaccucccucggcgccaucgucuccugcuacggcaagaccaagugcaccgccuccaacaagaaccgcggcaucaucaagaccuucuccaacggcugcgacuacgucuccaacaagggcgucgacaccgucuccgucggcaacacccucuacuacgucaacaagcaggagggcaagucccucuacgucaagggcgagcccaucaucaacuucuacgacccccucgucuuccccuccgacgaguucgacgccuccaucucccaggucaacgagaagaucaaccagucccucgccuucauccgcaaguccgacgagcuccuccacaacgucaacgucggcaaguccaccaccaacaucaugaucaccaccaucaucaucgucaucaucgucauccuccuccuccucaucgccgucggccucuuccucuacugcaaggcccgcuccacccccgucacccucuccaaggaccagcucuccggcaucaacaacaucgccuucuccaacugaggacuaguggaagcauuuuccuggcugauuaaaagaaauuacucagcuauggucaucuguuccuguuagaaggcuaugcagcauauuauauacuaugcgcauguuaugaaaugcauaauaaaaaauuuuaaaaaaucuaaaagaucuaaaaaaaaaaaaaaaaaaaaaaaaaaaaaaaaaaaaaaaaaaaaaaaaaaaaaaaaaaaaaaaaugcaucccccccccccccccccccccccccccccccaaaggcucuuuucagagccaccagaauu

SEQ ID NO: 13366 - RNA, 2057 nt, Artificial Sequence
  mRNA product Design d-5 comprising derived and/or modified sequence from HRSV(Memphis-37)__AIY60640.1__F_DSCav1_mut0 (opt3)
gggagagggcgcuuggcuugcaaggacccugagcugcggcauugaagcacacccaacccaacucgacugaagucagccucacugaaccggaucugagaaucuucucucucugggcuugccagggcucuccgaaccuagcuagcauccucuucaauuccaacuagaaagcuuaccauggagcugcccauccucaagaccaacgccauuacaacuauacuugcugcagugacgcugugcuucgccagcucccagaauaucaccgaagaguuuuaccaaucuacauguucagcggucaguaaaggcuauuugagcgcuuuaagaacugggugguacaccuccguuauuacaaucgaacugucuaacauuaaggagaauaaaugcaacggaaccgacgccaaggugaaacuaaucaagcaggaacucgauaaguauaaaaaugcaguaacugagcugcagcuucugaugcagucgaccccugccgcugguucaggcagcgcaauagccagugggaucgcuguguguaaggucuugcaccucgagggagaagugaacaaaauuaagaaugcccugcuguccacaaacaaagcgguugugucucucagcaauggcgucuccguguuaacguucaagguacuggaccuuaagaacuacaucgauaaacaauugcugccaauucuaaauaagcagucaugcaguaucagcaacauagagacuguuauugaauuucagcagaaaaauaacaggcuccuggagaucacccgggaguucucugugaaugccggugucacaacuccgguguccaccuauaugcuuacaaacucagaacuguugagccucauuaacgacaugcccaucaccaaugaucaaaagaaacugaugaguaacaaugugcagaucguccgccagcagucuuacuccauuauguguauaaucaaggaggaaguuuuagcauaugugguacaacugccucucuacggggugauugacacgccaugcuggaaacuucauacuagcccccuguguacaaccaacacuaaggagggaucgaauaucugcuugacacgaaccgaucguggcugguacugugacaacgcuggcucugucuccuuuuucccucaggccgaaacgugcaaggugcagucaaauagaguguuuugugauaccaugaacaguagaacacugccaagcgaggugaaucucugcaacauagacauuuucaaucccaaauaugauugcaagaucaugacuuccaaaaccgacgucucuagcucagugaucacaagucugggggcaauuguauccuguuacggaaagacuaaaugcaccgcuagcaacaagaauagggguaucauuaagacauuuucuaacggcugugauuauguuucaaauaaagggguggacaccgucagugugggaaacacucuuuacuaugucaacaagcaagagggcaaaagccuguacgugaagggugaaccuauaaucaauuucuaugacccauugguuuuuccguccgaugaguucgacgccucuauuucgcagguuaacgagaaaaucaaucagagccucgcguuuauccggaaguccgaugaacuguuacacaacguaaaugucgggaagucaacgacaaacauuaugauaaccacuaucauuaucgugauuaucguuauacugcuacuccugaucgccgugggacuuuucuuguacugcaaagcacgcaguacccccgucacacugucuaaggaccagcucagcggcauuaauaacaucgcuuucuccaauugaggacuaguggaagcauuuuccuggcugauuaaaagaaauuacucagcuauggucaucuguuccuguuagaaggcuaugcagcauauuauauacuaugcgcauguuaugaaaugcauaauaaaaaauuuuaaaaaaucuaaaagaucuaaaaaaaaaaaaaaaaaaaaaaaaaaaaaaaaaaaaaaaaaaaaaaaaaaaaaaaaaaaaaaaaugcaucccccccccccccccccccccccccccccccaaaggcucuuuucagagccaccagaauu

SEQ ID NO: 13367 - RNA, 2057 nt, Artificial Sequence
  mRNA product Design d-5 comprising derived and/or modified sequence from HRSV(Memphis-37)__AIY60640.1__F_DSCav1_mut0 (opt4)
gggagagggcgcuuggcuugcaaggacccugagcugcggcauugaagcacacccaacccaacucgacugaagucagccucacugaaccggaucugagaaucuucucucucugggcuugccagggcucuccgaaccuagcuagcauccucuucaauuccaacuagaaagcuuaccauggagcugcccauccugaagaccaacgccaucaccaccauccuggccgccgugacccugugcuucgccagcagccagaacaucaccgaggaguucuaccagagcaccugcagcgccgugagcaagggcuaccugagcgcccugagaaccggcugguacaccagcgugaucaccaucgagcugagcaacaucaaggagaacaagugcaacggcaccgacgccaaggugaagcugaucaagcaggagcuggacaaguacaagaacgccgugaccgagcugcagcugcugaugcagagcacccccgccgccggcagcggcagcgccaucgccagcggcaucgccgugugcaaggugcugcaccuggagggcgaggugaacaagaucaagaacgcccugcugagcaccaacaaggccguggugagccugagcaacggcgugagcgugcugaccuucaaggugcuggaccugaagaacuacaucgacaagcagcugcugcccauccugaacaagcagagcugcagcaucagcaacaucgagaccgugaucgaguuccagcagaagaacaacagacugcuggagaucaccagagaguucagcgugaacgccggcgugaccacccccgugagcaccuacaugcugaccaacagcgagcugcugagccugaucaacgacaugcccaucaccaacgaccagaagaagcugaugagcaacaacgugcagaucgugagacagcagagcuacagcaucaugugcaucaucaaggaggaggugcuggccuacguggugcagcugccccuguacggcgugaucgacacccccugcuggaagcugcacaccagcccccugugcaccaccaacaccaaggagggcagcaacaucugccugaccagaaccgacagaggcugguacugcgacaacgccggcagcgugagcuucuucccccaggccgagaccugcaaggugcagagcaacagaguguucugcgacaccaugaacagcagaacccugcccagcgaggugaaccugugcaacaucgacaucuucaaccccaaguacgacugcaagaucaugaccagcaagaccgacgugagcagcagcgugaucaccagccugggcgccaucgugagcugcuacggcaagaccaagugcaccgccagcaacaagaacagaggcaucaucaagaccuucagcaacggcugcgacuacgugagcaacaagggcguggacaccgugagcgugggcaacacccuguacuacgugaacaagcaggagggcaagagccuguacgugaagggcgagcccaucaucaacuucuacgacccccugguguuccccagcgacgaguucgacgccagcaucagccaggugaacgagaagaucaaccagagccuggccuucaucagaaagagcgacgagcugcugcacaacgugaacgugggcaagagcaccaccaacaucaugaucaccaccaucaucaucgugaucaucgugauccugcugcugcugaucgccgugggccuguuccuguacugcaaggccagaagcacccccgugacccugagcaaggaccagcugagcggcaucaacaacaucgccuucagcaacugaggacuaguggaagcauuuuccuggcugauuaaaagaaauuacucagcuauggucaucuguuccuguuagaaggcuaugcagcauauuauauacuaugcgcauguuaugaaaugcauaauaaaaaauuuuaaaaaaucuaaaagaucuaaaaaaaaaaaaaaaaaaaaaaaaaaaaaaaaaaaaaaaaaaaaaaaaaaaaaaaaaaaaaaaaugcaucccccccccccccccccccccccccccccccaaaggcucuuuucagagccaccagaauu

SEQ ID NO: 13368 - RNA, 2057 nt, Artificial Sequence
  mRNA product Design d-5 comprising derived and/or modified sequence from HRSV(Memphis-37)__AIY60640.1__F_DSCav1_mut0 (opt5)
gggagagggcgcuuggcuugcaaggacccugagcugcggcauugaagcacacccaacccaacucgacugaagucagccucacugaaccggaucugagaaucuucucucucugggcuugccagggcucuccgaaccuagcuagcauccucuucaauuccaacuagaaagcuuaccauggagcugcccauccucaagaccaacgccauuacaacgauccuggcugccgugacccuuugcuucgcgagcucccagaauauuacagaagaguuuuaccaaucuaccuguagcgcugucuccaaaggcuaucugucugcccucagaacagggugguacaccagcguuaucacaauugaacuguccaacaucaaggagaauaaaugcaacggaaccgacgccaaggugaaacuuaucaagcaggaacuggauaaguauaaaaaugcugugacggagcuccagcugcugaugcagucuaccccugccgcuggcagcggguccgccauugcgagcggaaucgccgucuguaaggugcuccaccuggagggcgaaguuaacaaaauuaagaaugcccuucugucuacaaacaaagcuguggucucccucagcaauggggugucuguucugaccuucaaggugcuugaccugaagaacuacaucgauaaacaacuccugccgauucugaauaagcaguccugcagcaucucuaacauugagacagucaucgaauuucagcagaaaaauaaccggcuccuggagaucacccgcgaguucuccgugaaugcuggagugacgacacccgucagcaccuauaugcuuacaaacuccgaacugcucucucugauuaacgacaugccuaucaccaaugaucaaaagaaacuuaugagcaacaauguucagauugugagacagcaguccuacagcaucauguguauuaucaaggaggaagugcuggccuaugucgugcaacucccccuguacggcguuaucgacaccccuugcuggaaacugcauacaucuccccucuguacgaccaacacaaaggagggcuccaauauuugccugacccggacagaucgcgggugguacugugacaacgcgggaagcgugagcuuuuucccucaggccgaaaccugcaagguccagucuaauagaguguuuugugauacgaugaacuccagaacacugccgucugagguuaaucucugcaacaucgacauuuucaaucccaaauaugauugcaagaucaugaccagcaaaaccgacguguccagcucugucauuacaucccugggcgcuaucgugagcuguuacgggaagaccaaaugcacagccucuaacaagaaucggggaaucauuaagacguuuuccaacggcugugauuaugucagcaauaaagggguggacaccguuuccgugggaaacacacuuuacuaugucaacaagcaagagggcaaaucucuguacgugaagggcgaaccuaucauuaauuucuaugacccccucguuuuuccuagcgaugaguucgacgcuuccaucucucaggugaacgaaaagauuaaucagagccuggccuuuauccgcaaguccgaugagcugcuccacaacgucaauguggggaaaagcaccacaaacauuaugaucaccacgaucauuaucgugauuaucguuauucugcuucugcucaucgccgucggacuguuccuguacugcaaagcuagaucuacccccgugacacuuuccaaggaccagcucagcggcaucaauaacauugcguucucuaauugaggacuaguggaagcauuuuccuggcugauuaaaagaaauuacucagcuauggucaucuguuccuguuagaaggcuaugcagcauauuauauacuaugcgcauguuaugaaaugcauaauaaaaaauuuuaaaaaaucuaaaagaucuaaaaaaaaaaaaaaaaaaaaaaaaaaaaaaaaaaaaaaaaaaaaaaaaaaaaaaaaaaaaaaaaugcaucccccccccccccccccccccccccccccccaaaggcucuuuucagagccaccagaauu

SEQ ID NO: 13369 - RNA, 2057 nt, Artificial Sequence
  mRNA product Design d-5 comprising derived and/or modified sequence from HRSV(Memphis-37)__AIY60640.1__F_DSCav1_mut0 (opt6)
gggagagggcgcuuggcuugcaaggacccugagcugcggcauugaagcacacccaacccaacucgacugaagucagccucacugaaccggaucugagaaucuucucucucugggcuugccagggcucuccgaaccuagcuagcauccucuucaauuccaacuagaaagcuuaccauggaauuaccaaucuuaaaaacaaacgccauaacaaccauccucgcagcaguaacccuaugcuuugcauccucacaaaacauaacugaagaauuuuaccaaucaacaugcucagcaguaucaaaaggauaucuaucagcccucagaacaggaugguacacaucagucauuacaaucgaacuuucaaacauaaaagaaaauaaauguaacggcacagaugccaaaguaaaauuaauuaaacaagaacuugacaaauacaaaaaugccguaacagaacuacaacuacuaaugcaaaguacuccugcugcaggaagcggaucugcaauagcaucagguauagcaguauguaaaguucuacaccuagaaggcgaaguaaacaaaauuaaaaacgcacuacucucaacaaauaaagcaguugucucccuaucaaacggaguaucaguauuaacuuucaaaguacuagaccucaaaaacuauauagacaaacaacuauuaccaauacuaaacaaacaaagcugcucuaucuccaacaucgaaacaguaauagaauuucaacaaaaaaauaauagacuacuugaaauaaccagagaauuuucaguaaacgccggaguaacaacaccaguaucaacuuacaugcuaacaaacuccgaacuacuaucauuaauaaacgacaugcccauaacaaacgaccaaaaaaaauuaaugucaaacaacguccaaaucguacgacaacaauccuauuccauaauguguauaauaaaagaagaaguacuagcauacguaguacaauuaccauuauauggaguaauagauaccccuugcuggaaacuacacacaucaccccuaugcacuacaaauacgaaagaagguucaaauauaugcuuaacuagaaccgauagagguugguauugugacaacgcuggaucaguaucauuuuucccacaagcagaaacaugcaaaguacaaucaaacagaguauuuugcgacacuaugaacucaagaacuuuaccauccgaaguuaaucuauguaacauagauauauuuaacccaaaauacgacugcaaaauaaugacaucaaaaacagauguaucaucaucaguuauaaccucccucggagcaauaguaucaugcuauggaaaaacaaaaugcacagcaucaaacaaaaaucguggaauuauaaaaacauucucaaacggcugugacuacgucagcaauaaaggaguagacacagucucaguaggaaacacuuuauacuauguuaacaaacaagaaggaaaaucacucuacgucaaaggcgaaccaauaauaaauuucuaugacccacucguauucccauccgacgaauuugacgcaucaauaucacaaguaaaugaaaaaauaaaccaaagccuagcauuuauacgaaaaucagacgaacuacuacacaacguaaacguagguaaaagcacaaccaauauaaugauaacaacaauaaucauaguaauaaucguaauauuacuauuacuaauagcuguaggauuguuccuauacugcaaagcaagaucaacaccaguaaccuuaucuaaggaccaacuaucaggaaucaauaacauugccuucucaaacuaaggacuaguggaagcauuuuccuggcugauuaaaagaaauuacucagcuauggucaucuguuccuguuagaaggcuaugcagcauauuauauacuaugcgcauguuaugaaaugcauaauaaaaaauuuuaaaaaaucuaaaagaucuaaaaaaaaaaaaaaaaaaaaaaaaaaaaaaaaaaaaaaaaaaaaaaaaaaaaaaaaaaaaaaaaugcaucccccccccccccccccccccccccccccccaaaggcucuuuucagagccaccagaauu

SEQ ID NO: 13370 - RNA, 2057 nt, Artificial Sequence
  mRNA product Design d-5 comprising derived and/or modified sequence from HRSV(Memphis-37)__AIY60640.1__F_DSCav1_mut0 (opt11)
gggagagggcgcuuggcuugcaaggacccugagcugcggcauugaagcacacccaacccaacucgacugaagucagccucacugaaccggaucugagaaucuucucucucugggcuugccagggcucuccgaaccuagcuagcauccucuucaauuccaacuagaaagcuuaccauggaacuaccuauccuuaaaaccaacgcaaucaccaccauccuugccgcagucacacucugcuucgcauccucacagaacaucaccgaagaguucuaucaaucaaccugcuccgccguauccaaaggauaccucucagcccuccgcaccggcugguauaccucagucauaacaaucgaauuaucaaauaucaaggagaacaaaugcaacggcaccgacgccaaagucaaacucauaaaacaagaacuagacaaauacaaaaacgccgugacagaacuccaacuccucaugcaguccacccccgcagccggauccggcucagcaaucgccucgggcauugcaguaugcaaaguccuccaccucgaaggcgaagucaacaaaaucaaaaacgcccuccucuccaccaacaaagccgucgucucccucuccaacggcguaucuguccucacuuucaagguccucgaccucaaaaacuacaucgacaagcaacuacuuccaauccucaacaagcaauccugcucaaucucaaacaucgaaaccguaauagaguuccaacaaaagaacaaccgccuccucgaaaucacccgcgaguucuccguuaacgccggugucacuaccccagucagcaccuacaugcucaccaacuccgaacuccuuucucugaucaacgacaugccaaucaccaacgaucaaaagaaauuaauguccaacaacguccagaucguccgccaacaaagcuacagcaucaugugcaucauaaaagaagaaguacuugcguacguaguucaacuaccccuuuacggcguaaucgacaccccaugcuggaaacuccacaccuccccacuaugcaccaccaacaccaaagaaggauccaacaucugccuaacccgcaccgaccgcggcugguacugcgacaacgcugggagcgucucauucuucccacaagcagaaaccugcaaaguccaaucgaaccgcguauucugcgacaccaugaacuccagaacccuaccaagcgaagucaaucuuugcaacaucgacauauuuaaccccaaauacgacugcaaaaucaugacaucaaagaccgacgucucaucuucagucauuaccucacucggcgcaauugucagcugcuacggaaagaccaaauguaccgccuccaauaaaaaccguggaaucauaaaaaccuuuagcaacggcugcgacuacgucuccaacaaaggagucgacaccgucuccgucggcaacacccucuacuacgucaacaaacaagaaggaaaaucccucuacgugaaaggcgaacccauaauaaacuucuacgacccccuagucuuccccucugacgaguucgacgccuccaucucccaagucaacgaaaagauaaaucaaucacuagccuucauacgcaaaucugacgaacuucuccacaacgucaacgucggcaaauccaccaccaacauaaugaucacaacgauaauaaucgugaucauaguaauccuacuucuccucaucgcaguaggucuauuccuauacugcaaagcccgcagcacccccgucacccuaucaaaagaccaacucuccggcaucaacaacaucgccuucucaaacuaaggacuaguggaagcauuuuccuggcugauuaaaagaaauuacucagcuauggucaucuguuccuguuagaaggcuaugcagcauauuauauacuaugcgcauguuaugaaaugcauaauaaaaaauuuuaaaaaaucuaaaagaucuaaaaaaaaaaaaaaaaaaaaaaaaaaaaaaaaaaaaaaaaaaaaaaaaaaaaaaaaaaaaaaaaugcaucccccccccccccccccccccccccccccccaaaggcucuuuucagagccaccagaauu

SEQ ID NO: 13371 - RNA, 1937 nt, Artificial Sequence
  mRNA product Design e-1 comprising derived and/or modified sequence from HRSV(Memphis-37)__AIY60640.1__F_DSCav1_mut0 (opt1)
gggagaauauaagcguuggcggagcgucgguuguagcacucugcgcgcccgcucuucugcugcuguuugucuacuuccuccugcuuccccgccgccgccgccgccaucaagcuuaccauggagcugcccauccucaagaccaacgccaucaccacgauccuggccgcggugacccugugcuucgccagcucccagaacaucaccgaggaguucuaccagagcacgugcuccgccgucagcaagggcuaccucuccgcccugcgcaccgggugguacaccagcgugaucaccaucgagcuguccaacaucaaggagaacaagugcaacggcaccgacgccaaggugaagcucaucaagcaggagcuggacaaguacaagaacgcggucacggagcugcagcuccugaugcagagcaccccggccgccggcuccgggagcgcgaucgccuccggcaucgccgucugcaaggugcugcaccucgagggcgaggugaacaagaucaagaacgcccugcuguccaccaacaaggccgucgugagccucuccaacggggugagcguccugaccuucaaggugcuggaccucaagaacuacaucgacaagcagcugcugcccauccugaacaagcagagcugcuccaucagcaacaucgagaccgucaucgaguuccagcagaagaacaaccgccuccuggagaucacgcgggaguucagcgugaacgcgggcgugaccacccccgucuccaccuacaugcugacgaacagcgagcuccugucccugaucaacgacaugccgaucaccaacgaccagaagaagcucaugagcaacaacgugcagaucgugcgccagcaguccuacagcaucaugugcaucaucaaggaggagguccuggccuacguggugcagcugccccucuacggggucaucgacacccccugcuggaagcugcacaccagcccccugugcacgaccaacaccaaggagggcuccaacaucugccucacccggacggaccgcgggugguacugcgacaacgccggcagcguguccuucuucccgcaggccgagaccugcaagguccagagcaaccggguguucugcgacaccaugaacucccggacccugcccagcgaggugaaccucugcaacaucgacaucuucaaccccaaguacgacugcaagaucaugacguccaagaccgacgucagcuccagcgugaucaccucccugggcgccaucgugagcugcuacgggaagaccaagugcacggcgagcaacaagaaccgcggcaucaucaagaccuucuccaacgggugcgacuacgucagcaacaagggcguggacaccguguccgucggcaacacccuguacuacgugaacaagcaggagggcaagagccucuacgugaagggggagcccaucaucaacuucuacgacccgcuggucuuccccuccgacgaguucgacgccagcaucucccaggugaacgagaagaucaaccagagccuggccuucauccggaaguccgacgagcuccugcacaacgugaacgucggcaagagcaccacgaacaucaugaucaccaccaucaucaucgugaucaucgugauccugcugcuccugaucgccgucgggcuguuccucuacugcaaggcccgcuccacccccgugacgcugagcaaggaccagcuguccgggaucaacaacaucgcguucagcaacugaggacuaguguccaccugucccuccugggcugcuggauugucucguuuuccugccaaauaaacaggaucagcgcuuuacagaucuaaaaaaaaaaaaaaaaaaaaaaaaaaaaaaaaaaaaaaaaaaaaaaaaaaaaaaaaaaaaaaaaugcaucccccccccccccccccccccccccccccccaaaggcucuuuucagagccaccagaauu

SEQ ID NO: 13372 - RNA, 1937 nt, Artificial Sequence
  mRNA product Design e-1 comprising derived and/or modified sequence from HRSV(Memphis-37)__AIY60640.1__F_DSCav1_mut0 (opt1)
gggagaauauaagcguuggcggagcgucgguuguagcacucugcgcgcccgcucuucugcugcuguuugucuacuuccuccugcuuccccgccgccgccgccgccaucaagcuuaccauggagcugcccauccucaagaccaacgccaucaccacgauccuggccgcggugacccugugcuucgccagcucccagaacaucaccgaggaguucuaccagagcacgugcuccgccgucagcaagggcuaccucuccgcccugcgcaccgggugguacaccagcgugaucaccaucgagcuguccaacaucaaggagaacaagugcaacggcaccgacgccaaggugaagcucaucaagcaggagcuggacaaguacaagaacgcggucacggagcugcagcuccugaugcagagcaccccggccgccggguccggcagcgccaucgcguccgggaucgccgugugcaaggugcugcaccucgagggcgaggucaacaagaucaagaacgcccugcugagcaccaacaaggccguggugucccucagcaacggcgucuccgugcugaccuucaaggugcuggaccucaagaacuacaucgacaagcagcugcugcccauccucaacaagcagagcugcuccaucagcaacaucgagacggucaucgaguuccagcagaagaacaaccggcugcuggagaucacccgcgaguucuccgugaacgccggggugaccacccccgucagcacguacaugcucaccaacagcgagcugcugucccucaucaacgacaugcccaucaccaacgaccagaagaagcugaugagcaacaacgugcagaucgugcggcagcaguccuacagcaucaugugcaucaucaaggaggagguccuggcguacguggugcagcucccgcuguacggcgucaucgacacccccugcuggaagcugcacacgagcccccucugcaccaccaacaccaaggagggguccaacaucugccugacgcgcaccgaccggggcugguacugcgacaacgccggguccgugagcuucuucccccaggccgagaccugcaaggugcaguccaaccgcgucuucugcgacaccaugaacagccggacgcucccguccgaggugaaccugugcaacaucgacaucuucaaccccaaguacgacugcaagaucaugaccagcaagaccgacgucuccagcuccgugaucaccagccugggcgccaucguguccugcuacggcaagacgaagugcaccgccagcaacaagaaccgggggaucaucaagaccuucuccaacggcugcgacuacgucagcaacaaggggguggacaccgugagcgucggcaacacgcucuacuacgugaacaagcaggagggcaagucccuguacgugaagggggagcccaucaucaacuucuacgacccccuggucuucccgagcgacgaguucgacgcguccaucagccaggugaacgagaagaucaaccagucccucgccuucauccgcaagagcgacgagcugcugcacaacgugaacgucggcaaguccaccaccaacaucaugaucaccaccaucaucaucgugaucaucgugauccuccugcugcucaucgccgucgggcuguuccuguacugcaaggcccggagcacgcccgugacccuguccaaggaccagcucagcggcaucaacaacaucgccuucuccaacugaggacuaguguccaccugucccuccugggcugcuggauugucucguuuuccugccaaauaaacaggaucagcgcuuuacagaucuaaaaaaaaaaaaaaaaaaaaaaaaaaaaaaaaaaaaaaaaaaaaaaaaaaaaaaaaaaaaaaaaugcaucccccccccccccccccccccccccccccccaaaggcucuuuucagagccaccagaauu

SEQ ID NO: 13373 - RNA, 1937 nt, Artificial Sequence
  mRNA product Design e-1 comprising derived and/or modified sequence from HRSV(Memphis-37)__AIY60640.1__F_DSCav1_mut0 (opt2)
gggagaauauaagcguuggcggagcgucgguuguagcacucugcgcgcccgcucuucugcugcuguuugucuacuuccuccugcuuccccgccgccgccgccgccaucaagcuuaccauggagcuccccauccucaagaccaacgccaucaccaccauccucgccgccgucacccucugcuucgccuccucccagaacaucaccgaggaguucuaccaguccaccugcuccgccgucuccaagggcuaccucuccgcccuccgcaccggcugguacaccuccgucaucaccaucgagcucuccaacaucaaggagaacaagugcaacggcaccgacgccaaggucaagcucaucaagcaggagcucgacaaguacaagaacgccgucaccgagcuccagcuccucaugcaguccacccccgccgccggcuccggcuccgccaucgccuccggcaucgccgucugcaagguccuccaccucgagggcgaggucaacaagaucaagaacgcccuccucuccaccaacaaggccgucgucucccucuccaacggcgucuccguccucaccuucaagguccucgaccucaagaacuacaucgacaagcagcuccuccccauccucaacaagcaguccugcuccaucuccaacaucgagaccgucaucgaguuccagcagaagaacaaccgccuccucgagaucacccgcgaguucuccgucaacgccggcgucaccacccccgucuccaccuacaugcucaccaacuccgagcuccucucccucaucaacgacaugcccaucaccaacgaccagaagaagcucauguccaacaacguccagaucguccgccagcaguccuacuccaucaugugcaucaucaaggaggagguccucgccuacgucguccagcucccccucuacggcgucaucgacacccccugcuggaagcuccacaccuccccccucugcaccaccaacaccaaggagggcuccaacaucugccucacccgcaccgaccgcggcugguacugcgacaacgccggcuccgucuccuucuucccccaggccgagaccugcaagguccaguccaaccgcgucuucugcgacaccaugaacucccgcacccuccccuccgaggucaaccucugcaacaucgacaucuucaaccccaaguacgacugcaagaucaugaccuccaagaccgacgucuccuccuccgucaucaccucccucggcgccaucgucuccugcuacggcaagaccaagugcaccgccuccaacaagaaccgcggcaucaucaagaccuucuccaacggcugcgacuacgucuccaacaagggcgucgacaccgucuccgucggcaacacccucuacuacgucaacaagcaggagggcaagucccucuacgucaagggcgagcccaucaucaacuucuacgacccccucgucuuccccuccgacgaguucgacgccuccaucucccaggucaacgagaagaucaaccagucccucgccuucauccgcaaguccgacgagcuccuccacaacgucaacgucggcaaguccaccaccaacaucaugaucaccaccaucaucaucgucaucaucgucauccuccuccuccucaucgccgucggccucuuccucuacugcaaggcccgcuccacccccgucacccucuccaaggaccagcucuccggcaucaacaacaucgccuucuccaacugaggacuaguguccaccugucccuccugggcugcuggauugucucguuuuccugccaaauaaacaggaucagcgcuuuacagaucuaaaaaaaaaaaaaaaaaaaaaaaaaaaaaaaaaaaaaaaaaaaaaaaaaaaaaaaaaaaaaaaaugcaucccccccccccccccccccccccccccccccaaaggcucuuuucagagccaccagaauu

SEQ ID NO: 13374 - RNA, 1937 nt, Artificial Sequence
  mRNA product Design e-1 comprising derived and/or modified sequence from HRSV(Memphis-37)__AIY60640.1__F_DSCav1_mut0 (opt3)
gggagaauauaagcguuggcggagcgucgguuguagcacucugcgcgcccgcucuucugcugcuguuugucuacuuccuccugcuuccccgccgccgccgccgccaucaagcuuaccauggagcugcccauccucaagaccaacgccauuacaacuauacuugcugcagugacgcugugcuucgccagcucccagaauaucaccgaagaguuuuaccaaucuacauguucagcggucaguaaaggcuauuugagcgcuuuaagaacugggugguacaccuccguuauuacaaucgaacugucuaacauuaaggagaauaaaugcaacggaaccgacgccaaggugaaacuaaucaagcaggaacucgauaaguauaaaaaugcaguaacugagcugcagcuucugaugcagucgaccccugccgcugguucaggcagcgcaauagccagugggaucgcuguguguaaggucuugcaccucgagggagaagugaacaaaauuaagaaugcccugcuguccacaaacaaagcgguugugucucucagcaauggcgucuccguguuaacguucaagguacuggaccuuaagaacuacaucgauaaacaauugcugccaauucuaaauaagcagucaugcaguaucagcaacauagagacuguuauugaauuucagcagaaaaauaacaggcuccuggagaucacccgggaguucucugugaaugccggugucacaacuccgguguccaccuauaugcuuacaaacucagaacuguugagccucauuaacgacaugcccaucaccaaugaucaaaagaaacugaugaguaacaaugugcagaucguccgccagcagucuuacuccauuauguguauaaucaaggaggaaguuuuagcauaugugguacaacugccucucuacggggugauugacacgccaugcuggaaacuucauacuagcccccuguguacaaccaacacuaaggagggaucgaauaucugcuugacacgaaccgaucguggcugguacugugacaacgcuggcucugucuccuuuuucccucaggccgaaacgugcaaggugcagucaaauagaguguuuugugauaccaugaacaguagaacacugccaagcgaggugaaucucugcaacauagacauuuucaaucccaaauaugauugcaagaucaugacuuccaaaaccgacgucucuagcucagugaucacaagucugggggcaauuguauccuguuacggaaagacuaaaugcaccgcuagcaacaagaauagggguaucauuaagacauuuucuaacggcugugauuauguuucaaauaaagggguggacaccgucagugugggaaacacucuuuacuaugucaacaagcaagagggcaaaagccuguacgugaagggugaaccuauaaucaauuucuaugacccauugguuuuuccguccgaugaguucgacgccucuauuucgcagguuaacgagaaaaucaaucagagccucgcguuuauccggaaguccgaugaacuguuacacaacguaaaugucgggaagucaacgacaaacauuaugauaaccacuaucauuaucgugauuaucguuauacugcuacuccugaucgccgugggacuuuucuuguacugcaaagcacgcaguacccccgucacacugucuaaggaccagcucagcggcauuaauaacaucgcuuucuccaauugaggacuaguguccaccugucccuccugggcugcuggauugucucguuuuccugccaaauaaacaggaucagcgcuuuacagaucuaaaaaaaaaaaaaaaaaaaaaaaaaaaaaaaaaaaaaaaaaaaaaaaaaaaaaaaaaaaaaaaaugcaucccccccccccccccccccccccccccccccaaaggcucuuuucagagccaccagaauu

SEQ ID NO: 13375 - RNA, 1937 nt, Artificial Sequence
  mRNA product Design e-1 comprising derived and/or modified sequence from HRSV(Memphis-37)__AIY60640.1__F_DSCav1_mut0 (opt4)
gggagaauauaagcguuggcggagcgucgguuguagcacucugcgcgcccgcucuucugcugcuguuugucuacuuccuccugcuuccccgccgccgccgccgccaucaagcuuaccauggagcugcccauccugaagaccaacgccaucaccaccauccuggccgccgugacccugugcuucgccagcagccagaacaucaccgaggaguucuaccagagcaccugcagcgccgugagcaagggcuaccugagcgcccugagaaccggcugguacaccagcgugaucaccaucgagcugagcaacaucaaggagaacaagugcaacggcaccgacgccaaggugaagcugaucaagcaggagcuggacaaguacaagaacgccgugaccgagcugcagcugcugaugcagagcacccccgccgccggcagcggcagcgccaucgccagcggcaucgccgugugcaaggugcugcaccuggagggcgaggugaacaagaucaagaacgcccugcugagcaccaacaaggccguggugagccugagcaacggcgugagcgugcugaccuucaaggugcuggaccugaagaacuacaucgacaagcagcugcugcccauccugaacaagcagagcugcagcaucagcaacaucgagaccgugaucgaguuccagcagaagaacaacagacugcuggagaucaccagagaguucagcgugaacgccggcgugaccacccccgugagcaccuacaugcugaccaacagcgagcugcugagccugaucaacgacaugcccaucaccaacgaccagaagaagcugaugagcaacaacgugcagaucgugagacagcagagcuacagcaucaugugcaucaucaaggaggaggugcuggccuacguggugcagcugccccuguacggcgugaucgacacccccugcuggaagcugcacaccagcccccugugcaccaccaacaccaaggagggcagcaacaucugccugaccagaaccgacagaggcugguacugcgacaacgccggcagcgugagcuucuucccccaggccgagaccugcaaggugcagagcaacagaguguucugcgacaccaugaacagcagaacccugcccagcgaggugaaccugugcaacaucgacaucuucaaccccaaguacgacugcaagaucaugaccagcaagaccgacgugagcagcagcgugaucaccagccugggcgccaucgugagcugcuacggcaagaccaagugcaccgccagcaacaagaacagaggcaucaucaagaccuucagcaacggcugcgacuacgugagcaacaagggcguggacaccgugagcgugggcaacacccuguacuacgugaacaagcaggagggcaagagccuguacgugaagggcgagcccaucaucaacuucuacgacccccugguguuccccagcgacgaguucgacgccagcaucagccaggugaacgagaagaucaaccagagccuggccuucaucagaaagagcgacgagcugcugcacaacgugaacgugggcaagagcaccaccaacaucaugaucaccaccaucaucaucgugaucaucgugauccugcugcugcugaucgccgugggccuguuccuguacugcaaggccagaagcacccccgugacccugagcaaggaccagcugagcggcaucaacaacaucgccuucagcaacugaggacuaguguccaccugucccuccugggcugcuggauugucucguuuuccugccaaauaaacaggaucagcgcuuuacagaucuaaaaaaaaaaaaaaaaaaaaaaaaaaaaaaaaaaaaaaaaaaaaaaaaaaaaaaaaaaaaaaaaugcaucccccccccccccccccccccccccccccccaaaggcucuuuucagagccaccagaauu

SEQ ID NO: 13376 - RNA, 1937 nt, Artificial Sequence
  mRNA product Design e-1 comprising derived and/or modified sequence from HRSV(Memphis-37)__AIY60640.1__F_DSCav1_mut0 (opt5)
gggagaauauaagcguuggcggagcgucgguuguagcacucugcgcgcccgcucuucugcugcuguuugucuacuuccuccugcuuccccgccgccgccgccgccaucaagcuuaccauggagcugcccauccucaagaccaacgccauuacaacgauccuggcugccgugacccuuugcuucgcgagcucccagaauauuacagaagaguuuuaccaaucuaccuguagcgcugucuccaaaggcuaucugucugcccucagaacagggugguacaccagcguuaucacaauugaacuguccaacaucaaggagaauaaaugcaacggaaccgacgccaaggugaaacuuaucaagcaggaacuggauaaguauaaaaaugcugugacggagcuccagcugcugaugcagucuaccccugccgcuggcagcggguccgccauugcgagcggaaucgccgucuguaaggugcuccaccuggagggcgaaguuaacaaaauuaagaaugcccuucugucuacaaacaaagcuguggucucccucagcaauggggugucuguucugaccuucaaggugcuugaccugaagaacuacaucgauaaacaacuccugccgauucugaauaagcaguccugcagcaucucuaacauugagacagucaucgaauuucagcagaaaaauaaccggcuccuggagaucacccgcgaguucuccgugaaugcuggagugacgacacccgucagcaccuauaugcuuacaaacuccgaacugcucucucugauuaacgacaugccuaucaccaaugaucaaaagaaacuuaugagcaacaauguucagauugugagacagcaguccuacagcaucauguguauuaucaaggaggaagugcuggccuaugucgugcaacucccccuguacggcguuaucgacaccccuugcuggaaacugcauacaucuccccucuguacgaccaacacaaaggagggcuccaauauuugccugacccggacagaucgcgggugguacugugacaacgcgggaagcgugagcuuuuucccucaggccgaaaccugcaagguccagucuaauagaguguuuugugauacgaugaacuccagaacacugccgucugagguuaaucucugcaacaucgacauuuucaaucccaaauaugauugcaagaucaugaccagcaaaaccgacguguccagcucugucauuacaucccugggcgcuaucgugagcuguuacgggaagaccaaaugcacagccucuaacaagaaucggggaaucauuaagacguuuuccaacggcugugauuaugucagcaauaaagggguggacaccguuuccgugggaaacacacuuuacuaugucaacaagcaagagggcaaaucucuguacgugaagggcgaaccuaucauuaauuucuaugacccccucguuuuuccuagcgaugaguucgacgcuuccaucucucaggugaacgaaaagauuaaucagagccuggccuuuauccgcaaguccgaugagcugcuccacaacgucaauguggggaaaagcaccacaaacauuaugaucaccacgaucauuaucgugauuaucguuauucugcuucugcucaucgccgucggacuguuccuguacugcaaagcuagaucuacccccgugacacuuuccaaggaccagcucagcggcaucaauaacauugcguucucuaauugaggacuaguguccaccugucccuccugggcugcuggauugucucguuuuccugccaaauaaacaggaucagcgcuuuacagaucuaaaaaaaaaaaaaaaaaaaaaaaaaaaaaaaaaaaaaaaaaaaaaaaaaaaaaaaaaaaaaaaaugcaucccccccccccccccccccccccccccccccaaaggcucuuuucagagccaccagaauu

SEQ ID NO: 13377 - RNA, 1937 nt, Artificial Sequence
  mRNA product Design e-1 comprising derived and/or modified sequence from HRSV(Memphis-37)__AIY60640.1__F_DSCav1_mut0 (opt6)
gggagaauauaagcguuggcggagcgucgguuguagcacucugcgcgcccgcucuucugcugcuguuugucuacuuccuccugcuuccccgccgccgccgccgccaucaagcuuaccauggaauuaccaaucuuaaaaacaaacgccauaacaaccauccucgcagcaguaacccuaugcuuugcauccucacaaaacauaacugaagaauuuuaccaaucaacaugcucagcaguaucaaaaggauaucuaucagcccucagaacaggaugguacacaucagucauuacaaucgaacuuucaaacauaaaagaaaauaaauguaacggcacagaugccaaaguaaaauuaauuaaacaagaacuugacaaauacaaaaaugccguaacagaacuacaacuacuaaugcaaaguacuccugcugcaggaagcggaucugcaauagcaucagguauagcaguauguaaaguucuacaccuagaaggcgaaguaaacaaaauuaaaaacgcacuacucucaacaaauaaagcaguugucucccuaucaaacggaguaucaguauuaacuuucaaaguacuagaccucaaaaacuauauagacaaacaacuauuaccaauacuaaacaaacaaagcugcucuaucuccaacaucgaaacaguaauagaauuucaacaaaaaaauaauagacuacuugaaauaaccagagaauuuucaguaaacgccggaguaacaacaccaguaucaacuuacaugcuaacaaacuccgaacuacuaucauuaauaaacgacaugcccauaacaaacgaccaaaaaaaauuaaugucaaacaacguccaaaucguacgacaacaauccuauuccauaauguguauaauaaaagaagaaguacuagcauacguaguacaauuaccauuauauggaguaauagauaccccuugcuggaaacuacacacaucaccccuaugcacuacaaauacgaaagaagguucaaauauaugcuuaacuagaaccgauagagguugguauugugacaacgcuggaucaguaucauuuuucccacaagcagaaacaugcaaaguacaaucaaacagaguauuuugcgacacuaugaacucaagaacuuuaccauccgaaguuaaucuauguaacauagauauauuuaacccaaaauacgacugcaaaauaaugacaucaaaaacagauguaucaucaucaguuauaaccucccucggagcaauaguaucaugcuauggaaaaacaaaaugcacagcaucaaacaaaaaucguggaauuauaaaaacauucucaaacggcugugacuacgucagcaauaaaggaguagacacagucucaguaggaaacacuuuauacuauguuaacaaacaagaaggaaaaucacucuacgucaaaggcgaaccaauaauaaauuucuaugacccacucguauucccauccgacgaauuugacgcaucaauaucacaaguaaaugaaaaaauaaaccaaagccuagcauuuauacgaaaaucagacgaacuacuacacaacguaaacguagguaaaagcacaaccaauauaaugauaacaacaauaaucauaguaauaaucguaauauuacuauuacuaauagcuguaggauuguuccuauacugcaaagcaagaucaacaccaguaaccuuaucuaaggaccaacuaucaggaaucaauaacauugccuucucaaacuaaggacuaguguccaccugucccuccugggcugcuggauugucucguuuuccugccaaauaaacaggaucagcgcuuuacagaucuaaaaaaaaaaaaaaaaaaaaaaaaaaaaaaaaaaaaaaaaaaaaaaaaaaaaaaaaaaaaaaaaugcaucccccccccccccccccccccccccccccccaaaggcucuuuucagagccaccagaauu

SEQ ID NO: 13378 - RNA, 1937 nt, Artificial Sequence
  mRNA product Design e-1 comprising derived and/or modified sequence from HRSV(Memphis-37)__AIY60640.1__F_DSCav1_mut0 (opt11)
gggagaauauaagcguuggcggagcgucgguuguagcacucugcgcgcccgcucuucugcugcuguuugucuacuuccuccugcuuccccgccgccgccgccgccaucaagcuuaccauggaacuaccuauccuuaaaaccaacgcaaucaccaccauccuugccgcagucacacucugcuucgcauccucacagaacaucaccgaagaguucuaucaaucaaccugcuccgccguauccaaaggauaccucucagcccuccgcaccggcugguauaccucagucauaacaaucgaauuaucaaauaucaaggagaacaaaugcaacggcaccgacgccaaagucaaacucauaaaacaagaacuagacaaauacaaaaacgccgugacagaacuccaacuccucaugcaguccacccccgcagccggauccggcucagcaaucgccucgggcauugcaguaugcaaaguccuccaccucgaaggcgaagucaacaaaaucaaaaacgcccuccucuccaccaacaaagccgucgucucccucuccaacggcguaucuguccucacuuucaagguccucgaccucaaaaacuacaucgacaagcaacuacuuccaauccucaacaagcaauccugcucaaucucaaacaucgaaaccguaauagaguuccaacaaaagaacaaccgccuccucgaaaucacccgcgaguucuccguuaacgccggugucacuaccccagucagcaccuacaugcucaccaacuccgaacuccuuucucugaucaacgacaugccaaucaccaacgaucaaaagaaauuaauguccaacaacguccagaucguccgccaacaaagcuacagcaucaugugcaucauaaaagaagaaguacuugcguacguaguucaacuaccccuuuacggcguaaucgacaccccaugcuggaaacuccacaccuccccacuaugcaccaccaacaccaaagaaggauccaacaucugccuaacccgcaccgaccgcggcugguacugcgacaacgcugggagcgucucauucuucccacaagcagaaaccugcaaaguccaaucgaaccgcguauucugcgacaccaugaacuccagaacccuaccaagcgaagucaaucuuugcaacaucgacauauuuaaccccaaauacgacugcaaaaucaugacaucaaagaccgacgucucaucuucagucauuaccucacucggcgcaauugucagcugcuacggaaagaccaaauguaccgccuccaauaaaaaccguggaaucauaaaaaccuuuagcaacggcugcgacuacgucuccaacaaaggagucgacaccgucuccgucggcaacacccucuacuacgucaacaaacaagaaggaaaaucccucuacgugaaaggcgaacccauaauaaacuucuacgacccccuagucuuccccucugacgaguucgacgccuccaucucccaagucaacgaaaagauaaaucaaucacuagccuucauacgcaaaucugacgaacuucuccacaacgucaacgucggcaaauccaccaccaacauaaugaucacaacgauaauaaucgugaucauaguaauccuacuucuccucaucgcaguaggucuauuccuauacugcaaagcccgcagcacccccgucacccuaucaaaagaccaacucuccggcaucaacaacaucgccuucucaaacuaaggacuaguguccaccugucccuccugggcugcuggauugucucguuuuccugccaaauaaacaggaucagcgcuuuacagaucuaaaaaaaaaaaaaaaaaaaaaaaaaaaaaaaaaaaaaaaaaaaaaaaaaaaaaaaaaaaaaaaaugcaucccccccccccccccccccccccccccccccaaaggcucuuuucagagccaccagaauu

SEQ ID NO: 13379 - RNA, 1919 nt, Artificial Sequence
  mRNA product Design e-2 comprising derived and/or modified sequence from HRSV(Memphis-37)__AIY60640.1__F_DSCav1_mut0 (opt1)
gggagacccgugacccggaaguuguacggcuacgcgacuuucccucccacaaacccucgcgcccuuccuuuccuacuugggcccggcagaaagcuuaccauggagcugcccauccucaagaccaacgccaucaccacgauccuggccgcggugacccugugcuucgccagcucccagaacaucaccgaggaguucuaccagagcacgugcuccgccgucagcaagggcuaccucuccgcccugcgcaccgggugguacaccagcgugaucaccaucgagcuguccaacaucaaggagaacaagugcaacggcaccgacgccaaggugaagcucaucaagcaggagcuggacaaguacaagaacgcggucacggagcugcagcuccugaugcagagcaccccggccgccggcuccgggagcgcgaucgccuccggcaucgccgucugcaaggugcugcaccucgagggcgaggugaacaagaucaagaacgcccugcuguccaccaacaaggccgucgugagccucuccaacggggugagcguccugaccuucaaggugcuggaccucaagaacuacaucgacaagcagcugcugcccauccugaacaagcagagcugcuccaucagcaacaucgagaccgucaucgaguuccagcagaagaacaaccgccuccuggagaucacgcgggaguucagcgugaacgcgggcgugaccacccccgucuccaccuacaugcugacgaacagcgagcuccugucccugaucaacgacaugccgaucaccaacgaccagaagaagcucaugagcaacaacgugcagaucgugcgccagcaguccuacagcaucaugugcaucaucaaggaggagguccuggccuacguggugcagcugccccucuacggggucaucgacacccccugcuggaagcugcacaccagcccccugugcacgaccaacaccaaggagggcuccaacaucugccucacccggacggaccgcgggugguacugcgacaacgccggcagcguguccuucuucccgcaggccgagaccugcaagguccagagcaaccggguguucugcgacaccaugaacucccggacccugcccagcgaggugaaccucugcaacaucgacaucuucaaccccaaguacgacugcaagaucaugacguccaagaccgacgucagcuccagcgugaucaccucccugggcgccaucgugagcugcuacgggaagaccaagugcacggcgagcaacaagaaccgcggcaucaucaagaccuucuccaacgggugcgacuacgucagcaacaagggcguggacaccguguccgucggcaacacccuguacuacgugaacaagcaggagggcaagagccucuacgugaagggggagcccaucaucaacuucuacgacccgcuggucuuccccuccgacgaguucgacgccagcaucucccaggugaacgagaagaucaaccagagccuggccuucauccggaaguccgacgagcuccugcacaacgugaacgucggcaagagcaccacgaacaucaugaucaccaccaucaucaucgugaucaucgugauccugcugcuccugaucgccgucgggcuguuccucuacugcaaggcccgcuccacccccgugacgcugagcaaggaccagcuguccgggaucaacaacaucgcguucagcaacugaggacuaguguccaccugucccuccugggcugcuggauugucucguuuuccugccaaauaaacaggaucagcgcuuuacagaucuaaaaaaaaaaaaaaaaaaaaaaaaaaaaaaaaaaaaaaaaaaaaaaaaaaaaaaaaaaaaaaaaugcaucccccccccccccccccccccccccccccccaaaggcucuuuucagagccaccagaauu

SEQ ID NO: 13380 - RNA, 1919 nt, Artificial Sequence
  mRNA product Design e-2 comprising derived and/or modified sequence from HRSV(Memphis-37)__AIY60640.1__F_DSCav1_mut0 (opt1)
gggagacccgugacccggaaguuguacggcuacgcgacuuucccucccacaaacccucgcgcccuuccuuuccuacuugggcccggcagaaagcuuaccauggagcugcccauccucaagaccaacgccaucaccacgauccuggccgcggugacccugugcuucgccagcucccagaacaucaccgaggaguucuaccagagcacgugcuccgccgucagcaagggcuaccucuccgcccugcgcaccgggugguacaccagcgugaucaccaucgagcuguccaacaucaaggagaacaagugcaacggcaccgacgccaaggugaagcucaucaagcaggagcuggacaaguacaagaacgcggucacggagcugcagcuccugaugcagagcaccccggccgccggguccggcagcgccaucgcguccgggaucgccgugugcaaggugcugcaccucgagggcgaggucaacaagaucaagaacgcccugcugagcaccaacaaggccguggugucccucagcaacggcgucuccgugcugaccuucaaggugcuggaccucaagaacuacaucgacaagcagcugcugcccauccucaacaagcagagcugcuccaucagcaacaucgagacggucaucgaguuccagcagaagaacaaccggcugcuggagaucacccgcgaguucuccgugaacgccggggugaccacccccgucagcacguacaugcucaccaacagcgagcugcugucccucaucaacgacaugcccaucaccaacgaccagaagaagcugaugagcaacaacgugcagaucgugcggcagcaguccuacagcaucaugugcaucaucaaggaggagguccuggcguacguggugcagcucccgcuguacggcgucaucgacacccccugcuggaagcugcacacgagcccccucugcaccaccaacaccaaggagggguccaacaucugccugacgcgcaccgaccggggcugguacugcgacaacgccggguccgugagcuucuucccccaggccgagaccugcaaggugcaguccaaccgcgucuucugcgacaccaugaacagccggacgcucccguccgaggugaaccugugcaacaucgacaucuucaaccccaaguacgacugcaagaucaugaccagcaagaccgacgucuccagcuccgugaucaccagccugggcgccaucguguccugcuacggcaagacgaagugcaccgccagcaacaagaaccgggggaucaucaagaccuucuccaacggcugcgacuacgucagcaacaaggggguggacaccgugagcgucggcaacacgcucuacuacgugaacaagcaggagggcaagucccuguacgugaagggggagcccaucaucaacuucuacgacccccuggucuucccgagcgacgaguucgacgcguccaucagccaggugaacgagaagaucaaccagucccucgccuucauccgcaagagcgacgagcugcugcacaacgugaacgucggcaaguccaccaccaacaucaugaucaccaccaucaucaucgugaucaucgugauccuccugcugcucaucgccgucgggcuguuccuguacugcaaggcccggagcacgcccgugacccuguccaaggaccagcucagcggcaucaacaacaucgccuucuccaacugaggacuaguguccaccugucccuccugggcugcuggauugucucguuuuccugccaaauaaacaggaucagcgcuuuacagaucuaaaaaaaaaaaaaaaaaaaaaaaaaaaaaaaaaaaaaaaaaaaaaaaaaaaaaaaaaaaaaaaaugcaucccccccccccccccccccccccccccccccaaaggcucuuuucagagccaccagaauu

SEQ ID NO: 13381 - RNA, 1919 nt, Artificial Sequence
  mRNA product Design e-2 comprising derived and/or modified sequence from HRSV(Memphis-37)__AIY60640.1__F_DSCav1_mut0 (opt2)
gggagacccgugacccggaaguuguacggcuacgcgacuuucccucccacaaacccucgcgcccuuccuuuccuacuugggcccggcagaaagcuuaccauggagcuccccauccucaagaccaacgccaucaccaccauccucgccgccgucacccucugcuucgccuccucccagaacaucaccgaggaguucuaccaguccaccugcuccgccgucuccaagggcuaccucuccgcccuccgcaccggcugguacaccuccgucaucaccaucgagcucuccaacaucaaggagaacaagugcaacggcaccgacgccaaggucaagcucaucaagcaggagcucgacaaguacaagaacgccgucaccgagcuccagcuccucaugcaguccacccccgccgccggcuccggcuccgccaucgccuccggcaucgccgucugcaagguccuccaccucgagggcgaggucaacaagaucaagaacgcccuccucuccaccaacaaggccgucgucucccucuccaacggcgucuccguccucaccuucaagguccucgaccucaagaacuacaucgacaagcagcuccuccccauccucaacaagcaguccugcuccaucuccaacaucgagaccgucaucgaguuccagcagaagaacaaccgccuccucgagaucacccgcgaguucuccgucaacgccggcgucaccacccccgucuccaccuacaugcucaccaacuccgagcuccucucccucaucaacgacaugcccaucaccaacgaccagaagaagcucauguccaacaacguccagaucguccgccagcaguccuacuccaucaugugcaucaucaaggaggagguccucgccuacgucguccagcucccccucuacggcgucaucgacacccccugcuggaagcuccacaccuccccccucugcaccaccaacaccaaggagggcuccaacaucugccucacccgcaccgaccgcggcugguacugcgacaacgccggcuccgucuccuucuucccccaggccgagaccugcaagguccaguccaaccgcgucuucugcgacaccaugaacucccgcacccuccccuccgaggucaaccucugcaacaucgacaucuucaaccccaaguacgacugcaagaucaugaccuccaagaccgacgucuccuccuccgucaucaccucccucggcgccaucgucuccugcuacggcaagaccaagugcaccgccuccaacaagaaccgcggcaucaucaagaccuucuccaacggcugcgacuacgucuccaacaagggcgucgacaccgucuccgucggcaacacccucuacuacgucaacaagcaggagggcaagucccucuacgucaagggcgagcccaucaucaacuucuacgacccccucgucuuccccuccgacgaguucgacgccuccaucucccaggucaacgagaagaucaaccagucccucgccuucauccgcaaguccgacgagcuccuccacaacgucaacgucggcaaguccaccaccaacaucaugaucaccaccaucaucaucgucaucaucgucauccuccuccuccucaucgccgucggccucuuccucuacugcaaggcccgcuccacccccgucacccucuccaaggaccagcucuccggcaucaacaacaucgccuucuccaacugaggacuaguguccaccugucccuccugggcugcuggauugucucguuuuccugccaaauaaacaggaucagcgcuuuacagaucuaaaaaaaaaaaaaaaaaaaaaaaaaaaaaaaaaaaaaaaaaaaaaaaaaaaaaaaaaaaaaaaaugcaucccccccccccccccccccccccccccccccaaaggcucuuuucagagccaccagaauu

SEQ ID NO: 13382 - RNA, 1919 nt, Artificial Sequence
  mRNA product Design e-2 comprising derived and/or modified sequence from HRSV(Memphis-37)__AIY60640.1__F_DSCav1_mut0 (opt3)
gggagacccgugacccggaaguuguacggcuacgcgacuuucccucccacaaacccucgcgcccuuccuuuccuacuugggcccggcagaaagcuuaccauggagcugcccauccucaagaccaacgccauuacaacuauacuugcugcagugacgcugugcuucgccagcucccagaauaucaccgaagaguuuuaccaaucuacauguucagcggucaguaaaggcuauuugagcgcuuuaagaacugggugguacaccuccguuauuacaaucgaacugucuaacauuaaggagaauaaaugcaacggaaccgacgccaaggugaaacuaaucaagcaggaacucgauaaguauaaaaaugcaguaacugagcugcagcuucugaugcagucgaccccugccgcugguucaggcagcgcaauagccagugggaucgcuguguguaaggucuugcaccucgagggagaagugaacaaaauuaagaaugcccugcuguccacaaacaaagcgguugugucucucagcaauggcgucuccguguuaacguucaagguacuggaccuuaagaacuacaucgauaaacaauugcugccaauucuaaauaagcagucaugcaguaucagcaacauagagacuguuauugaauuucagcagaaaaauaacaggcuccuggagaucacccgggaguucucugugaaugccggugucacaacuccgguguccaccuauaugcuuacaaacucagaacuguugagccucauuaacgacaugcccaucaccaaugaucaaaagaaacugaugaguaacaaugugcagaucguccgccagcagucuuacuccauuauguguauaaucaaggaggaaguuuuagcauaugugguacaacugccucucuacggggugauugacacgccaugcuggaaacuucauacuagcccccuguguacaaccaacacuaaggagggaucgaauaucugcuugacacgaaccgaucguggcugguacugugacaacgcuggcucugucuccuuuuucccucaggccgaaacgugcaaggugcagucaaauagaguguuuugugauaccaugaacaguagaacacugccaagcgaggugaaucucugcaacauagacauuuucaaucccaaauaugauugcaagaucaugacuuccaaaaccgacgucucuagcucagugaucacaagucugggggcaauuguauccuguuacggaaagacuaaaugcaccgcuagcaacaagaauagggguaucauuaagacauuuucuaacggcugugauuauguuucaaauaaagggguggacaccgucagugugggaaacacucuuuacuaugucaacaagcaagagggcaaaagccuguacgugaagggugaaccuauaaucaauuucuaugacccauugguuuuuccguccgaugaguucgacgccucuauuucgcagguuaacgagaaaaucaaucagagccucgcguuuauccggaaguccgaugaacuguuacacaacguaaaugucgggaagucaacgacaaacauuaugauaaccacuaucauuaucgugauuaucguuauacugcuacuccugaucgccgugggacuuuucuuguacugcaaagcacgcaguacccccgucacacugucuaaggaccagcucagcggcauuaauaacaucgcuuucuccaauugaggacuaguguccaccugucccuccugggcugcuggauugucucguuuuccugccaaauaaacaggaucagcgcuuuacagaucuaaaaaaaaaaaaaaaaaaaaaaaaaaaaaaaaaaaaaaaaaaaaaaaaaaaaaaaaaaaaaaaaugcaucccccccccccccccccccccccccccccccaaaggcucuuuucagagccaccagaauu

SEQ ID NO: 13383 - RNA, 1919 nt, Artificial Sequence
  mRNA product Design e-2 comprising derived and/or modified sequence from HRSV(Memphis-37)__AIY60640.1__F_DSCav1_mut0 (opt4)
gggagacccgugacccggaaguuguacggcuacgcgacuuucccucccacaaacccucgcgcccuuccuuuccuacuugggcccggcagaaagcuuaccauggagcugcccauccugaagaccaacgccaucaccaccauccuggccgccgugacccugugcuucgccagcagccagaacaucaccgaggaguucuaccagagcaccugcagcgccgugagcaagggcuaccugagcgcccugagaaccggcugguacaccagcgugaucaccaucgagcugagcaacaucaaggagaacaagugcaacggcaccgacgccaaggugaagcugaucaagcaggagcuggacaaguacaagaacgccgugaccgagcugcagcugcugaugcagagcacccccgccgccggcagcggcagcgccaucgccagcggcaucgccgugugcaaggugcugcaccuggagggcgaggugaacaagaucaagaacgcccugcugagcaccaacaaggccguggugagccugagcaacggcgugagcgugcugaccuucaaggugcuggaccugaagaacuacaucgacaagcagcugcugcccauccugaacaagcagagcugcagcaucagcaacaucgagaccgugaucgaguuccagcagaagaacaacagacugcuggagaucaccagagaguucagcgugaacgccggcgugaccacccccgugagcaccuacaugcugaccaacagcgagcugcugagccugaucaacgacaugcccaucaccaacgaccagaagaagcugaugagcaacaacgugcagaucgugagacagcagagcuacagcaucaugugcaucaucaaggaggaggugcuggccuacguggugcagcugccccuguacggcgugaucgacacccccugcuggaagcugcacaccagcccccugugcaccaccaacaccaaggagggcagcaacaucugccugaccagaaccgacagaggcugguacugcgacaacgccggcagcgugagcuucuucccccaggccgagaccugcaaggugcagagcaacagaguguucugcgacaccaugaacagcagaacccugcccagcgaggugaaccugugcaacaucgacaucuucaaccccaaguacgacugcaagaucaugaccagcaagaccgacgugagcagcagcgugaucaccagccugggcgccaucgugagcugcuacggcaagaccaagugcaccgccagcaacaagaacagaggcaucaucaagaccuucagcaacggcugcgacuacgugagcaacaagggcguggacaccgugagcgugggcaacacccuguacuacgugaacaagcaggagggcaagagccuguacgugaagggcgagcccaucaucaacuucuacgacccccugguguuccccagcgacgaguucgacgccagcaucagccaggugaacgagaagaucaaccagagccuggccuucaucagaaagagcgacgagcugcugcacaacgugaacgugggcaagagcaccaccaacaucaugaucaccaccaucaucaucgugaucaucgugauccugcugcugcugaucgccgugggccuguuccuguacugcaaggccagaagcacccccgugacccugagcaaggaccagcugagcggcaucaacaacaucgccuucagcaacugaggacuaguguccaccugucccuccugggcugcuggauugucucguuuuccugccaaauaaacaggaucagcgcuuuacagaucuaaaaaaaaaaaaaaaaaaaaaaaaaaaaaaaaaaaaaaaaaaaaaaaaaaaaaaaaaaaaaaaaugcaucccccccccccccccccccccccccccccccaaaggcucuuuucagagccaccagaauu

SEQ ID NO: 13384 - RNA, 1919 nt, Artificial Sequence
  mRNA product Design e-2 comprising derived and/or modified sequence from HRSV(Memphis-37)__AIY60640.1__F_DSCav1_mut0 (opt5)
gggagacccgugacccggaaguuguacggcuacgcgacuuucccucccacaaacccucgcgcccuuccuuuccuacuugggcccggcagaaagcuuaccauggagcugcccauccucaagaccaacgccauuacaacgauccuggcugccgugacccuuugcuucgcgagcucccagaauauuacagaagaguuuuaccaaucuaccuguagcgcugucuccaaaggcuaucugucugcccucagaacagggugguacaccagcguuaucacaauugaacuguccaacaucaaggagaauaaaugcaacggaaccgacgccaaggugaaacuuaucaagcaggaacuggauaaguauaaaaaugcugugacggagcuccagcugcugaugcagucuaccccugccgcuggcagcggguccgccauugcgagcggaaucgccgucuguaaggugcuccaccuggagggcgaaguuaacaaaauuaagaaugcccuucugucuacaaacaaagcuguggucucccucagcaauggggugucuguucugaccuucaaggugcuugaccugaagaacuacaucgauaaacaacuccugccgauucugaauaagcaguccugcagcaucucuaacauugagacagucaucgaauuucagcagaaaaauaaccggcuccuggagaucacccgcgaguucuccgugaaugcuggagugacgacacccgucagcaccuauaugcuuacaaacuccgaacugcucucucugauuaacgacaugccuaucaccaaugaucaaaagaaacuuaugagcaacaauguucagauugugagacagcaguccuacagcaucauguguauuaucaaggaggaagugcuggccuaugucgugcaacucccccuguacggcguuaucgacaccccuugcuggaaacugcauacaucuccccucuguacgaccaacacaaaggagggcuccaauauuugccugacccggacagaucgcgggugguacugugacaacgcgggaagcgugagcuuuuucccucaggccgaaaccugcaagguccagucuaauagaguguuuugugauacgaugaacuccagaacacugccgucugagguuaaucucugcaacaucgacauuuucaaucccaaauaugauugcaagaucaugaccagcaaaaccgacguguccagcucugucauuacaucccugggcgcuaucgugagcuguuacgggaagaccaaaugcacagccucuaacaagaaucggggaaucauuaagacguuuuccaacggcugugauuaugucagcaauaaagggguggacaccguuuccgugggaaacacacuuuacuaugucaacaagcaagagggcaaaucucuguacgugaagggcgaaccuaucauuaauuucuaugacccccucguuuuuccuagcgaugaguucgacgcuuccaucucucaggugaacgaaaagauuaaucagagccuggccuuuauccgcaaguccgaugagcugcuccacaacgucaauguggggaaaagcaccacaaacauuaugaucaccacgaucauuaucgugauuaucguuauucugcuucugcucaucgccgucggacuguuccuguacugcaaagcuagaucuacccccgugacacuuuccaaggaccagcucagcggcaucaauaacauugcguucucuaauugaggacuaguguccaccugucccuccugggcugcuggauugucucguuuuccugccaaauaaacaggaucagcgcuuuacagaucuaaaaaaaaaaaaaaaaaaaaaaaaaaaaaaaaaaaaaaaaaaaaaaaaaaaaaaaaaaaaaaaaugcaucccccccccccccccccccccccccccccccaaaggcucuuuucagagccaccagaauu

SEQ ID NO: 13385 - RNA, 1919 nt, Artificial Sequence
  mRNA product Design e-2 comprising derived and/or modified sequence from HRSV(Memphis-37)__AIY60640.1__F_DSCav1_mut0 (opt6)
gggagacccgugacccggaaguuguacggcuacgcgacuuucccucccacaaacccucgcgcccuuccuuuccuacuugggcccggcagaaagcuuaccauggaauuaccaaucuuaaaaacaaacgccauaacaaccauccucgcagcaguaacccuaugcuuugcauccucacaaaacauaacugaagaauuuuaccaaucaacaugcucagcaguaucaaaaggauaucuaucagcccucagaacaggaugguacacaucagucauuacaaucgaacuuucaaacauaaaagaaaauaaauguaacggcacagaugccaaaguaaaauuaauuaaacaagaacuugacaaauacaaaaaugccguaacagaacuacaacuacuaaugcaaaguacuccugcugcaggaagcggaucugcaauagcaucagguauagcaguauguaaaguucuacaccuagaaggcgaaguaaacaaaauuaaaaacgcacuacucucaacaaauaaagcaguugucucccuaucaaacggaguaucaguauuaacuuucaaaguacuagaccucaaaaacuauauagacaaacaacuauuaccaauacuaaacaaacaaagcugcucuaucuccaacaucgaaacaguaauagaauuucaacaaaaaaauaauagacuacuugaaauaaccagagaauuuucaguaaacgccggaguaacaacaccaguaucaacuuacaugcuaacaaacuccgaacuacuaucauuaauaaacgacaugcccauaacaaacgaccaaaaaaaauuaaugucaaacaacguccaaaucguacgacaacaauccuauuccauaauguguauaauaaaagaagaaguacuagcauacguaguacaauuaccauuauauggaguaauagauaccccuugcuggaaacuacacacaucaccccuaugcacuacaaauacgaaagaagguucaaauauaugcuuaacuagaaccgauagagguugguauugugacaacgcuggaucaguaucauuuuucccacaagcagaaacaugcaaaguacaaucaaacagaguauuuugcgacacuaugaacucaagaacuuuaccauccgaaguuaaucuauguaacauagauauauuuaacccaaaauacgacugcaaaauaaugacaucaaaaacagauguaucaucaucaguuauaaccucccucggagcaauaguaucaugcuauggaaaaacaaaaugcacagcaucaaacaaaaaucguggaauuauaaaaacauucucaaacggcugugacuacgucagcaauaaaggaguagacacagucucaguaggaaacacuuuauacuauguuaacaaacaagaaggaaaaucacucuacgucaaaggcgaaccaauaauaaauuucuaugacccacucguauucccauccgacgaauuugacgcaucaauaucacaaguaaaugaaaaaauaaaccaaagccuagcauuuauacgaaaaucagacgaacuacuacacaacguaaacguagguaaaagcacaaccaauauaaugauaacaacaauaaucauaguaauaaucguaauauuacuauuacuaauagcuguaggauuguuccuauacugcaaagcaagaucaacaccaguaaccuuaucuaaggaccaacuaucaggaaucaauaacauugccuucucaaacuaaggacuaguguccaccugucccuccugggcugcuggauugucucguuuuccugccaaauaaacaggaucagcgcuuuacagaucuaaaaaaaaaaaaaaaaaaaaaaaaaaaaaaaaaaaaaaaaaaaaaaaaaaaaaaaaaaaaaaaaugcaucccccccccccccccccccccccccccccccaaaggcucuuuucagagccaccagaauu

SEQ ID NO: 13386 - RNA, 1919 nt, Artificial Sequence
  mRNA product Design e-2 comprising derived and/or modified sequence from HRSV(Memphis-37)__AIY60640.1__F_DSCav1_mut0 (opt11)
gggagacccgugacccggaaguuguacggcuacgcgacuuucccucccacaaacccucgcgcccuuccuuuccuacuugggcccggcagaaagcuuaccauggaacuaccuauccuuaaaaccaacgcaaucaccaccauccuugccgcagucacacucugcuucgcauccucacagaacaucaccgaagaguucuaucaaucaaccugcuccgccguauccaaaggauaccucucagcccuccgcaccggcugguauaccucagucauaacaaucgaauuaucaaauaucaaggagaacaaaugcaacggcaccgacgccaaagucaaacucauaaaacaagaacuagacaaauacaaaaacgccgugacagaacuccaacuccucaugcaguccacccccgcagccggauccggcucagcaaucgccucgggcauugcaguaugcaaaguccuccaccucgaaggcgaagucaacaaaaucaaaaacgcccuccucuccaccaacaaagccgucgucucccucuccaacggcguaucuguccucacuuucaagguccucgaccucaaaaacuacaucgacaagcaacuacuuccaauccucaacaagcaauccugcucaaucucaaacaucgaaaccguaauagaguuccaacaaaagaacaaccgccuccucgaaaucacccgcgaguucuccguuaacgccggugucacuaccccagucagcaccuacaugcucaccaacuccgaacuccuuucucugaucaacgacaugccaaucaccaacgaucaaaagaaauuaauguccaacaacguccagaucguccgccaacaaagcuacagcaucaugugcaucauaaaagaagaaguacuugcguacguaguucaacuaccccuuuacggcguaaucgacaccccaugcuggaaacuccacaccuccccacuaugcaccaccaacaccaaagaaggauccaacaucugccuaacccgcaccgaccgcggcugguacugcgacaacgcugggagcgucucauucuucccacaagcagaaaccugcaaaguccaaucgaaccgcguauucugcgacaccaugaacuccagaacccuaccaagcgaagucaaucuuugcaacaucgacauauuuaaccccaaauacgacugcaaaaucaugacaucaaagaccgacgucucaucuucagucauuaccucacucggcgcaauugucagcugcuacggaaagaccaaauguaccgccuccaauaaaaaccguggaaucauaaaaaccuuuagcaacggcugcgacuacgucuccaacaaaggagucgacaccgucuccgucggcaacacccucuacuacgucaacaaacaagaaggaaaaucccucuacgugaaaggcgaacccauaauaaacuucuacgacccccuagucuuccccucugacgaguucgacgccuccaucucccaagucaacgaaaagauaaaucaaucacuagccuucauacgcaaaucugacgaacuucuccacaacgucaacgucggcaaauccaccaccaacauaaugaucacaacgauaauaaucgugaucauaguaauccuacuucuccucaucgcaguaggucuauuccuauacugcaaagcccgcagcacccccgucacccuaucaaaagaccaacucuccggcaucaacaacaucgccuucucaaacuaaggacuaguguccaccugucccuccugggcugcuggauugucucguuuuccugccaaauaaacaggaucagcgcuuuacagaucuaaaaaaaaaaaaaaaaaaaaaaaaaaaaaaaaaaaaaaaaaaaaaaaaaaaaaaaaaaaaaaaaugcaucccccccccccccccccccccccccccccccaaaggcucuuuucagagccaccagaauu

SEQ ID NO: 13387 - RNA, 1889 nt, Artificial Sequence
  mRNA product Design e-3 comprising derived and/or modified sequence from HRSV(Memphis-37)__AIY60640.1__F_DSCav1_mut0 (opt1)
gggagacuuucccauucuguagcagaauuugguguugccuguggucuuggucccgcggagaagcuuaccauggagcugcccauccucaagaccaacgccaucaccacgauccuggccgcggugacccugugcuucgccagcucccagaacaucaccgaggaguucuaccagagcacgugcuccgccgucagcaagggcuaccucuccgcccugcgcaccgggugguacaccagcgugaucaccaucgagcuguccaacaucaaggagaacaagugcaacggcaccgacgccaaggugaagcucaucaagcaggagcuggacaaguacaagaacgcggucacggagcugcagcuccugaugcagagcaccccggccgccggcuccgggagcgcgaucgccuccggcaucgccgucugcaaggugcugcaccucgagggcgaggugaacaagaucaagaacgcccugcuguccaccaacaaggccgucgugagccucuccaacggggugagcguccugaccuucaaggugcuggaccucaagaacuacaucgacaagcagcugcugcccauccugaacaagcagagcugcuccaucagcaacaucgagaccgucaucgaguuccagcagaagaacaaccgccuccuggagaucacgcgggaguucagcgugaacgcgggcgugaccacccccgucuccaccuacaugcugacgaacagcgagcuccugucccugaucaacgacaugccgaucaccaacgaccagaagaagcucaugagcaacaacgugcagaucgugcgccagcaguccuacagcaucaugugcaucaucaaggaggagguccuggccuacguggugcagcugccccucuacggggucaucgacacccccugcuggaagcugcacaccagcccccugugcacgaccaacaccaaggagggcuccaacaucugccucacccggacggaccgcgggugguacugcgacaacgccggcagcguguccuucuucccgcaggccgagaccugcaagguccagagcaaccggguguucugcgacaccaugaacucccggacccugcccagcgaggugaaccucugcaacaucgacaucuucaaccccaaguacgacugcaagaucaugacguccaagaccgacgucagcuccagcgugaucaccucccugggcgccaucgugagcugcuacgggaagaccaagugcacggcgagcaacaagaaccgcggcaucaucaagaccuucuccaacgggugcgacuacgucagcaacaagggcguggacaccguguccgucggcaacacccuguacuacgugaacaagcaggagggcaagagccucuacgugaagggggagcccaucaucaacuucuacgacccgcuggucuuccccuccgacgaguucgacgccagcaucucccaggugaacgagaagaucaaccagagccuggccuucauccggaaguccgacgagcuccugcacaacgugaacgucggcaagagcaccacgaacaucaugaucaccaccaucaucaucgugaucaucgugauccugcugcuccugaucgccgucgggcuguuccucuacugcaaggcccgcuccacccccgugacgcugagcaaggaccagcuguccgggaucaacaacaucgcguucagcaacugaggacuaguguccaccugucccuccugggcugcuggauugucucguuuuccugccaaauaaacaggaucagcgcuuuacagaucuaaaaaaaaaaaaaaaaaaaaaaaaaaaaaaaaaaaaaaaaaaaaaaaaaaaaaaaaaaaaaaaaugcaucccccccccccccccccccccccccccccccaaaggcucuuuucagagccaccagaauu

SEQ ID NO: 13388 - RNA, 1889 nt, Artificial Sequence
  mRNA product Design e-3 comprising derived and/or modified sequence from HRSV(Memphis-37)__AIY60640.1__F_DSCav1_mut0 (opt1)
gggagacuuucccauucuguagcagaauuugguguugccuguggucuuggucccgcggagaagcuuaccauggagcugcccauccucaagaccaacgccaucaccacgauccuggccgcggugacccugugcuucgccagcucccagaacaucaccgaggaguucuaccagagcacgugcuccgccgucagcaagggcuaccucuccgcccugcgcaccgggugguacaccagcgugaucaccaucgagcuguccaacaucaaggagaacaagugcaacggcaccgacgccaaggugaagcucaucaagcaggagcuggacaaguacaagaacgcggucacggagcugcagcuccugaugcagagcaccccggccgccggguccggcagcgccaucgcguccgggaucgccgugugcaaggugcugcaccucgagggcgaggucaacaagaucaagaacgcccugcugagcaccaacaaggccguggugucccucagcaacggcgucuccgugcugaccuucaaggugcuggaccucaagaacuacaucgacaagcagcugcugcccauccucaacaagcagagcugcuccaucagcaacaucgagacggucaucgaguuccagcagaagaacaaccggcugcuggagaucacccgcgaguucuccgugaacgccggggugaccacccccgucagcacguacaugcucaccaacagcgagcugcugucccucaucaacgacaugcccaucaccaacgaccagaagaagcugaugagcaacaacgugcagaucgugcggcagcaguccuacagcaucaugugcaucaucaaggaggagguccuggcguacguggugcagcucccgcuguacggcgucaucgacacccccugcuggaagcugcacacgagcccccucugcaccaccaacaccaaggagggguccaacaucugccugacgcgcaccgaccggggcugguacugcgacaacgccggguccgugagcuucuucccccaggccgagaccugcaaggugcaguccaaccgcgucuucugcgacaccaugaacagccggacgcucccguccgaggugaaccugugcaacaucgacaucuucaaccccaaguacgacugcaagaucaugaccagcaagaccgacgucuccagcuccgugaucaccagccugggcgccaucguguccugcuacggcaagacgaagugcaccgccagcaacaagaaccgggggaucaucaagaccuucuccaacggcugcgacuacgucagcaacaaggggguggacaccgugagcgucggcaacacgcucuacuacgugaacaagcaggagggcaagucccuguacgugaagggggagcccaucaucaacuucuacgacccccuggucuucccgagcgacgaguucgacgcguccaucagccaggugaacgagaagaucaaccagucccucgccuucauccgcaagagcgacgagcugcugcacaacgugaacgucggcaaguccaccaccaacaucaugaucaccaccaucaucaucgugaucaucgugauccuccugcugcucaucgccgucgggcuguuccuguacugcaaggcccggagcacgcccgugacccuguccaaggaccagcucagcggcaucaacaacaucgccuucuccaacugaggacuaguguccaccugucccuccugggcugcuggauugucucguuuuccugccaaauaaacaggaucagcgcuuuacagaucuaaaaaaaaaaaaaaaaaaaaaaaaaaaaaaaaaaaaaaaaaaaaaaaaaaaaaaaaaaaaaaaaugcaucccccccccccccccccccccccccccccccaaaggcucuuuucagagccaccagaauu

SEQ ID NO: 13389 - RNA, 1889 nt, Artificial Sequence
  mRNA product Design e-3 comprising derived and/or modified sequence from HRSV(Memphis-37)__AIY60640.1__F_DSCav1_mut0 (opt2)
gggagacuuucccauucuguagcagaauuugguguugccuguggucuuggucccgcggagaagcuuaccauggagcuccccauccucaagaccaacgccaucaccaccauccucgccgccgucacccucugcuucgccuccucccagaacaucaccgaggaguucuaccaguccaccugcuccgccgucuccaagggcuaccucuccgcccuccgcaccggcugguacaccuccgucaucaccaucgagcucuccaacaucaaggagaacaagugcaacggcaccgacgccaaggucaagcucaucaagcaggagcucgacaaguacaagaacgccgucaccgagcuccagcuccucaugcaguccacccccgccgccggcuccggcuccgccaucgccuccggcaucgccgucugcaagguccuccaccucgagggcgaggucaacaagaucaagaacgcccuccucuccaccaacaaggccgucgucucccucuccaacggcgucuccguccucaccuucaagguccucgaccucaagaacuacaucgacaagcagcuccuccccauccucaacaagcaguccugcuccaucuccaacaucgagaccgucaucgaguuccagcagaagaacaaccgccuccucgagaucacccgcgaguucuccgucaacgccggcgucaccacccccgucuccaccuacaugcucaccaacuccgagcuccucucccucaucaacgacaugcccaucaccaacgaccagaagaagcucauguccaacaacguccagaucguccgccagcaguccuacuccaucaugugcaucaucaaggaggagguccucgccuacgucguccagcucccccucuacggcgucaucgacacccccugcuggaagcuccacaccuccccccucugcaccaccaacaccaaggagggcuccaacaucugccucacccgcaccgaccgcggcugguacugcgacaacgccggcuccgucuccuucuucccccaggccgagaccugcaagguccaguccaaccgcgucuucugcgacaccaugaacucccgcacccuccccuccgaggucaaccucugcaacaucgacaucuucaaccccaaguacgacugcaagaucaugaccuccaagaccgacgucuccuccuccgucaucaccucccucggcgccaucgucuccugcuacggcaagaccaagugcaccgccuccaacaagaaccgcggcaucaucaagaccuucuccaacggcugcgacuacgucuccaacaagggcgucgacaccgucuccgucggcaacacccucuacuacgucaacaagcaggagggcaagucccucuacgucaagggcgagcccaucaucaacuucuacgacccccucgucuuccccuccgacgaguucgacgccuccaucucccaggucaacgagaagaucaaccagucccucgccuucauccgcaaguccgacgagcuccuccacaacgucaacgucggcaaguccaccaccaacaucaugaucaccaccaucaucaucgucaucaucgucauccuccuccuccucaucgccgucggccucuuccucuacugcaaggcccgcuccacccccgucacccucuccaaggaccagcucuccggcaucaacaacaucgccuucuccaacugaggacuaguguccaccugucccuccugggcugcuggauugucucguuuuccugccaaauaaacaggaucagcgcuuuacagaucuaaaaaaaaaaaaaaaaaaaaaaaaaaaaaaaaaaaaaaaaaaaaaaaaaaaaaaaaaaaaaaaaugcaucccccccccccccccccccccccccccccccaaaggcucuuuucagagccaccagaauu

SEQ ID NO: 13390 - RNA, 1889 nt, Artificial Sequence
  mRNA product Design e-3 comprising derived and/or modified sequence from HRSV(Memphis-37)__AIY60640.1__F_DSCav1_mut0 (opt3)
gggagacuuucccauucuguagcagaauuugguguugccuguggucuuggucccgcggagaagcuuaccauggagcugcccauccucaagaccaacgccauuacaacuauacuugcugcagugacgcugugcuucgccagcucccagaauaucaccgaagaguuuuaccaaucuacauguucagcggucaguaaaggcuauuugagcgcuuuaagaacugggugguacaccuccguuauuacaaucgaacugucuaacauuaaggagaauaaaugcaacggaaccgacgccaaggugaaacuaaucaagcaggaacucgauaaguauaaaaaugcaguaacugagcugcagcuucugaugcagucgaccccugccgcugguucaggcagcgcaauagccagugggaucgcuguguguaaggucuugcaccucgagggagaagugaacaaaauuaagaaugcccugcuguccacaaacaaagcgguugugucucucagcaauggcgucuccguguuaacguucaagguacuggaccuuaagaacuacaucgauaaacaauugcugccaauucuaaauaagcagucaugcaguaucagcaacauagagacuguuauugaauuucagcagaaaaauaacaggcuccuggagaucacccgggaguucucugugaaugccggugucacaacuccgguguccaccuauaugcuuacaaacucagaacuguugagccucauuaacgacaugcccaucaccaaugaucaaaagaaacugaugaguaacaaugugcagaucguccgccagcagucuuacuccauuauguguauaaucaaggaggaaguuuuagcauaugugguacaacugccucucuacggggugauugacacgccaugcuggaaacuucauacuagcccccuguguacaaccaacacuaaggagggaucgaauaucugcuugacacgaaccgaucguggcugguacugugacaacgcuggcucugucuccuuuuucccucaggccgaaacgugcaaggugcagucaaauagaguguuuugugauaccaugaacaguagaacacugccaagcgaggugaaucucugcaacauagacauuuucaaucccaaauaugauugcaagaucaugacuuccaaaaccgacgucucuagcucagugaucacaagucugggggcaauuguauccuguuacggaaagacuaaaugcaccgcuagcaacaagaauagggguaucauuaagacauuuucuaacggcugugauuauguuucaaauaaagggguggacaccgucagugugggaaacacucuuuacuaugucaacaagcaagagggcaaaagccuguacgugaagggugaaccuauaaucaauuucuaugacccauugguuuuuccguccgaugaguucgacgccucuauuucgcagguuaacgagaaaaucaaucagagccucgcguuuauccggaaguccgaugaacuguuacacaacguaaaugucgggaagucaacgacaaacauuaugauaaccacuaucauuaucgugauuaucguuauacugcuacuccugaucgccgugggacuuuucuuguacugcaaagcacgcaguacccccgucacacugucuaaggaccagcucagcggcauuaauaacaucgcuuucuccaauugaggacuaguguccaccugucccuccugggcugcuggauugucucguuuuccugccaaauaaacaggaucagcgcuuuacagaucuaaaaaaaaaaaaaaaaaaaaaaaaaaaaaaaaaaaaaaaaaaaaaaaaaaaaaaaaaaaaaaaaugcaucccccccccccccccccccccccccccccccaaaggcucuuuucagagccaccagaauu

SEQ ID NO: 13391 - RNA, 1889 nt, Artificial Sequence
  mRNA product Design e-3 comprising derived and/or modified sequence from HRSV(Memphis-37)__AIY60640.1__F_DSCav1_mut0 (opt4)
gggagacuuucccauucuguagcagaauuugguguugccuguggucuuggucccgcggagaagcuuaccauggagcugcccauccugaagaccaacgccaucaccaccauccuggccgccgugacccugugcuucgccagcagccagaacaucaccgaggaguucuaccagagcaccugcagcgccgugagcaagggcuaccugagcgcccugagaaccggcugguacaccagcgugaucaccaucgagcugagcaacaucaaggagaacaagugcaacggcaccgacgccaaggugaagcugaucaagcaggagcuggacaaguacaagaacgccgugaccgagcugcagcugcugaugcagagcacccccgccgccggcagcggcagcgccaucgccagcggcaucgccgugugcaaggugcugcaccuggagggcgaggugaacaagaucaagaacgcccugcugagcaccaacaaggccguggugagccugagcaacggcgugagcgugcugaccuucaaggugcuggaccugaagaacuacaucgacaagcagcugcugcccauccugaacaagcagagcugcagcaucagcaacaucgagaccgugaucgaguuccagcagaagaacaacagacugcuggagaucaccagagaguucagcgugaacgccggcgugaccacccccgugagcaccuacaugcugaccaacagcgagcugcugagccugaucaacgacaugcccaucaccaacgaccagaagaagcugaugagcaacaacgugcagaucgugagacagcagagcuacagcaucaugugcaucaucaaggaggaggugcuggccuacguggugcagcugccccuguacggcgugaucgacacccccugcuggaagcugcacaccagcccccugugcaccaccaacaccaaggagggcagcaacaucugccugaccagaaccgacagaggcugguacugcgacaacgccggcagcgugagcuucuucccccaggccgagaccugcaaggugcagagcaacagaguguucugcgacaccaugaacagcagaacccugcccagcgaggugaaccugugcaacaucgacaucuucaaccccaaguacgacugcaagaucaugaccagcaagaccgacgugagcagcagcgugaucaccagccugggcgccaucgugagcugcuacggcaagaccaagugcaccgccagcaacaagaacagaggcaucaucaagaccuucagcaacggcugcgacuacgugagcaacaagggcguggacaccgugagcgugggcaacacccuguacuacgugaacaagcaggagggcaagagccuguacgugaagggcgagcccaucaucaacuucuacgacccccugguguuccccagcgacgaguucgacgccagcaucagccaggugaacgagaagaucaaccagagccuggccuucaucagaaagagcgacgagcugcugcacaacgugaacgugggcaagagcaccaccaacaucaugaucaccaccaucaucaucgugaucaucgugauccugcugcugcugaucgccgugggccuguuccuguacugcaaggccagaagcacccccgugacccugagcaaggaccagcugagcggcaucaacaacaucgccuucagcaacugaggacuaguguccaccugucccuccugggcugcuggauugucucguuuuccugccaaauaaacaggaucagcgcuuuacagaucuaaaaaaaaaaaaaaaaaaaaaaaaaaaaaaaaaaaaaaaaaaaaaaaaaaaaaaaaaaaaaaaaugcaucccccccccccccccccccccccccccccccaaaggcucuuuucagagccaccagaauu

SEQ ID NO: 13392 - RNA, 1889 nt, Artificial Sequence
  mRNA product Design e-3 comprising derived and/or modified sequence from HRSV(Memphis-37)__AIY60640.1__F_DSCav1_mut0 (opt5)
gggagacuuucccauucuguagcagaauuugguguugccuguggucuuggucccgcggagaagcuuaccauggagcugcccauccucaagaccaacgccauuacaacgauccuggcugccgugacccuuugcuucgcgagcucccagaauauuacagaagaguuuuaccaaucuaccuguagcgcugucuccaaaggcuaucugucugcccucagaacagggugguacaccagcguuaucacaauugaacuguccaacaucaaggagaauaaaugcaacggaaccgacgccaaggugaaacuuaucaagcaggaacuggauaaguauaaaaaugcugugacggagcuccagcugcugaugcagucuaccccugccgcuggcagcggguccgccauugcgagcggaaucgccgucuguaaggugcuccaccuggagggcgaaguuaacaaaauuaagaaugcccuucugucuacaaacaaagcuguggucucccucagcaauggggugucuguucugaccuucaaggugcuugaccugaagaacuacaucgauaaacaacuccugccgauucugaauaagcaguccugcagcaucucuaacauugagacagucaucgaauuucagcagaaaaauaaccggcuccuggagaucacccgcgaguucuccgugaaugcuggagugacgacacccgucagcaccuauaugcuuacaaacuccgaacugcucucucugauuaacgacaugccuaucaccaaugaucaaaagaaacuuaugagcaacaauguucagauugugagacagcaguccuacagcaucauguguauuaucaaggaggaagugcuggccuaugucgugcaacucccccuguacggcguuaucgacaccccuugcuggaaacugcauacaucuccccucuguacgaccaacacaaaggagggcuccaauauuugccugacccggacagaucgcgggugguacugugacaacgcgggaagcgugagcuuuuucccucaggccgaaaccugcaagguccagucuaauagaguguuuugugauacgaugaacuccagaacacugccgucugagguuaaucucugcaacaucgacauuuucaaucccaaauaugauugcaagaucaugaccagcaaaaccgacguguccagcucugucauuacaucccugggcgcuaucgugagcuguuacgggaagaccaaaugcacagccucuaacaagaaucggggaaucauuaagacguuuuccaacggcugugauuaugucagcaauaaagggguggacaccguuuccgugggaaacacacuuuacuaugucaacaagcaagagggcaaaucucuguacgugaagggcgaaccuaucauuaauuucuaugacccccucguuuuuccuagcgaugaguucgacgcuuccaucucucaggugaacgaaaagauuaaucagagccuggccuuuauccgcaaguccgaugagcugcuccacaacgucaauguggggaaaagcaccacaaacauuaugaucaccacgaucauuaucgugauuaucguuauucugcuucugcucaucgccgucggacuguuccuguacugcaaagcuagaucuacccccgugacacuuuccaaggaccagcucagcggcaucaauaacauugcguucucuaauugaggacuaguguccaccugucccuccugggcugcuggauugucucguuuuccugccaaauaaacaggaucagcgcuuuacagaucuaaaaaaaaaaaaaaaaaaaaaaaaaaaaaaaaaaaaaaaaaaaaaaaaaaaaaaaaaaaaaaaaugcaucccccccccccccccccccccccccccccccaaaggcucuuuucagagccaccagaauu

SEQ ID NO: 13393 - RNA, 1889 nt, Artificial Sequence
  mRNA product Design e-3 comprising derived and/or modified sequence from HRSV(Memphis-37)__AIY60640.1__F_DSCav1_mut0 (opt6)
gggagacuuucccauucuguagcagaauuugguguugccuguggucuuggucccgcggagaagcuuaccauggaauuaccaaucuuaaaaacaaacgccauaacaaccauccucgcagcaguaacccuaugcuuugcauccucacaaaacauaacugaagaauuuuaccaaucaacaugcucagcaguaucaaaaggauaucuaucagcccucagaacaggaugguacacaucagucauuacaaucgaacuuucaaacauaaaagaaaauaaauguaacggcacagaugccaaaguaaaauuaauuaaacaagaacuugacaaauacaaaaaugccguaacagaacuacaacuacuaaugcaaaguacuccugcugcaggaagcggaucugcaauagcaucagguauagcaguauguaaaguucuacaccuagaaggcgaaguaaacaaaauuaaaaacgcacuacucucaacaaauaaagcaguugucucccuaucaaacggaguaucaguauuaacuuucaaaguacuagaccucaaaaacuauauagacaaacaacuauuaccaauacuaaacaaacaaagcugcucuaucuccaacaucgaaacaguaauagaauuucaacaaaaaaauaauagacuacuugaaauaaccagagaauuuucaguaaacgccggaguaacaacaccaguaucaacuuacaugcuaacaaacuccgaacuacuaucauuaauaaacgacaugcccauaacaaacgaccaaaaaaaauuaaugucaaacaacguccaaaucguacgacaacaauccuauuccauaauguguauaauaaaagaagaaguacuagcauacguaguacaauuaccauuauauggaguaauagauaccccuugcuggaaacuacacacaucaccccuaugcacuacaaauacgaaagaagguucaaauauaugcuuaacuagaaccgauagagguugguauugugacaacgcuggaucaguaucauuuuucccacaagcagaaacaugcaaaguacaaucaaacagaguauuuugcgacacuaugaacucaagaacuuuaccauccgaaguuaaucuauguaacauagauauauuuaacccaaaauacgacugcaaaauaaugacaucaaaaacagauguaucaucaucaguuauaaccucccucggagcaauaguaucaugcuauggaaaaacaaaaugcacagcaucaaacaaaaaucguggaauuauaaaaacauucucaaacggcugugacuacgucagcaauaaaggaguagacacagucucaguaggaaacacuuuauacuauguuaacaaacaagaaggaaaaucacucuacgucaaaggcgaaccaauaauaaauuucuaugacccacucguauucccauccgacgaauuugacgcaucaauaucacaaguaaaugaaaaaauaaaccaaagccuagcauuuauacgaaaaucagacgaacuacuacacaacguaaacguagguaaaagcacaaccaauauaaugauaacaacaauaaucauaguaauaaucguaauauuacuauuacuaauagcuguaggauuguuccuauacugcaaagcaagaucaacaccaguaaccuuaucuaaggaccaacuaucaggaaucaauaacauugccuucucaaacuaaggacuaguguccaccugucccuccugggcugcuggauugucucguuuuccugccaaauaaacaggaucagcgcuuuacagaucuaaaaaaaaaaaaaaaaaaaaaaaaaaaaaaaaaaaaaaaaaaaaaaaaaaaaaaaaaaaaaaaaugcaucccccccccccccccccccccccccccccccaaaggcucuuuucagagccaccagaauu

SEQ ID NO: 13394 - RNA, 1889 nt, Artificial Sequence
  mRNA product Design e-3 comprising derived and/or modified sequence from HRSV(Memphis-37)__AIY60640.1__F_DSCav1_mut0 (opt11)
gggagacuuucccauucuguagcagaauuugguguugccuguggucuuggucccgcggagaagcuuaccauggaacuaccuauccuuaaaaccaacgcaaucaccaccauccuugccgcagucacacucugcuucgcauccucacagaacaucaccgaagaguucuaucaaucaaccugcuccgccguauccaaaggauaccucucagcccuccgcaccggcugguauaccucagucauaacaaucgaauuaucaaauaucaaggagaacaaaugcaacggcaccgacgccaaagucaaacucauaaaacaagaacuagacaaauacaaaaacgccgugacagaacuccaacuccucaugcaguccacccccgcagccggauccggcucagcaaucgccucgggcauugcaguaugcaaaguccuccaccucgaaggcgaagucaacaaaaucaaaaacgcccuccucuccaccaacaaagccgucgucucccucuccaacggcguaucuguccucacuuucaagguccucgaccucaaaaacuacaucgacaagcaacuacuuccaauccucaacaagcaauccugcucaaucucaaacaucgaaaccguaauagaguuccaacaaaagaacaaccgccuccucgaaaucacccgcgaguucuccguuaacgccggugucacuaccccagucagcaccuacaugcucaccaacuccgaacuccuuucucugaucaacgacaugccaaucaccaacgaucaaaagaaauuaauguccaacaacguccagaucguccgccaacaaagcuacagcaucaugugcaucauaaaagaagaaguacuugcguacguaguucaacuaccccuuuacggcguaaucgacaccccaugcuggaaacuccacaccuccccacuaugcaccaccaacaccaaagaaggauccaacaucugccuaacccgcaccgaccgcggcugguacugcgacaacgcugggagcgucucauucuucccacaagcagaaaccugcaaaguccaaucgaaccgcguauucugcgacaccaugaacuccagaacccuaccaagcgaagucaaucuuugcaacaucgacauauuuaaccccaaauacgacugcaaaaucaugacaucaaagaccgacgucucaucuucagucauuaccucacucggcgcaauugucagcugcuacggaaagaccaaauguaccgccuccaauaaaaaccguggaaucauaaaaaccuuuagcaacggcugcgacuacgucuccaacaaaggagucgacaccgucuccgucggcaacacccucuacuacgucaacaaacaagaaggaaaaucccucuacgugaaaggcgaacccauaauaaacuucuacgacccccuagucuuccccucugacgaguucgacgccuccaucucccaagucaacgaaaagauaaaucaaucacuagccuucauacgcaaaucugacgaacuucuccacaacgucaacgucggcaaauccaccaccaacauaaugaucacaacgauaauaaucgugaucauaguaauccuacuucuccucaucgcaguaggucuauuccuauacugcaaagcccgcagcacccccgucacccuaucaaaagaccaacucuccggcaucaacaacaucgccuucucaaacuaaggacuaguguccaccugucccuccugggcugcuggauugucucguuuuccugccaaauaaacaggaucagcgcuuuacagaucuaaaaaaaaaaaaaaaaaaaaaaaaaaaaaaaaaaaaaaaaaaaaaaaaaaaaaaaaaaaaaaaaugcaucccccccccccccccccccccccccccccccaaaggcucuuuucagagccaccagaauu

SEQ ID NO: 13395 - RNA, 1943 nt, Artificial Sequence
  mRNA product Design e-4 comprising derived and/or modified sequence from HRSV(Memphis-37)__AIY60640.1__F_DSCav1_mut0 (opt1)
gggagacuccugucgggcggaaguaggaggaguagaguuuaaaaacaguacucuuuuuccgguucgggacguaguugaagcaacgacaagccggauaaccgcucuugagacaggaagcuuaccauggagcugcccauccucaagaccaacgccaucaccacgauccuggccgcggugacccugugcuucgccagcucccagaacaucaccgaggaguucuaccagagcacgugcuccgccgucagcaagggcuaccucuccgcccugcgcaccgggugguacaccagcgugaucaccaucgagcuguccaacaucaaggagaacaagugcaacggcaccgacgccaaggugaagcucaucaagcaggagcuggacaaguacaagaacgcggucacggagcugcagcuccugaugcagagcaccccggccgccggcuccgggagcgcgaucgccuccggcaucgccgucugcaaggugcugcaccucgagggcgaggugaacaagaucaagaacgcccugcuguccaccaacaaggccgucgugagccucuccaacggggugagcguccugaccuucaaggugcuggaccucaagaacuacaucgacaagcagcugcugcccauccugaacaagcagagcugcuccaucagcaacaucgagaccgucaucgaguuccagcagaagaacaaccgccuccuggagaucacgcgggaguucagcgugaacgcgggcgugaccacccccgucuccaccuacaugcugacgaacagcgagcuccugucccugaucaacgacaugccgaucaccaacgaccagaagaagcucaugagcaacaacgugcagaucgugcgccagcaguccuacagcaucaugugcaucaucaaggaggagguccuggccuacguggugcagcugccccucuacggggucaucgacacccccugcuggaagcugcacaccagcccccugugcacgaccaacaccaaggagggcuccaacaucugccucacccggacggaccgcgggugguacugcgacaacgccggcagcguguccuucuucccgcaggccgagaccugcaagguccagagcaaccggguguucugcgacaccaugaacucccggacccugcccagcgaggugaaccucugcaacaucgacaucuucaaccccaaguacgacugcaagaucaugacguccaagaccgacgucagcuccagcgugaucaccucccugggcgccaucgugagcugcuacgggaagaccaagugcacggcgagcaacaagaaccgcggcaucaucaagaccuucuccaacgggugcgacuacgucagcaacaagggcguggacaccguguccgucggcaacacccuguacuacgugaacaagcaggagggcaagagccucuacgugaagggggagcccaucaucaacuucuacgacccgcuggucuuccccuccgacgaguucgacgccagcaucucccaggugaacgagaagaucaaccagagccuggccuucauccggaaguccgacgagcuccugcacaacgugaacgucggcaagagcaccacgaacaucaugaucaccaccaucaucaucgugaucaucgugauccugcugcuccugaucgccgucgggcuguuccucuacugcaaggcccgcuccacccccgugacgcugagcaaggaccagcuguccgggaucaacaacaucgcguucagcaacugaggacuaguguccaccugucccuccugggcugcuggauugucucguuuuccugccaaauaaacaggaucagcgcuuuacagaucuaaaaaaaaaaaaaaaaaaaaaaaaaaaaaaaaaaaaaaaaaaaaaaaaaaaaaaaaaaaaaaaaugcaucccccccccccccccccccccccccccccccaaaggcucuuuucagagccaccagaauu

SEQ ID NO: 13396 - RNA, 1943 nt, Artificial Sequence
  mRNA product Design e-4 comprising derived and/or modified sequence from HRSV(Memphis-37)__AIY60640.1__F_DSCav1_mut0 (opt1)
gggagacuccugucgggcggaaguaggaggaguagaguuuaaaaacaguacucuuuuuccgguucgggacguaguugaagcaacgacaagccggauaaccgcucuugagacaggaagcuuaccauggagcugcccauccucaagaccaacgccaucaccacgauccuggccgcggugacccugugcuucgccagcucccagaacaucaccgaggaguucuaccagagcacgugcuccgccgucagcaagggcuaccucuccgcccugcgcaccgggugguacaccagcgugaucaccaucgagcuguccaacaucaaggagaacaagugcaacggcaccgacgccaaggugaagcucaucaagcaggagcuggacaaguacaagaacgcggucacggagcugcagcuccugaugcagagcaccccggccgccggguccggcagcgccaucgcguccgggaucgccgugugcaaggugcugcaccucgagggcgaggucaacaagaucaagaacgcccugcugagcaccaacaaggccguggugucccucagcaacggcgucuccgugcugaccuucaaggugcuggaccucaagaacuacaucgacaagcagcugcugcccauccucaacaagcagagcugcuccaucagcaacaucgagacggucaucgaguuccagcagaagaacaaccggcugcuggagaucacccgcgaguucuccgugaacgccggggugaccacccccgucagcacguacaugcucaccaacagcgagcugcugucccucaucaacgacaugcccaucaccaacgaccagaagaagcugaugagcaacaacgugcagaucgugcggcagcaguccuacagcaucaugugcaucaucaaggaggagguccuggcguacguggugcagcucccgcuguacggcgucaucgacacccccugcuggaagcugcacacgagcccccucugcaccaccaacaccaaggagggguccaacaucugccugacgcgcaccgaccggggcugguacugcgacaacgccggguccgugagcuucuucccccaggccgagaccugcaaggugcaguccaaccgcgucuucugcgacaccaugaacagccggacgcucccguccgaggugaaccugugcaacaucgacaucuucaaccccaaguacgacugcaagaucaugaccagcaagaccgacgucuccagcuccgugaucaccagccugggcgccaucguguccugcuacggcaagacgaagugcaccgccagcaacaagaaccgggggaucaucaagaccuucuccaacggcugcgacuacgucagcaacaaggggguggacaccgugagcgucggcaacacgcucuacuacgugaacaagcaggagggcaagucccuguacgugaagggggagcccaucaucaacuucuacgacccccuggucuucccgagcgacgaguucgacgcguccaucagccaggugaacgagaagaucaaccagucccucgccuucauccgcaagagcgacgagcugcugcacaacgugaacgucggcaaguccaccaccaacaucaugaucaccaccaucaucaucgugaucaucgugauccuccugcugcucaucgccgucgggcuguuccuguacugcaaggcccggagcacgcccgugacccuguccaaggaccagcucagcggcaucaacaacaucgccuucuccaacugaggacuaguguccaccugucccuccugggcugcuggauugucucguuuuccugccaaauaaacaggaucagcgcuuuacagaucuaaaaaaaaaaaaaaaaaaaaaaaaaaaaaaaaaaaaaaaaaaaaaaaaaaaaaaaaaaaaaaaaugcaucccccccccccccccccccccccccccccccaaaggcucuuuucagagccaccagaauu

SEQ ID NO: 13397 - RNA, 1943 nt, Artificial Sequence
  mRNA product Design e-4 comprising derived and/or modified sequence from HRSV(Memphis-37)__AIY60640.1__F_DSCav1_mut0 (opt2)
gggagacuccugucgggcggaaguaggaggaguagaguuuaaaaacaguacucuuuuuccgguucgggacguaguugaagcaacgacaagccggauaaccgcucuugagacaggaagcuuaccauggagcuccccauccucaagaccaacgccaucaccaccauccucgccgccgucacccucugcuucgccuccucccagaacaucaccgaggaguucuaccaguccaccugcuccgccgucuccaagggcuaccucuccgcccuccgcaccggcugguacaccuccgucaucaccaucgagcucuccaacaucaaggagaacaagugcaacggcaccgacgccaaggucaagcucaucaagcaggagcucgacaaguacaagaacgccgucaccgagcuccagcuccucaugcaguccacccccgccgccggcuccggcuccgccaucgccuccggcaucgccgucugcaagguccuccaccucgagggcgaggucaacaagaucaagaacgcccuccucuccaccaacaaggccgucgucucccucuccaacggcgucuccguccucaccuucaagguccucgaccucaagaacuacaucgacaagcagcuccuccccauccucaacaagcaguccugcuccaucuccaacaucgagaccgucaucgaguuccagcagaagaacaaccgccuccucgagaucacccgcgaguucuccgucaacgccggcgucaccacccccgucuccaccuacaugcucaccaacuccgagcuccucucccucaucaacgacaugcccaucaccaacgaccagaagaagcucauguccaacaacguccagaucguccgccagcaguccuacuccaucaugugcaucaucaaggaggagguccucgccuacgucguccagcucccccucuacggcgucaucgacacccccugcuggaagcuccacaccuccccccucugcaccaccaacaccaaggagggcuccaacaucugccucacccgcaccgaccgcggcugguacugcgacaacgccggcuccgucuccuucuucccccaggccgagaccugcaagguccaguccaaccgcgucuucugcgacaccaugaacucccgcacccuccccuccgaggucaaccucugcaacaucgacaucuucaaccccaaguacgacugcaagaucaugaccuccaagaccgacgucuccuccuccgucaucaccucccucggcgccaucgucuccugcuacggcaagaccaagugcaccgccuccaacaagaaccgcggcaucaucaagaccuucuccaacggcugcgacuacgucuccaacaagggcgucgacaccgucuccgucggcaacacccucuacuacgucaacaagcaggagggcaagucccucuacgucaagggcgagcccaucaucaacuucuacgacccccucgucuuccccuccgacgaguucgacgccuccaucucccaggucaacgagaagaucaaccagucccucgccuucauccgcaaguccgacgagcuccuccacaacgucaacgucggcaaguccaccaccaacaucaugaucaccaccaucaucaucgucaucaucgucauccuccuccuccucaucgccgucggccucuuccucuacugcaaggcccgcuccacccccgucacccucuccaaggaccagcucuccggcaucaacaacaucgccuucuccaacugaggacuaguguccaccugucccuccugggcugcuggauugucucguuuuccugccaaauaaacaggaucagcgcuuuacagaucuaaaaaaaaaaaaaaaaaaaaaaaaaaaaaaaaaaaaaaaaaaaaaaaaaaaaaaaaaaaaaaaaugcaucccccccccccccccccccccccccccccccaaaggcucuuuucagagccaccagaauu

SEQ ID NO: 13398 - RNA, 1943 nt, Artificial Sequence
  mRNA product Design e-4 comprising derived and/or modified sequence from HRSV(Memphis-37)__AIY60640.1__F_DSCav1_mut0 (opt3)
gggagacuccugucgggcggaaguaggaggaguagaguuuaaaaacaguacucuuuuuccgguucgggacguaguugaagcaacgacaagccggauaaccgcucuugagacaggaagcuuaccauggagcugcccauccucaagaccaacgccauuacaacuauacuugcugcagugacgcugugcuucgccagcucccagaauaucaccgaagaguuuuaccaaucuacauguucagcggucaguaaaggcuauuugagcgcuuuaagaacugggugguacaccuccguuauuacaaucgaacugucuaacauuaaggagaauaaaugcaacggaaccgacgccaaggugaaacuaaucaagcaggaacucgauaaguauaaaaaugcaguaacugagcugcagcuucugaugcagucgaccccugccgcugguucaggcagcgcaauagccagugggaucgcuguguguaaggucuugcaccucgagggagaagugaacaaaauuaagaaugcccugcuguccacaaacaaagcgguugugucucucagcaauggcgucuccguguuaacguucaagguacuggaccuuaagaacuacaucgauaaacaauugcugccaauucuaaauaagcagucaugcaguaucagcaacauagagacuguuauugaauuucagcagaaaaauaacaggcuccuggagaucacccgggaguucucugugaaugccggugucacaacuccgguguccaccuauaugcuuacaaacucagaacuguugagccucauuaacgacaugcccaucaccaaugaucaaaagaaacugaugaguaacaaugugcagaucguccgccagcagucuuacuccauuauguguauaaucaaggaggaaguuuuagcauaugugguacaacugccucucuacggggugauugacacgccaugcuggaaacuucauacuagcccccuguguacaaccaacacuaaggagggaucgaauaucugcuugacacgaaccgaucguggcugguacugugacaacgcuggcucugucuccuuuuucccucaggccgaaacgugcaaggugcagucaaauagaguguuuugugauaccaugaacaguagaacacugccaagcgaggugaaucucugcaacauagacauuuucaaucccaaauaugauugcaagaucaugacuuccaaaaccgacgucucuagcucagugaucacaagucugggggcaauuguauccuguuacggaaagacuaaaugcaccgcuagcaacaagaauagggguaucauuaagacauuuucuaacggcugugauuauguuucaaauaaagggguggacaccgucagugugggaaacacucuuuacuaugucaacaagcaagagggcaaaagccuguacgugaagggugaaccuauaaucaauuucuaugacccauugguuuuuccguccgaugaguucgacgccucuauuucgcagguuaacgagaaaaucaaucagagccucgcguuuauccggaaguccgaugaacuguuacacaacguaaaugucgggaagucaacgacaaacauuaugauaaccacuaucauuaucgugauuaucguuauacugcuacuccugaucgccgugggacuuuucuuguacugcaaagcacgcaguacccccgucacacugucuaaggaccagcucagcggcauuaauaacaucgcuuucuccaauugaggacuaguguccaccugucccuccugggcugcuggauugucucguuuuccugccaaauaaacaggaucagcgcuuuacagaucuaaaaaaaaaaaaaaaaaaaaaaaaaaaaaaaaaaaaaaaaaaaaaaaaaaaaaaaaaaaaaaaaugcaucccccccccccccccccccccccccccccccaaaggcucuuuucagagccaccagaauu

SEQ ID NO: 13399 - RNA, 1943 nt, Artificial Sequence
  mRNA product Design e-4 comprising derived and/or modified sequence from HRSV(Memphis-37)__AIY60640.1__F_DSCav1_mut0 (opt4)
gggagacuccugucgggcggaaguaggaggaguagaguuuaaaaacaguacucuuuuuccgguucgggacguaguugaagcaacgacaagccggauaaccgcucuugagacaggaagcuuaccauggagcugcccauccugaagaccaacgccaucaccaccauccuggccgccgugacccugugcuucgccagcagccagaacaucaccgaggaguucuaccagagcaccugcagcgccgugagcaagggcuaccugagcgcccugagaaccggcugguacaccagcgugaucaccaucgagcugagcaacaucaaggagaacaagugcaacggcaccgacgccaaggugaagcugaucaagcaggagcuggacaaguacaagaacgccgugaccgagcugcagcugcugaugcagagcacccccgccgccggcagcggcagcgccaucgccagcggcaucgccgugugcaaggugcugcaccuggagggcgaggugaacaagaucaagaacgcccugcugagcaccaacaaggccguggugagccugagcaacggcgugagcgugcugaccuucaaggugcuggaccugaagaacuacaucgacaagcagcugcugcccauccugaacaagcagagcugcagcaucagcaacaucgagaccgugaucgaguuccagcagaagaacaacagacugcuggagaucaccagagaguucagcgugaacgccggcgugaccacccccgugagcaccuacaugcugaccaacagcgagcugcugagccugaucaacgacaugcccaucaccaacgaccagaagaagcugaugagcaacaacgugcagaucgugagacagcagagcuacagcaucaugugcaucaucaaggaggaggugcuggccuacguggugcagcugccccuguacggcgugaucgacacccccugcuggaagcugcacaccagcccccugugcaccaccaacaccaaggagggcagcaacaucugccugaccagaaccgacagaggcugguacugcgacaacgccggcagcgugagcuucuucccccaggccgagaccugcaaggugcagagcaacagaguguucugcgacaccaugaacagcagaacccugcccagcgaggugaaccugugcaacaucgacaucuucaaccccaaguacgacugcaagaucaugaccagcaagaccgacgugagcagcagcgugaucaccagccugggcgccaucgugagcugcuacggcaagaccaagugcaccgccagcaacaagaacagaggcaucaucaagaccuucagcaacggcugcgacuacgugagcaacaagggcguggacaccgugagcgugggcaacacccuguacuacgugaacaagcaggagggcaagagccuguacgugaagggcgagcccaucaucaacuucuacgacccccugguguuccccagcgacgaguucgacgccagcaucagccaggugaacgagaagaucaaccagagccuggccuucaucagaaagagcgacgagcugcugcacaacgugaacgugggcaagagcaccaccaacaucaugaucaccaccaucaucaucgugaucaucgugauccugcugcugcugaucgccgugggccuguuccuguacugcaaggccagaagcacccccgugacccugagcaaggaccagcugagcggcaucaacaacaucgccuucagcaacugaggacuaguguccaccugucccuccugggcugcuggauugucucguuuuccugccaaauaaacaggaucagcgcuuuacagaucuaaaaaaaaaaaaaaaaaaaaaaaaaaaaaaaaaaaaaaaaaaaaaaaaaaaaaaaaaaaaaaaaugcaucccccccccccccccccccccccccccccccaaaggcucuuuucagagccaccagaauu

SEQ ID NO: 13400 - RNA, 1943 nt, Artificial Sequence
  mRNA product Design e-4 comprising derived and/or modified sequence from HRSV(Memphis-37)__AIY60640.1__F_DSCav1_mut0 (opt5)
gggagacuccugucgggcggaaguaggaggaguagaguuuaaaaacaguacucuuuuuccgguucgggacguaguugaagcaacgacaagccggauaaccgcucuugagacaggaagcuuaccauggagcugcccauccucaagaccaacgccauuacaacgauccuggcugccgugacccuuugcuucgcgagcucccagaauauuacagaagaguuuuaccaaucuaccuguagcgcugucuccaaaggcuaucugucugcccucagaacagggugguacaccagcguuaucacaauugaacuguccaacaucaaggagaauaaaugcaacggaaccgacgccaaggugaaacuuaucaagcaggaacuggauaaguauaaaaaugcugugacggagcuccagcugcugaugcagucuaccccugccgcuggcagcggguccgccauugcgagcggaaucgccgucuguaaggugcuccaccuggagggcgaaguuaacaaaauuaagaaugcccuucugucuacaaacaaagcuguggucucccucagcaauggggugucuguucugaccuucaaggugcuugaccugaagaacuacaucgauaaacaacuccugccgauucugaauaagcaguccugcagcaucucuaacauugagacagucaucgaauuucagcagaaaaauaaccggcuccuggagaucacccgcgaguucuccgugaaugcuggagugacgacacccgucagcaccuauaugcuuacaaacuccgaacugcucucucugauuaacgacaugccuaucaccaaugaucaaaagaaacuuaugagcaacaauguucagauugugagacagcaguccuacagcaucauguguauuaucaaggaggaagugcuggccuaugucgugcaacucccccuguacggcguuaucgacaccccuugcuggaaacugcauacaucuccccucuguacgaccaacacaaaggagggcuccaauauuugccugacccggacagaucgcgggugguacugugacaacgcgggaagcgugagcuuuuucccucaggccgaaaccugcaagguccagucuaauagaguguuuugugauacgaugaacuccagaacacugccgucugagguuaaucucugcaacaucgacauuuucaaucccaaauaugauugcaagaucaugaccagcaaaaccgacguguccagcucugucauuacaucccugggcgcuaucgugagcuguuacgggaagaccaaaugcacagccucuaacaagaaucggggaaucauuaagacguuuuccaacggcugugauuaugucagcaauaaagggguggacaccguuuccgugggaaacacacuuuacuaugucaacaagcaagagggcaaaucucuguacgugaagggcgaaccuaucauuaauuucuaugacccccucguuuuuccuagcgaugaguucgacgcuuccaucucucaggugaacgaaaagauuaaucagagccuggccuuuauccgcaaguccgaugagcugcuccacaacgucaauguggggaaaagcaccacaaacauuaugaucaccacgaucauuaucgugauuaucguuauucugcuucugcucaucgccgucggacuguuccuguacugcaaagcuagaucuacccccgugacacuuuccaaggaccagcucagcggcaucaauaacauugcguucucuaauugaggacuaguguccaccugucccuccugggcugcuggauugucucguuuuccugccaaauaaacaggaucagcgcuuuacagaucuaaaaaaaaaaaaaaaaaaaaaaaaaaaaaaaaaaaaaaaaaaaaaaaaaaaaaaaaaaaaaaaaugcaucccccccccccccccccccccccccccccccaaaggcucuuuucagagccaccagaauu

SEQ ID NO: 13401 - RNA, 1943 nt, Artificial Sequence
  mRNA product Design e-4 comprising derived and/or modified sequence from HRSV(Memphis-37)__AIY60640.1__F_DSCav1_mut0 (opt6)
gggagacuccugucgggcggaaguaggaggaguagaguuuaaaaacaguacucuuuuuccgguucgggacguaguugaagcaacgacaagccggauaaccgcucuugagacaggaagcuuaccauggaauuaccaaucuuaaaaacaaacgccauaacaaccauccucgcagcaguaacccuaugcuuugcauccucacaaaacauaacugaagaauuuuaccaaucaacaugcucagcaguaucaaaaggauaucuaucagcccucagaacaggaugguacacaucagucauuacaaucgaacuuucaaacauaaaagaaaauaaauguaacggcacagaugccaaaguaaaauuaauuaaacaagaacuugacaaauacaaaaaugccguaacagaacuacaacuacuaaugcaaaguacuccugcugcaggaagcggaucugcaauagcaucagguauagcaguauguaaaguucuacaccuagaaggcgaaguaaacaaaauuaaaaacgcacuacucucaacaaauaaagcaguugucucccuaucaaacggaguaucaguauuaacuuucaaaguacuagaccucaaaaacuauauagacaaacaacuauuaccaauacuaaacaaacaaagcugcucuaucuccaacaucgaaacaguaauagaauuucaacaaaaaaauaauagacuacuugaaauaaccagagaauuuucaguaaacgccggaguaacaacaccaguaucaacuuacaugcuaacaaacuccgaacuacuaucauuaauaaacgacaugcccauaacaaacgaccaaaaaaaauuaaugucaaacaacguccaaaucguacgacaacaauccuauuccauaauguguauaauaaaagaagaaguacuagcauacguaguacaauuaccauuauauggaguaauagauaccccuugcuggaaacuacacacaucaccccuaugcacuacaaauacgaaagaagguucaaauauaugcuuaacuagaaccgauagagguugguauugugacaacgcuggaucaguaucauuuuucccacaagcagaaacaugcaaaguacaaucaaacagaguauuuugcgacacuaugaacucaagaacuuuaccauccgaaguuaaucuauguaacauagauauauuuaacccaaaauacgacugcaaaauaaugacaucaaaaacagauguaucaucaucaguuauaaccucccucggagcaauaguaucaugcuauggaaaaacaaaaugcacagcaucaaacaaaaaucguggaauuauaaaaacauucucaaacggcugugacuacgucagcaauaaaggaguagacacagucucaguaggaaacacuuuauacuauguuaacaaacaagaaggaaaaucacucuacgucaaaggcgaaccaauaauaaauuucuaugacccacucguauucccauccgacgaauuugacgcaucaauaucacaaguaaaugaaaaaauaaaccaaagccuagcauuuauacgaaaaucagacgaacuacuacacaacguaaacguagguaaaagcacaaccaauauaaugauaacaacaauaaucauaguaauaaucguaauauuacuauuacuaauagcuguaggauuguuccuauacugcaaagcaagaucaacaccaguaaccuuaucuaaggaccaacuaucaggaaucaauaacauugccuucucaaacuaaggacuaguguccaccugucccuccugggcugcuggauugucucguuuuccugccaaauaaacaggaucagcgcuuuacagaucuaaaaaaaaaaaaaaaaaaaaaaaaaaaaaaaaaaaaaaaaaaaaaaaaaaaaaaaaaaaaaaaaugcaucccccccccccccccccccccccccccccccaaaggcucuuuucagagccaccagaauu

SEQ ID NO: 13402 - RNA, 1943 nt, Artificial Sequence
  mRNA product Design e-4 comprising derived and/or modified sequence from HRSV(Memphis-37)__AIY60640.1__F_DSCav1_mut0 (opt11)
gggagacuccugucgggcggaaguaggaggaguagaguuuaaaaacaguacucuuuuuccgguucgggacguaguugaagcaacgacaagccggauaaccgcucuugagacaggaagcuuaccauggaacuaccuauccuuaaaaccaacgcaaucaccaccauccuugccgcagucacacucugcuucgcauccucacagaacaucaccgaagaguucuaucaaucaaccugcuccgccguauccaaaggauaccucucagcccuccgcaccggcugguauaccucagucauaacaaucgaauuaucaaauaucaaggagaacaaaugcaacggcaccgacgccaaagucaaacucauaaaacaagaacuagacaaauacaaaaacgccgugacagaacuccaacuccucaugcaguccacccccgcagccggauccggcucagcaaucgccucgggcauugcaguaugcaaaguccuccaccucgaaggcgaagucaacaaaaucaaaaacgcccuccucuccaccaacaaagccgucgucucccucuccaacggcguaucuguccucacuuucaagguccucgaccucaaaaacuacaucgacaagcaacuacuuccaauccucaacaagcaauccugcucaaucucaaacaucgaaaccguaauagaguuccaacaaaagaacaaccgccuccucgaaaucacccgcgaguucuccguuaacgccggugucacuaccccagucagcaccuacaugcucaccaacuccgaacuccuuucucugaucaacgacaugccaaucaccaacgaucaaaagaaauuaauguccaacaacguccagaucguccgccaacaaagcuacagcaucaugugcaucauaaaagaagaaguacuugcguacguaguucaacuaccccuuuacggcguaaucgacaccccaugcuggaaacuccacaccuccccacuaugcaccaccaacaccaaagaaggauccaacaucugccuaacccgcaccgaccgcggcugguacugcgacaacgcugggagcgucucauucuucccacaagcagaaaccugcaaaguccaaucgaaccgcguauucugcgacaccaugaacuccagaacccuaccaagcgaagucaaucuuugcaacaucgacauauuuaaccccaaauacgacugcaaaaucaugacaucaaagaccgacgucucaucuucagucauuaccucacucggcgcaauugucagcugcuacggaaagaccaaauguaccgccuccaauaaaaaccguggaaucauaaaaaccuuuagcaacggcugcgacuacgucuccaacaaaggagucgacaccgucuccgucggcaacacccucuacuacgucaacaaacaagaaggaaaaucccucuacgugaaaggcgaacccauaauaaacuucuacgacccccuagucuuccccucugacgaguucgacgccuccaucucccaagucaacgaaaagauaaaucaaucacuagccuucauacgcaaaucugacgaacuucuccacaacgucaacgucggcaaauccaccaccaacauaaugaucacaacgauaauaaucgugaucauaguaauccuacuucuccucaucgcaguaggucuauuccuauacugcaaagcccgcagcacccccgucacccuaucaaaagaccaacucuccggcaucaacaacaucgccuucucaaacuaaggacuaguguccaccugucccuccugggcugcuggauugucucguuuuccugccaaauaaacaggaucagcgcuuuacagaucuaaaaaaaaaaaaaaaaaaaaaaaaaaaaaaaaaaaaaaaaaaaaaaaaaaaaaaaaaaaaaaaaugcaucccccccccccccccccccccccccccccccaaaggcucuuuucagagccaccagaauu

SEQ ID NO: 13403 - RNA, 1910 nt, Artificial Sequence
  mRNA product Design e-5 comprising derived and/or modified sequence from HRSV(Memphis-37)__AIY60640.1__F_DSCav1_mut0 (opt1)
gggagagcggcucggccauuuugucccagucaguccggaggcugcggcugcagaaguaccgccugcggaguaacugcaaagaagcuuaccauggagcugcccauccucaagaccaacgccaucaccacgauccuggccgcggugacccugugcuucgccagcucccagaacaucaccgaggaguucuaccagagcacgugcuccgccgucagcaagggcuaccucuccgcccugcgcaccgggugguacaccagcgugaucaccaucgagcuguccaacaucaaggagaacaagugcaacggcaccgacgccaaggugaagcucaucaagcaggagcuggacaaguacaagaacgcggucacggagcugcagcuccugaugcagagcaccccggccgccggcuccgggagcgcgaucgccuccggcaucgccgucugcaaggugcugcaccucgagggcgaggugaacaagaucaagaacgcccugcuguccaccaacaaggccgucgugagccucuccaacggggugagcguccugaccuucaaggugcuggaccucaagaacuacaucgacaagcagcugcugcccauccugaacaagcagagcugcuccaucagcaacaucgagaccgucaucgaguuccagcagaagaacaaccgccuccuggagaucacgcgggaguucagcgugaacgcgggcgugaccacccccgucuccaccuacaugcugacgaacagcgagcuccugucccugaucaacgacaugccgaucaccaacgaccagaagaagcucaugagcaacaacgugcagaucgugcgccagcaguccuacagcaucaugugcaucaucaaggaggagguccuggccuacguggugcagcugccccucuacggggucaucgacacccccugcuggaagcugcacaccagcccccugugcacgaccaacaccaaggagggcuccaacaucugccucacccggacggaccgcgggugguacugcgacaacgccggcagcguguccuucuucccgcaggccgagaccugcaagguccagagcaaccggguguucugcgacaccaugaacucccggacccugcccagcgaggugaaccucugcaacaucgacaucuucaaccccaaguacgacugcaagaucaugacguccaagaccgacgucagcuccagcgugaucaccucccugggcgccaucgugagcugcuacgggaagaccaagugcacggcgagcaacaagaaccgcggcaucaucaagaccuucuccaacgggugcgacuacgucagcaacaagggcguggacaccguguccgucggcaacacccuguacuacgugaacaagcaggagggcaagagccucuacgugaagggggagcccaucaucaacuucuacgacccgcuggucuuccccuccgacgaguucgacgccagcaucucccaggugaacgagaagaucaaccagagccuggccuucauccggaaguccgacgagcuccugcacaacgugaacgucggcaagagcaccacgaacaucaugaucaccaccaucaucaucgugaucaucgugauccugcugcuccugaucgccgucgggcuguuccucuacugcaaggcccgcuccacccccgugacgcugagcaaggaccagcuguccgggaucaacaacaucgcguucagcaacugaggacuaguguccaccugucccuccugggcugcuggauugucucguuuuccugccaaauaaacaggaucagcgcuuuacagaucuaaaaaaaaaaaaaaaaaaaaaaaaaaaaaaaaaaaaaaaaaaaaaaaaaaaaaaaaaaaaaaaaugcaucccccccccccccccccccccccccccccccaaaggcucuuuucagagccaccagaauu

SEQ ID NO: 13404 - RNA, 1910 nt, Artificial Sequence
  mRNA product Design e-5 comprising derived and/or modified sequence from HRSV(Memphis-37)__AIY60640.1__F_DSCav1_mut0 (opt1)
gggagagcggcucggccauuuugucccagucaguccggaggcugcggcugcagaaguaccgccugcggaguaacugcaaagaagcuuaccauggagcugcccauccucaagaccaacgccaucaccacgauccuggccgcggugacccugugcuucgccagcucccagaacaucaccgaggaguucuaccagagcacgugcuccgccgucagcaagggcuaccucuccgcccugcgcaccgggugguacaccagcgugaucaccaucgagcuguccaacaucaaggagaacaagugcaacggcaccgacgccaaggugaagcucaucaagcaggagcuggacaaguacaagaacgcggucacggagcugcagcuccugaugcagagcaccccggccgccggguccggcagcgccaucgcguccgggaucgccgugugcaaggugcugcaccucgagggcgaggucaacaagaucaagaacgcccugcugagcaccaacaaggccguggugucccucagcaacggcgucuccgugcugaccuucaaggugcuggaccucaagaacuacaucgacaagcagcugcugcccauccucaacaagcagagcugcuccaucagcaacaucgagacggucaucgaguuccagcagaagaacaaccggcugcuggagaucacccgcgaguucuccgugaacgccggggugaccacccccgucagcacguacaugcucaccaacagcgagcugcugucccucaucaacgacaugcccaucaccaacgaccagaagaagcugaugagcaacaacgugcagaucgugcggcagcaguccuacagcaucaugugcaucaucaaggaggagguccuggcguacguggugcagcucccgcuguacggcgucaucgacacccccugcuggaagcugcacacgagcccccucugcaccaccaacaccaaggagggguccaacaucugccugacgcgcaccgaccggggcugguacugcgacaacgccggguccgugagcuucuucccccaggccgagaccugcaaggugcaguccaaccgcgucuucugcgacaccaugaacagccggacgcucccguccgaggugaaccugugcaacaucgacaucuucaaccccaaguacgacugcaagaucaugaccagcaagaccgacgucuccagcuccgugaucaccagccugggcgccaucguguccugcuacggcaagacgaagugcaccgccagcaacaagaaccgggggaucaucaagaccuucuccaacggcugcgacuacgucagcaacaaggggguggacaccgugagcgucggcaacacgcucuacuacgugaacaagcaggagggcaagucccuguacgugaagggggagcccaucaucaacuucuacgacccccuggucuucccgagcgacgaguucgacgcguccaucagccaggugaacgagaagaucaaccagucccucgccuucauccgcaagagcgacgagcugcugcacaacgugaacgucggcaaguccaccaccaacaucaugaucaccaccaucaucaucgugaucaucgugauccuccugcugcucaucgccgucgggcuguuccuguacugcaaggcccggagcacgcccgugacccuguccaaggaccagcucagcggcaucaacaacaucgccuucuccaacugaggacuaguguccaccugucccuccugggcugcuggauugucucguuuuccugccaaauaaacaggaucagcgcuuuacagaucuaaaaaaaaaaaaaaaaaaaaaaaaaaaaaaaaaaaaaaaaaaaaaaaaaaaaaaaaaaaaaaaaugcaucccccccccccccccccccccccccccccccaaaggcucuuuucagagccaccagaauu

SEQ ID NO: 13405 - RNA, 1910 nt, Artificial Sequence
  mRNA product Design e-5 comprising derived and/or modified sequence from HRSV(Memphis-37)__AIY60640.1__F_DSCav1_mut0 (opt2)
gggagagcggcucggccauuuugucccagucaguccggaggcugcggcugcagaaguaccgccugcggaguaacugcaaagaagcuuaccauggagcuccccauccucaagaccaacgccaucaccaccauccucgccgccgucacccucugcuucgccuccucccagaacaucaccgaggaguucuaccaguccaccugcuccgccgucuccaagggcuaccucuccgcccuccgcaccggcugguacaccuccgucaucaccaucgagcucuccaacaucaaggagaacaagugcaacggcaccgacgccaaggucaagcucaucaagcaggagcucgacaaguacaagaacgccgucaccgagcuccagcuccucaugcaguccacccccgccgccggcuccggcuccgccaucgccuccggcaucgccgucugcaagguccuccaccucgagggcgaggucaacaagaucaagaacgcccuccucuccaccaacaaggccgucgucucccucuccaacggcgucuccguccucaccuucaagguccucgaccucaagaacuacaucgacaagcagcuccuccccauccucaacaagcaguccugcuccaucuccaacaucgagaccgucaucgaguuccagcagaagaacaaccgccuccucgagaucacccgcgaguucuccgucaacgccggcgucaccacccccgucuccaccuacaugcucaccaacuccgagcuccucucccucaucaacgacaugcccaucaccaacgaccagaagaagcucauguccaacaacguccagaucguccgccagcaguccuacuccaucaugugcaucaucaaggaggagguccucgccuacgucguccagcucccccucuacggcgucaucgacacccccugcuggaagcuccacaccuccccccucugcaccaccaacaccaaggagggcuccaacaucugccucacccgcaccgaccgcggcugguacugcgacaacgccggcuccgucuccuucuucccccaggccgagaccugcaagguccaguccaaccgcgucuucugcgacaccaugaacucccgcacccuccccuccgaggucaaccucugcaacaucgacaucuucaaccccaaguacgacugcaagaucaugaccuccaagaccgacgucuccuccuccgucaucaccucccucggcgccaucgucuccugcuacggcaagaccaagugcaccgccuccaacaagaaccgcggcaucaucaagaccuucuccaacggcugcgacuacgucuccaacaagggcgucgacaccgucuccgucggcaacacccucuacuacgucaacaagcaggagggcaagucccucuacgucaagggcgagcccaucaucaacuucuacgacccccucgucuuccccuccgacgaguucgacgccuccaucucccaggucaacgagaagaucaaccagucccucgccuucauccgcaaguccgacgagcuccuccacaacgucaacgucggcaaguccaccaccaacaucaugaucaccaccaucaucaucgucaucaucgucauccuccuccuccucaucgccgucggccucuuccucuacugcaaggcccgcuccacccccgucacccucuccaaggaccagcucuccggcaucaacaacaucgccuucuccaacugaggacuaguguccaccugucccuccugggcugcuggauugucucguuuuccugccaaauaaacaggaucagcgcuuuacagaucuaaaaaaaaaaaaaaaaaaaaaaaaaaaaaaaaaaaaaaaaaaaaaaaaaaaaaaaaaaaaaaaaugcaucccccccccccccccccccccccccccccccaaaggcucuuuucagagccaccagaauu

SEQ ID NO: 13406 - RNA, 1910 nt, Artificial Sequence
  mRNA product Design e-5 comprising derived and/or modified sequence from HRSV(Memphis-37)__AIY60640.1__F_DSCav1_mut0 (opt3)
gggagagcggcucggccauuuugucccagucaguccggaggcugcggcugcagaaguaccgccugcggaguaacugcaaagaagcuuaccauggagcugcccauccucaagaccaacgccauuacaacuauacuugcugcagugacgcugugcuucgccagcucccagaauaucaccgaagaguuuuaccaaucuacauguucagcggucaguaaaggcuauuugagcgcuuuaagaacugggugguacaccuccguuauuacaaucgaacugucuaacauuaaggagaauaaaugcaacggaaccgacgccaaggugaaacuaaucaagcaggaacucgauaaguauaaaaaugcaguaacugagcugcagcuucugaugcagucgaccccugccgcugguucaggcagcgcaauagccagugggaucgcuguguguaaggucuugcaccucgagggagaagugaacaaaauuaagaaugcccugcuguccacaaacaaagcgguugugucucucagcaauggcgucuccguguuaacguucaagguacuggaccuuaagaacuacaucgauaaacaauugcugccaauucuaaauaagcagucaugcaguaucagcaacauagagacuguuauugaauuucagcagaaaaauaacaggcuccuggagaucacccgggaguucucugugaaugccggugucacaacuccgguguccaccuauaugcuuacaaacucagaacuguugagccucauuaacgacaugcccaucaccaaugaucaaaagaaacugaugaguaacaaugugcagaucguccgccagcagucuuacuccauuauguguauaaucaaggaggaaguuuuagcauaugugguacaacugccucucuacggggugauugacacgccaugcuggaaacuucauacuagcccccuguguacaaccaacacuaaggagggaucgaauaucugcuugacacgaaccgaucguggcugguacugugacaacgcuggcucugucuccuuuuucccucaggccgaaacgugcaaggugcagucaaauagaguguuuugugauaccaugaacaguagaacacugccaagcgaggugaaucucugcaacauagacauuuucaaucccaaauaugauugcaagaucaugacuuccaaaaccgacgucucuagcucagugaucacaagucugggggcaauuguauccuguuacggaaagacuaaaugcaccgcuagcaacaagaauagggguaucauuaagacauuuucuaacggcugugauuauguuucaaauaaagggguggacaccgucagugugggaaacacucuuuacuaugucaacaagcaagagggcaaaagccuguacgugaagggugaaccuauaaucaauuucuaugacccauugguuuuuccguccgaugaguucgacgccucuauuucgcagguuaacgagaaaaucaaucagagccucgcguuuauccggaaguccgaugaacuguuacacaacguaaaugucgggaagucaacgacaaacauuaugauaaccacuaucauuaucgugauuaucguuauacugcuacuccugaucgccgugggacuuuucuuguacugcaaagcacgcaguacccccgucacacugucuaaggaccagcucagcggcauuaauaacaucgcuuucuccaauugaggacuaguguccaccugucccuccugggcugcuggauugucucguuuuccugccaaauaaacaggaucagcgcuuuacagaucuaaaaaaaaaaaaaaaaaaaaaaaaaaaaaaaaaaaaaaaaaaaaaaaaaaaaaaaaaaaaaaaaugcaucccccccccccccccccccccccccccccccaaaggcucuuuucagagccaccagaauu

SEQ ID NO: 13407 - RNA, 1910 nt, Artificial Sequence
  mRNA product Design e-5 comprising derived and/or modified sequence from HRSV(Memphis-37)__AIY60640.1__F_DSCav1_mut0 (opt4)
gggagagcggcucggccauuuugucccagucaguccggaggcugcggcugcagaaguaccgccugcggaguaacugcaaagaagcuuaccauggagcugcccauccugaagaccaacgccaucaccaccauccuggccgccgugacccugugcuucgccagcagccagaacaucaccgaggaguucuaccagagcaccugcagcgccgugagcaagggcuaccugagcgcccugagaaccggcugguacaccagcgugaucaccaucgagcugagcaacaucaaggagaacaagugcaacggcaccgacgccaaggugaagcugaucaagcaggagcuggacaaguacaagaacgccgugaccgagcugcagcugcugaugcagagcacccccgccgccggcagcggcagcgccaucgccagcggcaucgccgugugcaaggugcugcaccuggagggcgaggugaacaagaucaagaacgcccugcugagcaccaacaaggccguggugagccugagcaacggcgugagcgugcugaccuucaaggugcuggaccugaagaacuacaucgacaagcagcugcugcccauccugaacaagcagagcugcagcaucagcaacaucgagaccgugaucgaguuccagcagaagaacaacagacugcuggagaucaccagagaguucagcgugaacgccggcgugaccacccccgugagcaccuacaugcugaccaacagcgagcugcugagccugaucaacgacaugcccaucaccaacgaccagaagaagcugaugagcaacaacgugcagaucgugagacagcagagcuacagcaucaugugcaucaucaaggaggaggugcuggccuacguggugcagcugccccuguacggcgugaucgacacccccugcuggaagcugcacaccagcccccugugcaccaccaacaccaaggagggcagcaacaucugccugaccagaaccgacagaggcugguacugcgacaacgccggcagcgugagcuucuucccccaggccgagaccugcaaggugcagagcaacagaguguucugcgacaccaugaacagcagaacccugcccagcgaggugaaccugugcaacaucgacaucuucaaccccaaguacgacugcaagaucaugaccagcaagaccgacgugagcagcagcgugaucaccagccugggcgccaucgugagcugcuacggcaagaccaagugcaccgccagcaacaagaacagaggcaucaucaagaccuucagcaacggcugcgacuacgugagcaacaagggcguggacaccgugagcgugggcaacacccuguacuacgugaacaagcaggagggcaagagccuguacgugaagggcgagcccaucaucaacuucuacgacccccugguguuccccagcgacgaguucgacgccagcaucagccaggugaacgagaagaucaaccagagccuggccuucaucagaaagagcgacgagcugcugcacaacgugaacgugggcaagagcaccaccaacaucaugaucaccaccaucaucaucgugaucaucgugauccugcugcugcugaucgccgugggccuguuccuguacugcaaggccagaagcacccccgugacccugagcaaggaccagcugagcggcaucaacaacaucgccuucagcaacugaggacuaguguccaccugucccuccugggcugcuggauugucucguuuuccugccaaauaaacaggaucagcgcuuuacagaucuaaaaaaaaaaaaaaaaaaaaaaaaaaaaaaaaaaaaaaaaaaaaaaaaaaaaaaaaaaaaaaaaugcaucccccccccccccccccccccccccccccccaaaggcucuuuucagagccaccagaauu

SEQ ID NO: 13408 - RNA, 1910 nt, Artificial Sequence
  mRNA product Design e-5 comprising derived and/or modified sequence from HRSV(Memphis-37)__AIY60640.1__F_DSCav1_mut0 (opt5)
gggagagcggcucggccauuuugucccagucaguccggaggcugcggcugcagaaguaccgccugcggaguaacugcaaagaagcuuaccauggagcugcccauccucaagaccaacgccauuacaacgauccuggcugccgugacccuuugcuucgcgagcucccagaauauuacagaagaguuuuaccaaucuaccuguagcgcugucuccaaaggcuaucugucugcccucagaacagggugguacaccagcguuaucacaauugaacuguccaacaucaaggagaauaaaugcaacggaaccgacgccaaggugaaacuuaucaagcaggaacuggauaaguauaaaaaugcugugacggagcuccagcugcugaugcagucuaccccugccgcuggcagcggguccgccauugcgagcggaaucgccgucuguaaggugcuccaccuggagggcgaaguuaacaaaauuaagaaugcccuucugucuacaaacaaagcuguggucucccucagcaauggggugucuguucugaccuucaaggugcuugaccugaagaacuacaucgauaaacaacuccugccgauucugaauaagcaguccugcagcaucucuaacauugagacagucaucgaauuucagcagaaaaauaaccggcuccuggagaucacccgcgaguucuccgugaaugcuggagugacgacacccgucagcaccuauaugcuuacaaacuccgaacugcucucucugauuaacgacaugccuaucaccaaugaucaaaagaaacuuaugagcaacaauguucagauugugagacagcaguccuacagcaucauguguauuaucaaggaggaagugcuggccuaugucgugcaacucccccuguacggcguuaucgacaccccuugcuggaaacugcauacaucuccccucuguacgaccaacacaaaggagggcuccaauauuugccugacccggacagaucgcgggugguacugugacaacgcgggaagcgugagcuuuuucccucaggccgaaaccugcaagguccagucuaauagaguguuuugugauacgaugaacuccagaacacugccgucugagguuaaucucugcaacaucgacauuuucaaucccaaauaugauugcaagaucaugaccagcaaaaccgacguguccagcucugucauuacaucccugggcgcuaucgugagcuguuacgggaagaccaaaugcacagccucuaacaagaaucggggaaucauuaagacguuuuccaacggcugugauuaugucagcaauaaagggguggacaccguuuccgugggaaacacacuuuacuaugucaacaagcaagagggcaaaucucuguacgugaagggcgaaccuaucauuaauuucuaugacccccucguuuuuccuagcgaugaguucgacgcuuccaucucucaggugaacgaaaagauuaaucagagccuggccuuuauccgcaaguccgaugagcugcuccacaacgucaauguggggaaaagcaccacaaacauuaugaucaccacgaucauuaucgugauuaucguuauucugcuucugcucaucgccgucggacuguuccuguacugcaaagcuagaucuacccccgugacacuuuccaaggaccagcucagcggcaucaauaacauugcguucucuaauugaggacuaguguccaccugucccuccugggcugcuggauugucucguuuuccugccaaauaaacaggaucagcgcuuuacagaucuaaaaaaaaaaaaaaaaaaaaaaaaaaaaaaaaaaaaaaaaaaaaaaaaaaaaaaaaaaaaaaaaugcaucccccccccccccccccccccccccccccccaaaggcucuuuucagagccaccagaauu

SEQ ID NO: 13409 - RNA, 1910 nt, Artificial Sequence
  mRNA product Design e-5 comprising derived and/or modified sequence from HRSV(Memphis-37)__AIY60640.1__F_DSCav1_mut0 (opt6)
gggagagcggcucggccauuuugucccagucaguccggaggcugcggcugcagaaguaccgccugcggaguaacugcaaagaagcuuaccauggaauuaccaaucuuaaaaacaaacgccauaacaaccauccucgcagcaguaacccuaugcuuugcauccucacaaaacauaacugaagaauuuuaccaaucaacaugcucagcaguaucaaaaggauaucuaucagcccucagaacaggaugguacacaucagucauuacaaucgaacuuucaaacauaaaagaaaauaaauguaacggcacagaugccaaaguaaaauuaauuaaacaagaacuugacaaauacaaaaaugccguaacagaacuacaacuacuaaugcaaaguacuccugcugcaggaagcggaucugcaauagcaucagguauagcaguauguaaaguucuacaccuagaaggcgaaguaaacaaaauuaaaaacgcacuacucucaacaaauaaagcaguugucucccuaucaaacggaguaucaguauuaacuuucaaaguacuagaccucaaaaacuauauagacaaacaacuauuaccaauacuaaacaaacaaagcugcucuaucuccaacaucgaaacaguaauagaauuucaacaaaaaaauaauagacuacuugaaauaaccagagaauuuucaguaaacgccggaguaacaacaccaguaucaacuuacaugcuaacaaacuccgaacuacuaucauuaauaaacgacaugcccauaacaaacgaccaaaaaaaauuaaugucaaacaacguccaaaucguacgacaacaauccuauuccauaauguguauaauaaaagaagaaguacuagcauacguaguacaauuaccauuauauggaguaauagauaccccuugcuggaaacuacacacaucaccccuaugcacuacaaauacgaaagaagguucaaauauaugcuuaacuagaaccgauagagguugguauugugacaacgcuggaucaguaucauuuuucccacaagcagaaacaugcaaaguacaaucaaacagaguauuuugcgacacuaugaacucaagaacuuuaccauccgaaguuaaucuauguaacauagauauauuuaacccaaaauacgacugcaaaauaaugacaucaaaaacagauguaucaucaucaguuauaaccucccucggagcaauaguaucaugcuauggaaaaacaaaaugcacagcaucaaacaaaaaucguggaauuauaaaaacauucucaaacggcugugacuacgucagcaauaaaggaguagacacagucucaguaggaaacacuuuauacuauguuaacaaacaagaaggaaaaucacucuacgucaaaggcgaaccaauaauaaauuucuaugacccacucguauucccauccgacgaauuugacgcaucaauaucacaaguaaaugaaaaaauaaaccaaagccuagcauuuauacgaaaaucagacgaacuacuacacaacguaaacguagguaaaagcacaaccaauauaaugauaacaacaauaaucauaguaauaaucguaauauuacuauuacuaauagcuguaggauuguuccuauacugcaaagcaagaucaacaccaguaaccuuaucuaaggaccaacuaucaggaaucaauaacauugccuucucaaacuaaggacuaguguccaccugucccuccugggcugcuggauugucucguuuuccugccaaauaaacaggaucagcgcuuuacagaucuaaaaaaaaaaaaaaaaaaaaaaaaaaaaaaaaaaaaaaaaaaaaaaaaaaaaaaaaaaaaaaaaugcaucccccccccccccccccccccccccccccccaaaggcucuuuucagagccaccagaauu

SEQ ID NO: 13410 - RNA, 1910 nt, Artificial Sequence
  mRNA product Design e-5 comprising derived and/or modified sequence from HRSV(Memphis-37)__AIY60640.1__F_DSCav1_mut0 (opt11)
gggagagcggcucggccauuuugucccagucaguccggaggcugcggcugcagaaguaccgccugcggaguaacugcaaagaagcuuaccauggaacuaccuauccuuaaaaccaacgcaaucaccaccauccuugccgcagucacacucugcuucgcauccucacagaacaucaccgaagaguucuaucaaucaaccugcuccgccguauccaaaggauaccucucagcccuccgcaccggcugguauaccucagucauaacaaucgaauuaucaaauaucaaggagaacaaaugcaacggcaccgacgccaaagucaaacucauaaaacaagaacuagacaaauacaaaaacgccgugacagaacuccaacuccucaugcaguccacccccgcagccggauccggcucagcaaucgccucgggcauugcaguaugcaaaguccuccaccucgaaggcgaagucaacaaaaucaaaaacgcccuccucuccaccaacaaagccgucgucucccucuccaacggcguaucuguccucacuuucaagguccucgaccucaaaaacuacaucgacaagcaacuacuuccaauccucaacaagcaauccugcucaaucucaaacaucgaaaccguaauagaguuccaacaaaagaacaaccgccuccucgaaaucacccgcgaguucuccguuaacgccggugucacuaccccagucagcaccuacaugcucaccaacuccgaacuccuuucucugaucaacgacaugccaaucaccaacgaucaaaagaaauuaauguccaacaacguccagaucguccgccaacaaagcuacagcaucaugugcaucauaaaagaagaaguacuugcguacguaguucaacuaccccuuuacggcguaaucgacaccccaugcuggaaacuccacaccuccccacuaugcaccaccaacaccaaagaaggauccaacaucugccuaacccgcaccgaccgcggcugguacugcgacaacgcugggagcgucucauucuucccacaagcagaaaccugcaaaguccaaucgaaccgcguauucugcgacaccaugaacuccagaacccuaccaagcgaagucaaucuuugcaacaucgacauauuuaaccccaaauacgacugcaaaaucaugacaucaaagaccgacgucucaucuucagucauuaccucacucggcgcaauugucagcugcuacggaaagaccaaauguaccgccuccaauaaaaaccguggaaucauaaaaaccuuuagcaacggcugcgacuacgucuccaacaaaggagucgacaccgucuccgucggcaacacccucuacuacgucaacaaacaagaaggaaaaucccucuacgugaaaggcgaacccauaauaaacuucuacgacccccuagucuuccccucugacgaguucgacgccuccaucucccaagucaacgaaaagauaaaucaaucacuagccuucauacgcaaaucugacgaacuucuccacaacgucaacgucggcaaauccaccaccaacauaaugaucacaacgauaauaaucgugaucauaguaauccuacuucuccucaucgcaguaggucuauuccuauacugcaaagcccgcagcacccccgucacccuaucaaaagaccaacucuccggcaucaacaacaucgccuucucaaacuaaggacuaguguccaccugucccuccugggcugcuggauugucucguuuuccugccaaauaaacaggaucagcgcuuuacagaucuaaaaaaaaaaaaaaaaaaaaaaaaaaaaaaaaaaaaaaaaaaaaaaaaaaaaaaaaaaaaaaaaugcaucccccccccccccccccccccccccccccccaaaggcucuuuucagagccaccagaauu

SEQ ID NO: 13411 - RNA, 1977 nt, Artificial Sequence
  mRNA product Design e-6 comprising derived and/or modified sequence from HRSV(Memphis-37)__AIY60640.1__F_DSCav1_mut0 (opt1)
gggagagcggcucggccauuuugucccagucaguccggaggcugcggcugcagaaguaccgccugcggaguaacugcaaagaagcuuaccauggagcugcccauccucaagaccaacgccaucaccacgauccuggccgcggugacccugugcuucgccagcucccagaacaucaccgaggaguucuaccagagcacgugcuccgccgucagcaagggcuaccucuccgcccugcgcaccgggugguacaccagcgugaucaccaucgagcuguccaacaucaaggagaacaagugcaacggcaccgacgccaaggugaagcucaucaagcaggagcuggacaaguacaagaacgcggucacggagcugcagcuccugaugcagagcaccccggccgccggcuccgggagcgcgaucgccuccggcaucgccgucugcaaggugcugcaccucgagggcgaggugaacaagaucaagaacgcccugcuguccaccaacaaggccgucgugagccucuccaacggggugagcguccugaccuucaaggugcuggaccucaagaacuacaucgacaagcagcugcugcccauccugaacaagcagagcugcuccaucagcaacaucgagaccgucaucgaguuccagcagaagaacaaccgccuccuggagaucacgcgggaguucagcgugaacgcgggcgugaccacccccgucuccaccuacaugcugacgaacagcgagcuccugucccugaucaacgacaugccgaucaccaacgaccagaagaagcucaugagcaacaacgugcagaucgugcgccagcaguccuacagcaucaugugcaucaucaaggaggagguccuggccuacguggugcagcugccccucuacggggucaucgacacccccugcuggaagcugcacaccagcccccugugcacgaccaacaccaaggagggcuccaacaucugccucacccggacggaccgcgggugguacugcgacaacgccggcagcguguccuucuucccgcaggccgagaccugcaagguccagagcaaccggguguucugcgacaccaugaacucccggacccugcccagcgaggugaaccucugcaacaucgacaucuucaaccccaaguacgacugcaagaucaugacguccaagaccgacgucagcuccagcgugaucaccucccugggcgccaucgugagcugcuacgggaagaccaagugcacggcgagcaacaagaaccgcggcaucaucaagaccuucuccaacgggugcgacuacgucagcaacaagggcguggacaccguguccgucggcaacacccuguacuacgugaacaagcaggagggcaagagccucuacgugaagggggagcccaucaucaacuucuacgacccgcuggucuuccccuccgacgaguucgacgccagcaucucccaggugaacgagaagaucaaccagagccuggccuucauccggaaguccgacgagcuccugcacaacgugaacgucggcaagagcaccacgaacaucaugaucaccaccaucaucaucgugaucaucgugauccugcugcuccugaucgccgucgggcuguuccucuacugcaaggcccgcuccacccccgugacgcugagcaaggaccagcuguccgggaucaacaacaucgcguucagcaacugaggacuaguacuggcugcaucucccuuuccucuguccuccauccuucucccaggauggugaagggggaccugguacccagugauccccaccccaggauccuaaaucaugacuuaccugcuaauaaaaacucauuggaaaagugagaagaucuaaaaaaaaaaaaaaaaaaaaaaaaaaaaaaaaaaaaaaaaaaaaaaaaaaaaaaaaaaaaaaaaugcaucccccccccccccccccccccccccccccccaaaggcucuuuucagagccaccagaauu

SEQ ID NO: 13412 - RNA, 1977 nt, Artificial Sequence
  mRNA product Design e-6 comprising derived and/or modified sequence from HRSV(Memphis-37)__AIY60640.1__F_DSCav1_mut0 (opt1)
gggagagcggcucggccauuuugucccagucaguccggaggcugcggcugcagaaguaccgccugcggaguaacugcaaagaagcuuaccauggagcugcccauccucaagaccaacgccaucaccacgauccuggccgcggugacccugugcuucgccagcucccagaacaucaccgaggaguucuaccagagcacgugcuccgccgucagcaagggcuaccucuccgcccugcgcaccgggugguacaccagcgugaucaccaucgagcuguccaacaucaaggagaacaagugcaacggcaccgacgccaaggugaagcucaucaagcaggagcuggacaaguacaagaacgcggucacggagcugcagcuccugaugcagagcaccccggccgccggguccggcagcgccaucgcguccgggaucgccgugugcaaggugcugcaccucgagggcgaggucaacaagaucaagaacgcccugcugagcaccaacaaggccguggugucccucagcaacggcgucuccgugcugaccuucaaggugcuggaccucaagaacuacaucgacaagcagcugcugcccauccucaacaagcagagcugcuccaucagcaacaucgagacggucaucgaguuccagcagaagaacaaccggcugcuggagaucacccgcgaguucuccgugaacgccggggugaccacccccgucagcacguacaugcucaccaacagcgagcugcugucccucaucaacgacaugcccaucaccaacgaccagaagaagcugaugagcaacaacgugcagaucgugcggcagcaguccuacagcaucaugugcaucaucaaggaggagguccuggcguacguggugcagcucccgcuguacggcgucaucgacacccccugcuggaagcugcacacgagcccccucugcaccaccaacaccaaggagggguccaacaucugccugacgcgcaccgaccggggcugguacugcgacaacgccggguccgugagcuucuucccccaggccgagaccugcaaggugcaguccaaccgcgucuucugcgacaccaugaacagccggacgcucccguccgaggugaaccugugcaacaucgacaucuucaaccccaaguacgacugcaagaucaugaccagcaagaccgacgucuccagcuccgugaucaccagccugggcgccaucguguccugcuacggcaagacgaagugcaccgccagcaacaagaaccgggggaucaucaagaccuucuccaacggcugcgacuacgucagcaacaaggggguggacaccgugagcgucggcaacacgcucuacuacgugaacaagcaggagggcaagucccuguacgugaagggggagcccaucaucaacuucuacgacccccuggucuucccgagcgacgaguucgacgcguccaucagccaggugaacgagaagaucaaccagucccucgccuucauccgcaagagcgacgagcugcugcacaacgugaacgucggcaaguccaccaccaacaucaugaucaccaccaucaucaucgugaucaucgugauccuccugcugcucaucgccgucgggcuguuccuguacugcaaggcccggagcacgcccgugacccuguccaaggaccagcucagcggcaucaacaacaucgccuucuccaacugaggacuaguacuggcugcaucucccuuuccucuguccuccauccuucucccaggauggugaagggggaccugguacccagugauccccaccccaggauccuaaaucaugacuuaccugcuaauaaaaacucauuggaaaagugagaagaucuaaaaaaaaaaaaaaaaaaaaaaaaaaaaaaaaaaaaaaaaaaaaaaaaaaaaaaaaaaaaaaaaugcaucccccccccccccccccccccccccccccccaaaggcucuuuucagagccaccagaauu

SEQ ID NO: 13413 - RNA, 1977 nt, Artificial Sequence
  mRNA product Design e-6 comprising derived and/or modified sequence from HRSV(Memphis-37)__AIY60640.1__F_DSCav1_mut0 (opt2)
gggagagcggcucggccauuuugucccagucaguccggaggcugcggcugcagaaguaccgccugcggaguaacugcaaagaagcuuaccauggagcuccccauccucaagaccaacgccaucaccaccauccucgccgccgucacccucugcuucgccuccucccagaacaucaccgaggaguucuaccaguccaccugcuccgccgucuccaagggcuaccucuccgcccuccgcaccggcugguacaccuccgucaucaccaucgagcucuccaacaucaaggagaacaagugcaacggcaccgacgccaaggucaagcucaucaagcaggagcucgacaaguacaagaacgccgucaccgagcuccagcuccucaugcaguccacccccgccgccggcuccggcuccgccaucgccuccggcaucgccgucugcaagguccuccaccucgagggcgaggucaacaagaucaagaacgcccuccucuccaccaacaaggccgucgucucccucuccaacggcgucuccguccucaccuucaagguccucgaccucaagaacuacaucgacaagcagcuccuccccauccucaacaagcaguccugcuccaucuccaacaucgagaccgucaucgaguuccagcagaagaacaaccgccuccucgagaucacccgcgaguucuccgucaacgccggcgucaccacccccgucuccaccuacaugcucaccaacuccgagcuccucucccucaucaacgacaugcccaucaccaacgaccagaagaagcucauguccaacaacguccagaucguccgccagcaguccuacuccaucaugugcaucaucaaggaggagguccucgccuacgucguccagcucccccucuacggcgucaucgacacccccugcuggaagcuccacaccuccccccucugcaccaccaacaccaaggagggcuccaacaucugccucacccgcaccgaccgcggcugguacugcgacaacgccggcuccgucuccuucuucccccaggccgagaccugcaagguccaguccaaccgcgucuucugcgacaccaugaacucccgcacccuccccuccgaggucaaccucugcaacaucgacaucuucaaccccaaguacgacugcaagaucaugaccuccaagaccgacgucuccuccuccgucaucaccucccucggcgccaucgucuccugcuacggcaagaccaagugcaccgccuccaacaagaaccgcggcaucaucaagaccuucuccaacggcugcgacuacgucuccaacaagggcgucgacaccgucuccgucggcaacacccucuacuacgucaacaagcaggagggcaagucccucuacgucaagggcgagcccaucaucaacuucuacgacccccucgucuuccccuccgacgaguucgacgccuccaucucccaggucaacgagaagaucaaccagucccucgccuucauccgcaaguccgacgagcuccuccacaacgucaacgucggcaaguccaccaccaacaucaugaucaccaccaucaucaucgucaucaucgucauccuccuccuccucaucgccgucggccucuuccucuacugcaaggcccgcuccacccccgucacccucuccaaggaccagcucuccggcaucaacaacaucgccuucuccaacugaggacuaguacuggcugcaucucccuuuccucuguccuccauccuucucccaggauggugaagggggaccugguacccagugauccccaccccaggauccuaaaucaugacuuaccugcuaauaaaaacucauuggaaaagugagaagaucuaaaaaaaaaaaaaaaaaaaaaaaaaaaaaaaaaaaaaaaaaaaaaaaaaaaaaaaaaaaaaaaaugcaucccccccccccccccccccccccccccccccaaaggcucuuuucagagccaccagaauu

SEQ ID NO: 13414 - RNA, 1977 nt, Artificial Sequence
  mRNA product Design e-6 comprising derived and/or modified sequence from HRSV(Memphis-37)__AIY60640.1__F_DSCav1_mut0 (opt3)
gggagagcggcucggccauuuugucccagucaguccggaggcugcggcugcagaaguaccgccugcggaguaacugcaaagaagcuuaccauggagcugcccauccucaagaccaacgccauuacaacuauacuugcugcagugacgcugugcuucgccagcucccagaauaucaccgaagaguuuuaccaaucuacauguucagcggucaguaaaggcuauuugagcgcuuuaagaacugggugguacaccuccguuauuacaaucgaacugucuaacauuaaggagaauaaaugcaacggaaccgacgccaaggugaaacuaaucaagcaggaacucgauaaguauaaaaaugcaguaacugagcugcagcuucugaugcagucgaccccugccgcugguucaggcagcgcaauagccagugggaucgcuguguguaaggucuugcaccucgagggagaagugaacaaaauuaagaaugcccugcuguccacaaacaaagcgguugugucucucagcaauggcgucuccguguuaacguucaagguacuggaccuuaagaacuacaucgauaaacaauugcugccaauucuaaauaagcagucaugcaguaucagcaacauagagacuguuauugaauuucagcagaaaaauaacaggcuccuggagaucacccgggaguucucugugaaugccggugucacaacuccgguguccaccuauaugcuuacaaacucagaacuguugagccucauuaacgacaugcccaucaccaaugaucaaaagaaacugaugaguaacaaugugcagaucguccgccagcagucuuacuccauuauguguauaaucaaggaggaaguuuuagcauaugugguacaacugccucucuacggggugauugacacgccaugcuggaaacuucauacuagcccccuguguacaaccaacacuaaggagggaucgaauaucugcuugacacgaaccgaucguggcugguacugugacaacgcuggcucugucuccuuuuucccucaggccgaaacgugcaaggugcagucaaauagaguguuuugugauaccaugaacaguagaacacugccaagcgaggugaaucucugcaacauagacauuuucaaucccaaauaugauugcaagaucaugacuuccaaaaccgacgucucuagcucagugaucacaagucugggggcaauuguauccuguuacggaaagacuaaaugcaccgcuagcaacaagaauagggguaucauuaagacauuuucuaacggcugugauuauguuucaaauaaagggguggacaccgucagugugggaaacacucuuuacuaugucaacaagcaagagggcaaaagccuguacgugaagggugaaccuauaaucaauuucuaugacccauugguuuuuccguccgaugaguucgacgccucuauuucgcagguuaacgagaaaaucaaucagagccucgcguuuauccggaaguccgaugaacuguuacacaacguaaaugucgggaagucaacgacaaacauuaugauaaccacuaucauuaucgugauuaucguuauacugcuacuccugaucgccgugggacuuuucuuguacugcaaagcacgcaguacccccgucacacugucuaaggaccagcucagcggcauuaauaacaucgcuuucuccaauugaggacuaguacuggcugcaucucccuuuccucuguccuccauccuucucccaggauggugaagggggaccugguacccagugauccccaccccaggauccuaaaucaugacuuaccugcuaauaaaaacucauuggaaaagugagaagaucuaaaaaaaaaaaaaaaaaaaaaaaaaaaaaaaaaaaaaaaaaaaaaaaaaaaaaaaaaaaaaaaaugcaucccccccccccccccccccccccccccccccaaaggcucuuuucagagccaccagaauu

SEQ ID NO: 13415 - RNA, 1977 nt, Artificial Sequence
  mRNA product Design e-6 comprising derived and/or modified sequence from HRSV(Memphis-37)__AIY60640.1__F_DSCav1_mut0 (opt4)
gggagagcggcucggccauuuugucccagucaguccggaggcugcggcugcagaaguaccgccugcggaguaacugcaaagaagcuuaccauggagcugcccauccugaagaccaacgccaucaccaccauccuggccgccgugacccugugcuucgccagcagccagaacaucaccgaggaguucuaccagagcaccugcagcgccgugagcaagggcuaccugagcgcccugagaaccggcugguacaccagcgugaucaccaucgagcugagcaacaucaaggagaacaagugcaacggcaccgacgccaaggugaagcugaucaagcaggagcuggacaaguacaagaacgccgugaccgagcugcagcugcugaugcagagcacccccgccgccggcagcggcagcgccaucgccagcggcaucgccgugugcaaggugcugcaccuggagggcgaggugaacaagaucaagaacgcccugcugagcaccaacaaggccguggugagccugagcaacggcgugagcgugcugaccuucaaggugcuggaccugaagaacuacaucgacaagcagcugcugcccauccugaacaagcagagcugcagcaucagcaacaucgagaccgugaucgaguuccagcagaagaacaacagacugcuggagaucaccagagaguucagcgugaacgccggcgugaccacccccgugagcaccuacaugcugaccaacagcgagcugcugagccugaucaacgacaugcccaucaccaacgaccagaagaagcugaugagcaacaacgugcagaucgugagacagcagagcuacagcaucaugugcaucaucaaggaggaggugcuggccuacguggugcagcugccccuguacggcgugaucgacacccccugcuggaagcugcacaccagcccccugugcaccaccaacaccaaggagggcagcaacaucugccugaccagaaccgacagaggcugguacugcgacaacgccggcagcgugagcuucuucccccaggccgagaccugcaaggugcagagcaacagaguguucugcgacaccaugaacagcagaacccugcccagcgaggugaaccugugcaacaucgacaucuucaaccccaaguacgacugcaagaucaugaccagcaagaccgacgugagcagcagcgugaucaccagccugggcgccaucgugagcugcuacggcaagaccaagugcaccgccagcaacaagaacagaggcaucaucaagaccuucagcaacggcugcgacuacgugagcaacaagggcguggacaccgugagcgugggcaacacccuguacuacgugaacaagcaggagggcaagagccuguacgugaagggcgagcccaucaucaacuucuacgacccccugguguuccccagcgacgaguucgacgccagcaucagccaggugaacgagaagaucaaccagagccuggccuucaucagaaagagcgacgagcugcugcacaacgugaacgugggcaagagcaccaccaacaucaugaucaccaccaucaucaucgugaucaucgugauccugcugcugcugaucgccgugggccuguuccuguacugcaaggccagaagcacccccgugacccugagcaaggaccagcugagcggcaucaacaacaucgccuucagcaacugaggacuaguacuggcugcaucucccuuuccucuguccuccauccuucucccaggauggugaagggggaccugguacccagugauccccaccccaggauccuaaaucaugacuuaccugcuaauaaaaacucauuggaaaagugagaagaucuaaaaaaaaaaaaaaaaaaaaaaaaaaaaaaaaaaaaaaaaaaaaaaaaaaaaaaaaaaaaaaaaugcaucccccccccccccccccccccccccccccccaaaggcucuuuucagagccaccagaauu

SEQ ID NO: 13416 - RNA, 1977 nt, Artificial Sequence
  mRNA product Design e-6 comprising derived and/or modified sequence from HRSV(Memphis-37)__AIY60640.1__F_DSCav1_mut0 (opt5)
gggagagcggcucggccauuuugucccagucaguccggaggcugcggcugcagaaguaccgccugcggaguaacugcaaagaagcuuaccauggagcugcccauccucaagaccaacgccauuacaacgauccuggcugccgugacccuuugcuucgcgagcucccagaauauuacagaagaguuuuaccaaucuaccuguagcgcugucuccaaaggcuaucugucugcccucagaacagggugguacaccagcguuaucacaauugaacuguccaacaucaaggagaauaaaugcaacggaaccgacgccaaggugaaacuuaucaagcaggaacuggauaaguauaaaaaugcugugacggagcuccagcugcugaugcagucuaccccugccgcuggcagcggguccgccauugcgagcggaaucgccgucuguaaggugcuccaccuggagggcgaaguuaacaaaauuaagaaugcccuucugucuacaaacaaagcuguggucucccucagcaauggggugucuguucugaccuucaaggugcuugaccugaagaacuacaucgauaaacaacuccugccgauucugaauaagcaguccugcagcaucucuaacauugagacagucaucgaauuucagcagaaaaauaaccggcuccuggagaucacccgcgaguucuccgugaaugcuggagugacgacacccgucagcaccuauaugcuuacaaacuccgaacugcucucucugauuaacgacaugccuaucaccaaugaucaaaagaaacuuaugagcaacaauguucagauugugagacagcaguccuacagcaucauguguauuaucaaggaggaagugcuggccuaugucgugcaacucccccuguacggcguuaucgacaccccuugcuggaaacugcauacaucuccccucuguacgaccaacacaaaggagggcuccaauauuugccugacccggacagaucgcgggugguacugugacaacgcgggaagcgugagcuuuuucccucaggccgaaaccugcaagguccagucuaauagaguguuuugugauacgaugaacuccagaacacugccgucugagguuaaucucugcaacaucgacauuuucaaucccaaauaugauugcaagaucaugaccagcaaaaccgacguguccagcucugucauuacaucccugggcgcuaucgugagcuguuacgggaagaccaaaugcacagccucuaacaagaaucggggaaucauuaagacguuuuccaacggcugugauuaugucagcaauaaagggguggacaccguuuccgugggaaacacacuuuacuaugucaacaagcaagagggcaaaucucuguacgugaagggcgaaccuaucauuaauuucuaugacccccucguuuuuccuagcgaugaguucgacgcuuccaucucucaggugaacgaaaagauuaaucagagccuggccuuuauccgcaaguccgaugagcugcuccacaacgucaauguggggaaaagcaccacaaacauuaugaucaccacgaucauuaucgugauuaucguuauucugcuucugcucaucgccgucggacuguuccuguacugcaaagcuagaucuacccccgugacacuuuccaaggaccagcucagcggcaucaauaacauugcguucucuaauugaggacuaguacuggcugcaucucccuuuccucuguccuccauccuucucccaggauggugaagggggaccugguacccagugauccccaccccaggauccuaaaucaugacuuaccugcuaauaaaaacucauuggaaaagugagaagaucuaaaaaaaaaaaaaaaaaaaaaaaaaaaaaaaaaaaaaaaaaaaaaaaaaaaaaaaaaaaaaaaaugcaucccccccccccccccccccccccccccccccaaaggcucuuuucagagccaccagaauu

SEQ ID NO: 13417 - RNA, 1977 nt, Artificial Sequence
  mRNA product Design e-6 comprising derived and/or modified sequence from HRSV(Memphis-37)__AIY60640.1__F_DSCav1_mut0 (opt6)
gggagagcggcucggccauuuugucccagucaguccggaggcugcggcugcagaaguaccgccugcggaguaacugcaaagaagcuuaccauggaauuaccaaucuuaaaaacaaacgccauaacaaccauccucgcagcaguaacccuaugcuuugcauccucacaaaacauaacugaagaauuuuaccaaucaacaugcucagcaguaucaaaaggauaucuaucagcccucagaacaggaugguacacaucagucauuacaaucgaacuuucaaacauaaaagaaaauaaauguaacggcacagaugccaaaguaaaauuaauuaaacaagaacuugacaaauacaaaaaugccguaacagaacuacaacuacuaaugcaaaguacuccugcugcaggaagcggaucugcaauagcaucagguauagcaguauguaaaguucuacaccuagaaggcgaaguaaacaaaauuaaaaacgcacuacucucaacaaauaaagcaguugucucccuaucaaacggaguaucaguauuaacuuucaaaguacuagaccucaaaaacuauauagacaaacaacuauuaccaauacuaaacaaacaaagcugcucuaucuccaacaucgaaacaguaauagaauuucaacaaaaaaauaauagacuacuugaaauaaccagagaauuuucaguaaacgccggaguaacaacaccaguaucaacuuacaugcuaacaaacuccgaacuacuaucauuaauaaacgacaugcccauaacaaacgaccaaaaaaaauuaaugucaaacaacguccaaaucguacgacaacaauccuauuccauaauguguauaauaaaagaagaaguacuagcauacguaguacaauuaccauuauauggaguaauagauaccccuugcuggaaacuacacacaucaccccuaugcacuacaaauacgaaagaagguucaaauauaugcuuaacuagaaccgauagagguugguauugugacaacgcuggaucaguaucauuuuucccacaagcagaaacaugcaaaguacaaucaaacagaguauuuugcgacacuaugaacucaagaacuuuaccauccgaaguuaaucuauguaacauagauauauuuaacccaaaauacgacugcaaaauaaugacaucaaaaacagauguaucaucaucaguuauaaccucccucggagcaauaguaucaugcuauggaaaaacaaaaugcacagcaucaaacaaaaaucguggaauuauaaaaacauucucaaacggcugugacuacgucagcaauaaaggaguagacacagucucaguaggaaacacuuuauacuauguuaacaaacaagaaggaaaaucacucuacgucaaaggcgaaccaauaauaaauuucuaugacccacucguauucccauccgacgaauuugacgcaucaauaucacaaguaaaugaaaaaauaaaccaaagccuagcauuuauacgaaaaucagacgaacuacuacacaacguaaacguagguaaaagcacaaccaauauaaugauaacaacaauaaucauaguaauaaucguaauauuacuauuacuaauagcuguaggauuguuccuauacugcaaagcaagaucaacaccaguaaccuuaucuaaggaccaacuaucaggaaucaauaacauugccuucucaaacuaaggacuaguacuggcugcaucucccuuuccucuguccuccauccuucucccaggauggugaagggggaccugguacccagugauccccaccccaggauccuaaaucaugacuuaccugcuaauaaaaacucauuggaaaagugagaagaucuaaaaaaaaaaaaaaaaaaaaaaaaaaaaaaaaaaaaaaaaaaaaaaaaaaaaaaaaaaaaaaaaugcaucccccccccccccccccccccccccccccccaaaggcucuuuucagagccaccagaauu

SEQ ID NO: 13418 - RNA, 1977 nt, Artificial Sequence
  mRNA product Design e-6 comprising derived and/or modified sequence from HRSV(Memphis-37)__AIY60640.1__F_DSCav1_mut0 (opt11)
gggagagcggcucggccauuuugucccagucaguccggaggcugcggcugcagaaguaccgccugcggaguaacugcaaagaagcuuaccauggaacuaccuauccuuaaaaccaacgcaaucaccaccauccuugccgcagucacacucugcuucgcauccucacagaacaucaccgaagaguucuaucaaucaaccugcuccgccguauccaaaggauaccucucagcccuccgcaccggcugguauaccucagucauaacaaucgaauuaucaaauaucaaggagaacaaaugcaacggcaccgacgccaaagucaaacucauaaaacaagaacuagacaaauacaaaaacgccgugacagaacuccaacuccucaugcaguccacccccgcagccggauccggcucagcaaucgccucgggcauugcaguaugcaaaguccuccaccucgaaggcgaagucaacaaaaucaaaaacgcccuccucuccaccaacaaagccgucgucucccucuccaacggcguaucuguccucacuuucaagguccucgaccucaaaaacuacaucgacaagcaacuacuuccaauccucaacaagcaauccugcucaaucucaaacaucgaaaccguaauagaguuccaacaaaagaacaaccgccuccucgaaaucacccgcgaguucuccguuaacgccggugucacuaccccagucagcaccuacaugcucaccaacuccgaacuccuuucucugaucaacgacaugccaaucaccaacgaucaaaagaaauuaauguccaacaacguccagaucguccgccaacaaagcuacagcaucaugugcaucauaaaagaagaaguacuugcguacguaguucaacuaccccuuuacggcguaaucgacaccccaugcuggaaacuccacaccuccccacuaugcaccaccaacaccaaagaaggauccaacaucugccuaacccgcaccgaccgcggcugguacugcgacaacgcugggagcgucucauucuucccacaagcagaaaccugcaaaguccaaucgaaccgcguauucugcgacaccaugaacuccagaacccuaccaagcgaagucaaucuuugcaacaucgacauauuuaaccccaaauacgacugcaaaaucaugacaucaaagaccgacgucucaucuucagucauuaccucacucggcgcaauugucagcugcuacggaaagaccaaauguaccgccuccaauaaaaaccguggaaucauaaaaaccuuuagcaacggcugcgacuacgucuccaacaaaggagucgacaccgucuccgucggcaacacccucuacuacgucaacaaacaagaaggaaaaucccucuacgugaaaggcgaacccauaauaaacuucuacgacccccuagucuuccccucugacgaguucgacgccuccaucucccaagucaacgaaaagauaaaucaaucacuagccuucauacgcaaaucugacgaacuucuccacaacgucaacgucggcaaauccaccaccaacauaaugaucacaacgauaauaaucgugaucauaguaauccuacuucuccucaucgcaguaggucuauuccuauacugcaaagcccgcagcacccccgucacccuaucaaaagaccaacucuccggcaucaacaacaucgccuucucaaacuaaggacuaguacuggcugcaucucccuuuccucuguccuccauccuucucccaggauggugaagggggaccugguacccagugauccccaccccaggauccuaaaucaugacuuaccugcuaauaaaaacucauuggaaaagugagaagaucuaaaaaaaaaaaaaaaaaaaaaaaaaaaaaaaaaaaaaaaaaaaaaaaaaaaaaaaaaaaaaaaaugcaucccccccccccccccccccccccccccccccaaaggcucuuuucagagccaccagaauu

SEQ ID NO: 13419 - RNA, 2193 nt, Artificial Sequence
  mRNA product Design f-1 comprising derived and/or modified sequence from HRSV(Memphis-37)__AIY60640.1__F_DSCav1_mut0 (opt1)
gggagagcggcucggccauuuugucccagucaguccggaggcugcggcugcagaaguaccgccugcggaguaacugcaaagaagcuuaccauggagcugcccauccucaagaccaacgccaucaccacgauccuggccgcggugacccugugcuucgccagcucccagaacaucaccgaggaguucuaccagagcacgugcuccgccgucagcaagggcuaccucuccgcccugcgcaccgggugguacaccagcgugaucaccaucgagcuguccaacaucaaggagaacaagugcaacggcaccgacgccaaggugaagcucaucaagcaggagcuggacaaguacaagaacgcggucacggagcugcagcuccugaugcagagcaccccggccgccggcuccgggagcgcgaucgccuccggcaucgccgucugcaaggugcugcaccucgagggcgaggugaacaagaucaagaacgcccugcuguccaccaacaaggccgucgugagccucuccaacggggugagcguccugaccuucaaggugcuggaccucaagaacuacaucgacaagcagcugcugcccauccugaacaagcagagcugcuccaucagcaacaucgagaccgucaucgaguuccagcagaagaacaaccgccuccuggagaucacgcgggaguucagcgugaacgcgggcgugaccacccccgucuccaccuacaugcugacgaacagcgagcuccugucccugaucaacgacaugccgaucaccaacgaccagaagaagcucaugagcaacaacgugcagaucgugcgccagcaguccuacagcaucaugugcaucaucaaggaggagguccuggccuacguggugcagcugccccucuacggggucaucgacacccccugcuggaagcugcacaccagcccccugugcacgaccaacaccaaggagggcuccaacaucugccucacccggacggaccgcgggugguacugcgacaacgccggcagcguguccuucuucccgcaggccgagaccugcaagguccagagcaaccggguguucugcgacaccaugaacucccggacccugcccagcgaggugaaccucugcaacaucgacaucuucaaccccaaguacgacugcaagaucaugacguccaagaccgacgucagcuccagcgugaucaccucccugggcgccaucgugagcugcuacgggaagaccaagugcacggcgagcaacaagaaccgcggcaucaucaagaccuucuccaacgggugcgacuacgucagcaacaagggcguggacaccguguccgucggcaacacccuguacuacgugaacaagcaggagggcaagagccucuacgugaagggggagcccaucaucaacuucuacgacccgcuggucuuccccuccgacgaguucgacgccagcaucucccaggugaacgagaagaucaaccagagccuggccuucauccggaaguccgacgagcuccugcacaacgugaacgucggcaagagcaccacgaacaucaugaucaccaccaucaucaucgugaucaucgugauccugcugcuccugaucgccgucgggcuguuccucuacugcaaggcccgcuccacccccgugacgcugagcaaggaccagcuguccgggaucaacaacaucgcguucagcaacugaggacuagugaagggaacacccaaauuuaauucagccuuaagcacaauuaauuaagagugaaacguaauuguacaagcaguuggucacccaccauagggcaugaucaacaccgcaaccuuuccuuuuucccccagugauucugaaaaaccccucuucccuucagcuugcuuagauguuccaaauuuaguaagcuuaaggcggccuacagaagaaaaagaaaaaaaaggccacaaaaguucccucucacuuucaguaaauaaaauaaaagcagcaacagaaauaaagaaauaaaugaaauucaaaaugaaauaaauauuguguugugcagcauuaaaaaaucaauaaaaauuaaaaaugagcaagaucuaaaaaaaaaaaaaaaaaaaaaaaaaaaaaaaaaaaaaaaaaaaaaaaaaaaaaaaaaaaaaaaaugcaucccccccccccccccccccccccccccccccaaaggcucuuuucagagccaccagaauu

SEQ ID NO: 13420 - RNA, 2193 nt, Artificial Sequence
  mRNA product Design f-1 comprising derived and/or modified sequence from HRSV(Memphis-37)__AIY60640.1__F_DSCav1_mut0 (opt1)
gggagagcggcucggccauuuugucccagucaguccggaggcugcggcugcagaaguaccgccugcggaguaacugcaaagaagcuuaccauggagcugcccauccucaagaccaacgccaucaccacgauccuggccgcggugacccugugcuucgccagcucccagaacaucaccgaggaguucuaccagagcacgugcuccgccgucagcaagggcuaccucuccgcccugcgcaccgggugguacaccagcgugaucaccaucgagcuguccaacaucaaggagaacaagugcaacggcaccgacgccaaggugaagcucaucaagcaggagcuggacaaguacaagaacgcggucacggagcugcagcuccugaugcagagcaccccggccgccggguccggcagcgccaucgcguccgggaucgccgugugcaaggugcugcaccucgagggcgaggucaacaagaucaagaacgcccugcugagcaccaacaaggccguggugucccucagcaacggcgucuccgugcugaccuucaaggugcuggaccucaagaacuacaucgacaagcagcugcugcccauccucaacaagcagagcugcuccaucagcaacaucgagacggucaucgaguuccagcagaagaacaaccggcugcuggagaucacccgcgaguucuccgugaacgccggggugaccacccccgucagcacguacaugcucaccaacagcgagcugcugucccucaucaacgacaugcccaucaccaacgaccagaagaagcugaugagcaacaacgugcagaucgugcggcagcaguccuacagcaucaugugcaucaucaaggaggagguccuggcguacguggugcagcucccgcuguacggcgucaucgacacccccugcuggaagcugcacacgagcccccucugcaccaccaacaccaaggagggguccaacaucugccugacgcgcaccgaccggggcugguacugcgacaacgccggguccgugagcuucuucccccaggccgagaccugcaaggugcaguccaaccgcgucuucugcgacaccaugaacagccggacgcucccguccgaggugaaccugugcaacaucgacaucuucaaccccaaguacgacugcaagaucaugaccagcaagaccgacgucuccagcuccgugaucaccagccugggcgccaucguguccugcuacggcaagacgaagugcaccgccagcaacaagaaccgggggaucaucaagaccuucuccaacggcugcgacuacgucagcaacaaggggguggacaccgugagcgucggcaacacgcucuacuacgugaacaagcaggagggcaagucccuguacgugaagggggagcccaucaucaacuucuacgacccccuggucuucccgagcgacgaguucgacgcguccaucagccaggugaacgagaagaucaaccagucccucgccuucauccgcaagagcgacgagcugcugcacaacgugaacgucggcaaguccaccaccaacaucaugaucaccaccaucaucaucgugaucaucgugauccuccugcugcucaucgccgucgggcuguuccuguacugcaaggcccggagcacgcccgugacccuguccaaggaccagcucagcggcaucaacaacaucgccuucuccaacugaggacuagugaagggaacacccaaauuuaauucagccuuaagcacaauuaauuaagagugaaacguaauuguacaagcaguuggucacccaccauagggcaugaucaacaccgcaaccuuuccuuuuucccccagugauucugaaaaaccccucuucccuucagcuugcuuagauguuccaaauuuaguaagcuuaaggcggccuacagaagaaaaagaaaaaaaaggccacaaaaguucccucucacuuucaguaaauaaaauaaaagcagcaacagaaauaaagaaauaaaugaaauucaaaaugaaauaaauauuguguugugcagcauuaaaaaaucaauaaaaauuaaaaaugagcaagaucuaaaaaaaaaaaaaaaaaaaaaaaaaaaaaaaaaaaaaaaaaaaaaaaaaaaaaaaaaaaaaaaaugcaucccccccccccccccccccccccccccccccaaaggcucuuuucagagccaccagaauu

SEQ ID NO: 13421 - RNA, 2193 nt, Artificial Sequence
  mRNA product Design f-1 comprising derived and/or modified sequence from HRSV(Memphis-37)__AIY60640.1__F_DSCav1_mut0 (opt2)
gggagagcggcucggccauuuugucccagucaguccggaggcugcggcugcagaaguaccgccugcggaguaacugcaaagaagcuuaccauggagcuccccauccucaagaccaacgccaucaccaccauccucgccgccgucacccucugcuucgccuccucccagaacaucaccgaggaguucuaccaguccaccugcuccgccgucuccaagggcuaccucuccgcccuccgcaccggcugguacaccuccgucaucaccaucgagcucuccaacaucaaggagaacaagugcaacggcaccgacgccaaggucaagcucaucaagcaggagcucgacaaguacaagaacgccgucaccgagcuccagcuccucaugcaguccacccccgccgccggcuccggcuccgccaucgccuccggcaucgccgucugcaagguccuccaccucgagggcgaggucaacaagaucaagaacgcccuccucuccaccaacaaggccgucgucucccucuccaacggcgucuccguccucaccuucaagguccucgaccucaagaacuacaucgacaagcagcuccuccccauccucaacaagcaguccugcuccaucuccaacaucgagaccgucaucgaguuccagcagaagaacaaccgccuccucgagaucacccgcgaguucuccgucaacgccggcgucaccacccccgucuccaccuacaugcucaccaacuccgagcuccucucccucaucaacgacaugcccaucaccaacgaccagaagaagcucauguccaacaacguccagaucguccgccagcaguccuacuccaucaugugcaucaucaaggaggagguccucgccuacgucguccagcucccccucuacggcgucaucgacacccccugcuggaagcuccacaccuccccccucugcaccaccaacaccaaggagggcuccaacaucugccucacccgcaccgaccgcggcugguacugcgacaacgccggcuccgucuccuucuucccccaggccgagaccugcaagguccaguccaaccgcgucuucugcgacaccaugaacucccgcacccuccccuccgaggucaaccucugcaacaucgacaucuucaaccccaaguacgacugcaagaucaugaccuccaagaccgacgucuccuccuccgucaucaccucccucggcgccaucgucuccugcuacggcaagaccaagugcaccgccuccaacaagaaccgcggcaucaucaagaccuucuccaacggcugcgacuacgucuccaacaagggcgucgacaccgucuccgucggcaacacccucuacuacgucaacaagcaggagggcaagucccucuacgucaagggcgagcccaucaucaacuucuacgacccccucgucuuccccuccgacgaguucgacgccuccaucucccaggucaacgagaagaucaaccagucccucgccuucauccgcaaguccgacgagcuccuccacaacgucaacgucggcaaguccaccaccaacaucaugaucaccaccaucaucaucgucaucaucgucauccuccuccuccucaucgccgucggccucuuccucuacugcaaggcccgcuccacccccgucacccucuccaaggaccagcucuccggcaucaacaacaucgccuucuccaacugaggacuagugaagggaacacccaaauuuaauucagccuuaagcacaauuaauuaagagugaaacguaauuguacaagcaguuggucacccaccauagggcaugaucaacaccgcaaccuuuccuuuuucccccagugauucugaaaaaccccucuucccuucagcuugcuuagauguuccaaauuuaguaagcuuaaggcggccuacagaagaaaaagaaaaaaaaggccacaaaaguucccucucacuuucaguaaauaaaauaaaagcagcaacagaaauaaagaaauaaaugaaauucaaaaugaaauaaauauuguguugugcagcauuaaaaaaucaauaaaaauuaaaaaugagcaagaucuaaaaaaaaaaaaaaaaaaaaaaaaaaaaaaaaaaaaaaaaaaaaaaaaaaaaaaaaaaaaaaaaugcaucccccccccccccccccccccccccccccccaaaggcucuuuucagagccaccagaauu

SEQ ID NO: 13422 - RNA, 2193 nt, Artificial Sequence
  mRNA product Design f-1 comprising derived and/or modified sequence from HRSV(Memphis-37)__AIY60640.1__F_DSCav1_mut0 (opt3)
gggagagcggcucggccauuuugucccagucaguccggaggcugcggcugcagaaguaccgccugcggaguaacugcaaagaagcuuaccauggagcugcccauccucaagaccaacgccauuacaacuauacuugcugcagugacgcugugcuucgccagcucccagaauaucaccgaagaguuuuaccaaucuacauguucagcggucaguaaaggcuauuugagcgcuuuaagaacugggugguacaccuccguuauuacaaucgaacugucuaacauuaaggagaauaaaugcaacggaaccgacgccaaggugaaacuaaucaagcaggaacucgauaaguauaaaaaugcaguaacugagcugcagcuucugaugcagucgaccccugccgcugguucaggcagcgcaauagccagugggaucgcuguguguaaggucuugcaccucgagggagaagugaacaaaauuaagaaugcccugcuguccacaaacaaagcgguugugucucucagcaauggcgucuccguguuaacguucaagguacuggaccuuaagaacuacaucgauaaacaauugcugccaauucuaaauaagcagucaugcaguaucagcaacauagagacuguuauugaauuucagcagaaaaauaacaggcuccuggagaucacccgggaguucucugugaaugccggugucacaacuccgguguccaccuauaugcuuacaaacucagaacuguugagccucauuaacgacaugcccaucaccaaugaucaaaagaaacugaugaguaacaaugugcagaucguccgccagcagucuuacuccauuauguguauaaucaaggaggaaguuuuagcauaugugguacaacugccucucuacggggugauugacacgccaugcuggaaacuucauacuagcccccuguguacaaccaacacuaaggagggaucgaauaucugcuugacacgaaccgaucguggcugguacugugacaacgcuggcucugucuccuuuuucccucaggccgaaacgugcaaggugcagucaaauagaguguuuugugauaccaugaacaguagaacacugccaagcgaggugaaucucugcaacauagacauuuucaaucccaaauaugauugcaagaucaugacuuccaaaaccgacgucucuagcucagugaucacaagucugggggcaauuguauccuguuacggaaagacuaaaugcaccgcuagcaacaagaauagggguaucauuaagacauuuucuaacggcugugauuauguuucaaauaaagggguggacaccgucagugugggaaacacucuuuacuaugucaacaagcaagagggcaaaagccuguacgugaagggugaaccuauaaucaauuucuaugacccauugguuuuuccguccgaugaguucgacgccucuauuucgcagguuaacgagaaaaucaaucagagccucgcguuuauccggaaguccgaugaacuguuacacaacguaaaugucgggaagucaacgacaaacauuaugauaaccacuaucauuaucgugauuaucguuauacugcuacuccugaucgccgugggacuuuucuuguacugcaaagcacgcaguacccccgucacacugucuaaggaccagcucagcggcauuaauaacaucgcuuucuccaauugaggacuagugaagggaacacccaaauuuaauucagccuuaagcacaauuaauuaagagugaaacguaauuguacaagcaguuggucacccaccauagggcaugaucaacaccgcaaccuuuccuuuuucccccagugauucugaaaaaccccucuucccuucagcuugcuuagauguuccaaauuuaguaagcuuaaggcggccuacagaagaaaaagaaaaaaaaggccacaaaaguucccucucacuuucaguaaauaaaauaaaagcagcaacagaaauaaagaaauaaaugaaauucaaaaugaaauaaauauuguguugugcagcauuaaaaaaucaauaaaaauuaaaaaugagcaagaucuaaaaaaaaaaaaaaaaaaaaaaaaaaaaaaaaaaaaaaaaaaaaaaaaaaaaaaaaaaaaaaaaugcaucccccccccccccccccccccccccccccccaaaggcucuuuucagagccaccagaauu

SEQ ID NO: 13423 - RNA, 2193 nt, Artificial Sequence
  mRNA product Design f-1 comprising derived and/or modified sequence from HRSV(Memphis-37)__AIY60640.1__F_DSCav1_mut0 (opt4)
gggagagcggcucggccauuuugucccagucaguccggaggcugcggcugcagaaguaccgccugcggaguaacugcaaagaagcuuaccauggagcugcccauccugaagaccaacgccaucaccaccauccuggccgccgugacccugugcuucgccagcagccagaacaucaccgaggaguucuaccagagcaccugcagcgccgugagcaagggcuaccugagcgcccugagaaccggcugguacaccagcgugaucaccaucgagcugagcaacaucaaggagaacaagugcaacggcaccgacgccaaggugaagcugaucaagcaggagcuggacaaguacaagaacgccgugaccgagcugcagcugcugaugcagagcacccccgccgccggcagcggcagcgccaucgccagcggcaucgccgugugcaaggugcugcaccuggagggcgaggugaacaagaucaagaacgcccugcugagcaccaacaaggccguggugagccugagcaacggcgugagcgugcugaccuucaaggugcuggaccugaagaacuacaucgacaagcagcugcugcccauccugaacaagcagagcugcagcaucagcaacaucgagaccgugaucgaguuccagcagaagaacaacagacugcuggagaucaccagagaguucagcgugaacgccggcgugaccacccccgugagcaccuacaugcugaccaacagcgagcugcugagccugaucaacgacaugcccaucaccaacgaccagaagaagcugaugagcaacaacgugcagaucgugagacagcagagcuacagcaucaugugcaucaucaaggaggaggugcuggccuacguggugcagcugccccuguacggcgugaucgacacccccugcuggaagcugcacaccagcccccugugcaccaccaacaccaaggagggcagcaacaucugccugaccagaaccgacagaggcugguacugcgacaacgccggcagcgugagcuucuucccccaggccgagaccugcaaggugcagagcaacagaguguucugcgacaccaugaacagcagaacccugcccagcgaggugaaccugugcaacaucgacaucuucaaccccaaguacgacugcaagaucaugaccagcaagaccgacgugagcagcagcgugaucaccagccugggcgccaucgugagcugcuacggcaagaccaagugcaccgccagcaacaagaacagaggcaucaucaagaccuucagcaacggcugcgacuacgugagcaacaagggcguggacaccgugagcgugggcaacacccuguacuacgugaacaagcaggagggcaagagccuguacgugaagggcgagcccaucaucaacuucuacgacccccugguguuccccagcgacgaguucgacgccagcaucagccaggugaacgagaagaucaaccagagccuggccuucaucagaaagagcgacgagcugcugcacaacgugaacgugggcaagagcaccaccaacaucaugaucaccaccaucaucaucgugaucaucgugauccugcugcugcugaucgccgugggccuguuccuguacugcaaggccagaagcacccccgugacccugagcaaggaccagcugagcggcaucaacaacaucgccuucagcaacugaggacuagugaagggaacacccaaauuuaauucagccuuaagcacaauuaauuaagagugaaacguaauuguacaagcaguuggucacccaccauagggcaugaucaacaccgcaaccuuuccuuuuucccccagugauucugaaaaaccccucuucccuucagcuugcuuagauguuccaaauuuaguaagcuuaaggcggccuacagaagaaaaagaaaaaaaaggccacaaaaguucccucucacuuucaguaaauaaaauaaaagcagcaacagaaauaaagaaauaaaugaaauucaaaaugaaauaaauauuguguugugcagcauuaaaaaaucaauaaaaauuaaaaaugagcaagaucuaaaaaaaaaaaaaaaaaaaaaaaaaaaaaaaaaaaaaaaaaaaaaaaaaaaaaaaaaaaaaaaaugcaucccccccccccccccccccccccccccccccaaaggcucuuuucagagccaccagaauu

SEQ ID NO: 13424 - RNA, 2193 nt, Artificial Sequence
  mRNA product Design f-1 comprising derived and/or modified sequence from HRSV(Memphis-37)__AIY60640.1__F_DSCav1_mut0 (opt5)
gggagagcggcucggccauuuugucccagucaguccggaggcugcggcugcagaaguaccgccugcggaguaacugcaaagaagcuuaccauggagcugcccauccucaagaccaacgccauuacaacgauccuggcugccgugacccuuugcuucgcgagcucccagaauauuacagaagaguuuuaccaaucuaccuguagcgcugucuccaaaggcuaucugucugcccucagaacagggugguacaccagcguuaucacaauugaacuguccaacaucaaggagaauaaaugcaacggaaccgacgccaaggugaaacuuaucaagcaggaacuggauaaguauaaaaaugcugugacggagcuccagcugcugaugcagucuaccccugccgcuggcagcggguccgccauugcgagcggaaucgccgucuguaaggugcuccaccuggagggcgaaguuaacaaaauuaagaaugcccuucugucuacaaacaaagcuguggucucccucagcaauggggugucuguucugaccuucaaggugcuugaccugaagaacuacaucgauaaacaacuccugccgauucugaauaagcaguccugcagcaucucuaacauugagacagucaucgaauuucagcagaaaaauaaccggcuccuggagaucacccgcgaguucuccgugaaugcuggagugacgacacccgucagcaccuauaugcuuacaaacuccgaacugcucucucugauuaacgacaugccuaucaccaaugaucaaaagaaacuuaugagcaacaauguucagauugugagacagcaguccuacagcaucauguguauuaucaaggaggaagugcuggccuaugucgugcaacucccccuguacggcguuaucgacaccccuugcuggaaacugcauacaucuccccucuguacgaccaacacaaaggagggcuccaauauuugccugacccggacagaucgcgggugguacugugacaacgcgggaagcgugagcuuuuucccucaggccgaaaccugcaagguccagucuaauagaguguuuugugauacgaugaacuccagaacacugccgucugagguuaaucucugcaacaucgacauuuucaaucccaaauaugauugcaagaucaugaccagcaaaaccgacguguccagcucugucauuacaucccugggcgcuaucgugagcuguuacgggaagaccaaaugcacagccucuaacaagaaucggggaaucauuaagacguuuuccaacggcugugauuaugucagcaauaaagggguggacaccguuuccgugggaaacacacuuuacuaugucaacaagcaagagggcaaaucucuguacgugaagggcgaaccuaucauuaauuucuaugacccccucguuuuuccuagcgaugaguucgacgcuuccaucucucaggugaacgaaaagauuaaucagagccuggccuuuauccgcaaguccgaugagcugcuccacaacgucaauguggggaaaagcaccacaaacauuaugaucaccacgaucauuaucgugauuaucguuauucugcuucugcucaucgccgucggacuguuccuguacugcaaagcuagaucuacccccgugacacuuuccaaggaccagcucagcggcaucaauaacauugcguucucuaauugaggacuagugaagggaacacccaaauuuaauucagccuuaagcacaauuaauuaagagugaaacguaauuguacaagcaguuggucacccaccauagggcaugaucaacaccgcaaccuuuccuuuuucccccagugauucugaaaaaccccucuucccuucagcuugcuuagauguuccaaauuuaguaagcuuaaggcggccuacagaagaaaaagaaaaaaaaggccacaaaaguucccucucacuuucaguaaauaaaauaaaagcagcaacagaaauaaagaaauaaaugaaauucaaaaugaaauaaauauuguguugugcagcauuaaaaaaucaauaaaaauuaaaaaugagcaagaucuaaaaaaaaaaaaaaaaaaaaaaaaaaaaaaaaaaaaaaaaaaaaaaaaaaaaaaaaaaaaaaaaugcaucccccccccccccccccccccccccccccccaaaggcucuuuucagagccaccagaauu

SEQ ID NO: 13425 - RNA, 2193 nt, Artificial Sequence
  mRNA product Design f-1 comprising derived and/or modified sequence from HRSV(Memphis-37)__AIY60640.1__F_DSCav1_mut0 (opt6)
gggagagcggcucggccauuuugucccagucaguccggaggcugcggcugcagaaguaccgccugcggaguaacugcaaagaagcuuaccauggaauuaccaaucuuaaaaacaaacgccauaacaaccauccucgcagcaguaacccuaugcuuugcauccucacaaaacauaacugaagaauuuuaccaaucaacaugcucagcaguaucaaaaggauaucuaucagcccucagaacaggaugguacacaucagucauuacaaucgaacuuucaaacauaaaagaaaauaaauguaacggcacagaugccaaaguaaaauuaauuaaacaagaacuugacaaauacaaaaaugccguaacagaacuacaacuacuaaugcaaaguacuccugcugcaggaagcggaucugcaauagcaucagguauagcaguauguaaaguucuacaccuagaaggcgaaguaaacaaaauuaaaaacgcacuacucucaacaaauaaagcaguugucucccuaucaaacggaguaucaguauuaacuuucaaaguacuagaccucaaaaacuauauagacaaacaacuauuaccaauacuaaacaaacaaagcugcucuaucuccaacaucgaaacaguaauagaauuucaacaaaaaaauaauagacuacuugaaauaaccagagaauuuucaguaaacgccggaguaacaacaccaguaucaacuuacaugcuaacaaacuccgaacuacuaucauuaauaaacgacaugcccauaacaaacgaccaaaaaaaauuaaugucaaacaacguccaaaucguacgacaacaauccuauuccauaauguguauaauaaaagaagaaguacuagcauacguaguacaauuaccauuauauggaguaauagauaccccuugcuggaaacuacacacaucaccccuaugcacuacaaauacgaaagaagguucaaauauaugcuuaacuagaaccgauagagguugguauugugacaacgcuggaucaguaucauuuuucccacaagcagaaacaugcaaaguacaaucaaacagaguauuuugcgacacuaugaacucaagaacuuuaccauccgaaguuaaucuauguaacauagauauauuuaacccaaaauacgacugcaaaauaaugacaucaaaaacagauguaucaucaucaguuauaaccucccucggagcaauaguaucaugcuauggaaaaacaaaaugcacagcaucaaacaaaaaucguggaauuauaaaaacauucucaaacggcugugacuacgucagcaauaaaggaguagacacagucucaguaggaaacacuuuauacuauguuaacaaacaagaaggaaaaucacucuacgucaaaggcgaaccaauaauaaauuucuaugacccacucguauucccauccgacgaauuugacgcaucaauaucacaaguaaaugaaaaaauaaaccaaagccuagcauuuauacgaaaaucagacgaacuacuacacaacguaaacguagguaaaagcacaaccaauauaaugauaacaacaauaaucauaguaauaaucguaauauuacuauuacuaauagcuguaggauuguuccuauacugcaaagcaagaucaacaccaguaaccuuaucuaaggaccaacuaucaggaaucaauaacauugccuucucaaacuaaggacuagugaagggaacacccaaauuuaauucagccuuaagcacaauuaauuaagagugaaacguaauuguacaagcaguuggucacccaccauagggcaugaucaacaccgcaaccuuuccuuuuucccccagugauucugaaaaaccccucuucccuucagcuugcuuagauguuccaaauuuaguaagcuuaaggcggccuacagaagaaaaagaaaaaaaaggccacaaaaguucccucucacuuucaguaaauaaaauaaaagcagcaacagaaauaaagaaauaaaugaaauucaaaaugaaauaaauauuguguugugcagcauuaaaaaaucaauaaaaauuaaaaaugagcaagaucuaaaaaaaaaaaaaaaaaaaaaaaaaaaaaaaaaaaaaaaaaaaaaaaaaaaaaaaaaaaaaaaaugcaucccccccccccccccccccccccccccccccaaaggcucuuuucagagccaccagaauu

SEQ ID NO: 13426 - RNA, 2193 nt, Artificial Sequence
  mRNA product Design f-1 comprising derived and/or modified sequence from HRSV(Memphis-37)__AIY60640.1__F_DSCav1_mut0 (opt11)
gggagagcggcucggccauuuugucccagucaguccggaggcugcggcugcagaaguaccgccugcggaguaacugcaaagaagcuuaccauggaacuaccuauccuuaaaaccaacgcaaucaccaccauccuugccgcagucacacucugcuucgcauccucacagaacaucaccgaagaguucuaucaaucaaccugcuccgccguauccaaaggauaccucucagcccuccgcaccggcugguauaccucagucauaacaaucgaauuaucaaauaucaaggagaacaaaugcaacggcaccgacgccaaagucaaacucauaaaacaagaacuagacaaauacaaaaacgccgugacagaacuccaacuccucaugcaguccacccccgcagccggauccggcucagcaaucgccucgggcauugcaguaugcaaaguccuccaccucgaaggcgaagucaacaaaaucaaaaacgcccuccucuccaccaacaaagccgucgucucccucuccaacggcguaucuguccucacuuucaagguccucgaccucaaaaacuacaucgacaagcaacuacuuccaauccucaacaagcaauccugcucaaucucaaacaucgaaaccguaauagaguuccaacaaaagaacaaccgccuccucgaaaucacccgcgaguucuccguuaacgccggugucacuaccccagucagcaccuacaugcucaccaacuccgaacuccuuucucugaucaacgacaugccaaucaccaacgaucaaaagaaauuaauguccaacaacguccagaucguccgccaacaaagcuacagcaucaugugcaucauaaaagaagaaguacuugcguacguaguucaacuaccccuuuacggcguaaucgacaccccaugcuggaaacuccacaccuccccacuaugcaccaccaacaccaaagaaggauccaacaucugccuaacccgcaccgaccgcggcugguacugcgacaacgcugggagcgucucauucuucccacaagcagaaaccugcaaaguccaaucgaaccgcguauucugcgacaccaugaacuccagaacccuaccaagcgaagucaaucuuugcaacaucgacauauuuaaccccaaauacgacugcaaaaucaugacaucaaagaccgacgucucaucuucagucauuaccucacucggcgcaauugucagcugcuacggaaagaccaaauguaccgccuccaauaaaaaccguggaaucauaaaaaccuuuagcaacggcugcgacuacgucuccaacaaaggagucgacaccgucuccgucggcaacacccucuacuacgucaacaaacaagaaggaaaaucccucuacgugaaaggcgaacccauaauaaacuucuacgacccccuagucuuccccucugacgaguucgacgccuccaucucccaagucaacgaaaagauaaaucaaucacuagccuucauacgcaaaucugacgaacuucuccacaacgucaacgucggcaaauccaccaccaacauaaugaucacaacgauaauaaucgugaucauaguaauccuacuucuccucaucgcaguaggucuauuccuauacugcaaagcccgcagcacccccgucacccuaucaaaagaccaacucuccggcaucaacaacaucgccuucucaaacuaaggacuagugaagggaacacccaaauuuaauucagccuuaagcacaauuaauuaagagugaaacguaauuguacaagcaguuggucacccaccauagggcaugaucaacaccgcaaccuuuccuuuuucccccagugauucugaaaaaccccucuucccuucagcuugcuuagauguuccaaauuuaguaagcuuaaggcggccuacagaagaaaaagaaaaaaaaggccacaaaaguucccucucacuuucaguaaauaaaauaaaagcagcaacagaaauaaagaaauaaaugaaauucaaaaugaaauaaauauuguguugugcagcauuaaaaaaucaauaaaaauuaaaaaugagcaagaucuaaaaaaaaaaaaaaaaaaaaaaaaaaaaaaaaaaaaaaaaaaaaaaaaaaaaaaaaaaaaaaaaugcaucccccccccccccccccccccccccccccccaaaggcucuuuucagagccaccagaauu

SEQ ID NO: 13427 - RNA, 1973 nt, Artificial Sequence
  mRNA product Design f-2 comprising derived and/or modified sequence from HRSV(Memphis-37)__AIY60640.1__F_DSCav1_mut0 (opt1)
gggagagcggcucggccauuuugucccagucaguccggaggcugcggcugcagaaguaccgccugcggaguaacugcaaagaagcuuaccauggagcugcccauccucaagaccaacgccaucaccacgauccuggccgcggugacccugugcuucgccagcucccagaacaucaccgaggaguucuaccagagcacgugcuccgccgucagcaagggcuaccucuccgcccugcgcaccgggugguacaccagcgugaucaccaucgagcuguccaacaucaaggagaacaagugcaacggcaccgacgccaaggugaagcucaucaagcaggagcuggacaaguacaagaacgcggucacggagcugcagcuccugaugcagagcaccccggccgccggcuccgggagcgcgaucgccuccggcaucgccgucugcaaggugcugcaccucgagggcgaggugaacaagaucaagaacgcccugcuguccaccaacaaggccgucgugagccucuccaacggggugagcguccugaccuucaaggugcuggaccucaagaacuacaucgacaagcagcugcugcccauccugaacaagcagagcugcuccaucagcaacaucgagaccgucaucgaguuccagcagaagaacaaccgccuccuggagaucacgcgggaguucagcgugaacgcgggcgugaccacccccgucuccaccuacaugcugacgaacagcgagcuccugucccugaucaacgacaugccgaucaccaacgaccagaagaagcucaugagcaacaacgugcagaucgugcgccagcaguccuacagcaucaugugcaucaucaaggaggagguccuggccuacguggugcagcugccccucuacggggucaucgacacccccugcuggaagcugcacaccagcccccugugcacgaccaacaccaaggagggcuccaacaucugccucacccggacggaccgcgggugguacugcgacaacgccggcagcguguccuucuucccgcaggccgagaccugcaagguccagagcaaccggguguucugcgacaccaugaacucccggacccugcccagcgaggugaaccucugcaacaucgacaucuucaaccccaaguacgacugcaagaucaugacguccaagaccgacgucagcuccagcgugaucaccucccugggcgccaucgugagcugcuacgggaagaccaagugcacggcgagcaacaagaaccgcggcaucaucaagaccuucuccaacgggugcgacuacgucagcaacaagggcguggacaccguguccgucggcaacacccuguacuacgugaacaagcaggagggcaagagccucuacgugaagggggagcccaucaucaacuucuacgacccgcuggucuuccccuccgacgaguucgacgccagcaucucccaggugaacgagaagaucaaccagagccuggccuucauccggaaguccgacgagcuccugcacaacgugaacgucggcaagagcaccacgaacaucaugaucaccaccaucaucaucgugaucaucgugauccugcugcuccugaucgccgucgggcuguuccucuacugcaaggcccgcuccacccccgugacgcugagcaaggaccagcuguccgggaucaacaacaucgcguucagcaacugaggacuaguggaagcauuuuccuggcugauuaaaagaaauuacucagcuauggucaucuguuccuguuagaaggcuaugcagcauauuauauacuaugcgcauguuaugaaaugcauaauaaaaaauuuuaaaaaaucuaaaagaucuaaaaaaaaaaaaaaaaaaaaaaaaaaaaaaaaaaaaaaaaaaaaaaaaaaaaaaaaaaaaaaaaugcaucccccccccccccccccccccccccccccccaaaggcucuuuucagagccaccagaauu

SEQ ID NO: 13428 - RNA, 1973 nt, Artificial Sequence
  mRNA product Design f-2 comprising derived and/or modified sequence from HRSV(Memphis-37)__AIY60640.1__F_DSCav1_mut0 (opt1)
gggagagcggcucggccauuuugucccagucaguccggaggcugcggcugcagaaguaccgccugcggaguaacugcaaagaagcuuaccauggagcugcccauccucaagaccaacgccaucaccacgauccuggccgcggugacccugugcuucgccagcucccagaacaucaccgaggaguucuaccagagcacgugcuccgccgucagcaagggcuaccucuccgcccugcgcaccgggugguacaccagcgugaucaccaucgagcuguccaacaucaaggagaacaagugcaacggcaccgacgccaaggugaagcucaucaagcaggagcuggacaaguacaagaacgcggucacggagcugcagcuccugaugcagagcaccccggccgccggguccggcagcgccaucgcguccgggaucgccgugugcaaggugcugcaccucgagggcgaggucaacaagaucaagaacgcccugcugagcaccaacaaggccguggugucccucagcaacggcgucuccgugcugaccuucaaggugcuggaccucaagaacuacaucgacaagcagcugcugcccauccucaacaagcagagcugcuccaucagcaacaucgagacggucaucgaguuccagcagaagaacaaccggcugcuggagaucacccgcgaguucuccgugaacgccggggugaccacccccgucagcacguacaugcucaccaacagcgagcugcugucccucaucaacgacaugcccaucaccaacgaccagaagaagcugaugagcaacaacgugcagaucgugcggcagcaguccuacagcaucaugugcaucaucaaggaggagguccuggcguacguggugcagcucccgcuguacggcgucaucgacacccccugcuggaagcugcacacgagcccccucugcaccaccaacaccaaggagggguccaacaucugccugacgcgcaccgaccggggcugguacugcgacaacgccggguccgugagcuucuucccccaggccgagaccugcaaggugcaguccaaccgcgucuucugcgacaccaugaacagccggacgcucccguccgaggugaaccugugcaacaucgacaucuucaaccccaaguacgacugcaagaucaugaccagcaagaccgacgucuccagcuccgugaucaccagccugggcgccaucguguccugcuacggcaagacgaagugcaccgccagcaacaagaaccgggggaucaucaagaccuucuccaacggcugcgacuacgucagcaacaaggggguggacaccgugagcgucggcaacacgcucuacuacgugaacaagcaggagggcaagucccuguacgugaagggggagcccaucaucaacuucuacgacccccuggucuucccgagcgacgaguucgacgcguccaucagccaggugaacgagaagaucaaccagucccucgccuucauccgcaagagcgacgagcugcugcacaacgugaacgucggcaaguccaccaccaacaucaugaucaccaccaucaucaucgugaucaucgugauccuccugcugcucaucgccgucgggcuguuccuguacugcaaggcccggagcacgcccgugacccuguccaaggaccagcucagcggcaucaacaacaucgccuucuccaacugaggacuaguggaagcauuuuccuggcugauuaaaagaaauuacucagcuauggucaucuguuccuguuagaaggcuaugcagcauauuauauacuaugcgcauguuaugaaaugcauaauaaaaaauuuuaaaaaaucuaaaagaucuaaaaaaaaaaaaaaaaaaaaaaaaaaaaaaaaaaaaaaaaaaaaaaaaaaaaaaaaaaaaaaaaugcaucccccccccccccccccccccccccccccccaaaggcucuuuucagagccaccagaauu

SEQ ID NO: 13429 - RNA, 1973 nt, Artificial Sequence
  mRNA product Design f-2 comprising derived and/or modified sequence from HRSV(Memphis-37)__AIY60640.1__F_DSCav1_mut0 (opt2)
gggagagcggcucggccauuuugucccagucaguccggaggcugcggcugcagaaguaccgccugcggaguaacugcaaagaagcuuaccauggagcuccccauccucaagaccaacgccaucaccaccauccucgccgccgucacccucugcuucgccuccucccagaacaucaccgaggaguucuaccaguccaccugcuccgccgucuccaagggcuaccucuccgcccuccgcaccggcugguacaccuccgucaucaccaucgagcucuccaacaucaaggagaacaagugcaacggcaccgacgccaaggucaagcucaucaagcaggagcucgacaaguacaagaacgccgucaccgagcuccagcuccucaugcaguccacccccgccgccggcuccggcuccgccaucgccuccggcaucgccgucugcaagguccuccaccucgagggcgaggucaacaagaucaagaacgcccuccucuccaccaacaaggccgucgucucccucuccaacggcgucuccguccucaccuucaagguccucgaccucaagaacuacaucgacaagcagcuccuccccauccucaacaagcaguccugcuccaucuccaacaucgagaccgucaucgaguuccagcagaagaacaaccgccuccucgagaucacccgcgaguucuccgucaacgccggcgucaccacccccgucuccaccuacaugcucaccaacuccgagcuccucucccucaucaacgacaugcccaucaccaacgaccagaagaagcucauguccaacaacguccagaucguccgccagcaguccuacuccaucaugugcaucaucaaggaggagguccucgccuacgucguccagcucccccucuacggcgucaucgacacccccugcuggaagcuccacaccuccccccucugcaccaccaacaccaaggagggcuccaacaucugccucacccgcaccgaccgcggcugguacugcgacaacgccggcuccgucuccuucuucccccaggccgagaccugcaagguccaguccaaccgcgucuucugcgacaccaugaacucccgcacccuccccuccgaggucaaccucugcaacaucgacaucuucaaccccaaguacgacugcaagaucaugaccuccaagaccgacgucuccuccuccgucaucaccucccucggcgccaucgucuccugcuacggcaagaccaagugcaccgccuccaacaagaaccgcggcaucaucaagaccuucuccaacggcugcgacuacgucuccaacaagggcgucgacaccgucuccgucggcaacacccucuacuacgucaacaagcaggagggcaagucccucuacgucaagggcgagcccaucaucaacuucuacgacccccucgucuuccccuccgacgaguucgacgccuccaucucccaggucaacgagaagaucaaccagucccucgccuucauccgcaaguccgacgagcuccuccacaacgucaacgucggcaaguccaccaccaacaucaugaucaccaccaucaucaucgucaucaucgucauccuccuccuccucaucgccgucggccucuuccucuacugcaaggcccgcuccacccccgucacccucuccaaggaccagcucuccggcaucaacaacaucgccuucuccaacugaggacuaguggaagcauuuuccuggcugauuaaaagaaauuacucagcuauggucaucuguuccuguuagaaggcuaugcagcauauuauauacuaugcgcauguuaugaaaugcauaauaaaaaauuuuaaaaaaucuaaaagaucuaaaaaaaaaaaaaaaaaaaaaaaaaaaaaaaaaaaaaaaaaaaaaaaaaaaaaaaaaaaaaaaaugcaucccccccccccccccccccccccccccccccaaaggcucuuuucagagccaccagaauu

SEQ ID NO: 13430 - RNA, 1973 nt, Artificial Sequence
  mRNA product Design f-2 comprising derived and/or modified sequence from HRSV(Memphis-37)__AIY60640.1__F_DSCav1_mut0 (opt3)
gggagagcggcucggccauuuugucccagucaguccggaggcugcggcugcagaaguaccgccugcggaguaacugcaaagaagcuuaccauggagcugcccauccucaagaccaacgccauuacaacuauacuugcugcagugacgcugugcuucgccagcucccagaauaucaccgaagaguuuuaccaaucuacauguucagcggucaguaaaggcuauuugagcgcuuuaagaacugggugguacaccuccguuauuacaaucgaacugucuaacauuaaggagaauaaaugcaacggaaccgacgccaaggugaaacuaaucaagcaggaacucgauaaguauaaaaaugcaguaacugagcugcagcuucugaugcagucgaccccugccgcugguucaggcagcgcaauagccagugggaucgcuguguguaaggucuugcaccucgagggagaagugaacaaaauuaagaaugcccugcuguccacaaacaaagcgguugugucucucagcaauggcgucuccguguuaacguucaagguacuggaccuuaagaacuacaucgauaaacaauugcugccaauucuaaauaagcagucaugcaguaucagcaacauagagacuguuauugaauuucagcagaaaaauaacaggcuccuggagaucacccgggaguucucugugaaugccggugucacaacuccgguguccaccuauaugcuuacaaacucagaacuguugagccucauuaacgacaugcccaucaccaaugaucaaaagaaacugaugaguaacaaugugcagaucguccgccagcagucuuacuccauuauguguauaaucaaggaggaaguuuuagcauaugugguacaacugccucucuacggggugauugacacgccaugcuggaaacuucauacuagcccccuguguacaaccaacacuaaggagggaucgaauaucugcuugacacgaaccgaucguggcugguacugugacaacgcuggcucugucuccuuuuucccucaggccgaaacgugcaaggugcagucaaauagaguguuuugugauaccaugaacaguagaacacugccaagcgaggugaaucucugcaacauagacauuuucaaucccaaauaugauugcaagaucaugacuuccaaaaccgacgucucuagcucagugaucacaagucugggggcaauuguauccuguuacggaaagacuaaaugcaccgcuagcaacaagaauagggguaucauuaagacauuuucuaacggcugugauuauguuucaaauaaagggguggacaccgucagugugggaaacacucuuuacuaugucaacaagcaagagggcaaaagccuguacgugaagggugaaccuauaaucaauuucuaugacccauugguuuuuccguccgaugaguucgacgccucuauuucgcagguuaacgagaaaaucaaucagagccucgcguuuauccggaaguccgaugaacuguuacacaacguaaaugucgggaagucaacgacaaacauuaugauaaccacuaucauuaucgugauuaucguuauacugcuacuccugaucgccgugggacuuuucuuguacugcaaagcacgcaguacccccgucacacugucuaaggaccagcucagcggcauuaauaacaucgcuuucuccaauugaggacuaguggaagcauuuuccuggcugauuaaaagaaauuacucagcuauggucaucuguuccuguuagaaggcuaugcagcauauuauauacuaugcgcauguuaugaaaugcauaauaaaaaauuuuaaaaaaucuaaaagaucuaaaaaaaaaaaaaaaaaaaaaaaaaaaaaaaaaaaaaaaaaaaaaaaaaaaaaaaaaaaaaaaaugcaucccccccccccccccccccccccccccccccaaaggcucuuuucagagccaccagaauu

SEQ ID NO: 13431 - RNA, 1973 nt, Artificial Sequence
  mRNA product Design f-2 comprising derived and/or modified sequence from HRSV(Memphis-37)__AIY60640.1__F_DSCav1_mut0 (opt4)
gggagagcggcucggccauuuugucccagucaguccggaggcugcggcugcagaaguaccgccugcggaguaacugcaaagaagcuuaccauggagcugcccauccugaagaccaacgccaucaccaccauccuggccgccgugacccugugcuucgccagcagccagaacaucaccgaggaguucuaccagagcaccugcagcgccgugagcaagggcuaccugagcgcccugagaaccggcugguacaccagcgugaucaccaucgagcugagcaacaucaaggagaacaagugcaacggcaccgacgccaaggugaagcugaucaagcaggagcuggacaaguacaagaacgccgugaccgagcugcagcugcugaugcagagcacccccgccgccggcagcggcagcgccaucgccagcggcaucgccgugugcaaggugcugcaccuggagggcgaggugaacaagaucaagaacgcccugcugagcaccaacaaggccguggugagccugagcaacggcgugagcgugcugaccuucaaggugcuggaccugaagaacuacaucgacaagcagcugcugcccauccugaacaagcagagcugcagcaucagcaacaucgagaccgugaucgaguuccagcagaagaacaacagacugcuggagaucaccagagaguucagcgugaacgccggcgugaccacccccgugagcaccuacaugcugaccaacagcgagcugcugagccugaucaacgacaugcccaucaccaacgaccagaagaagcugaugagcaacaacgugcagaucgugagacagcagagcuacagcaucaugugcaucaucaaggaggaggugcuggccuacguggugcagcugccccuguacggcgugaucgacacccccugcuggaagcugcacaccagcccccugugcaccaccaacaccaaggagggcagcaacaucugccugaccagaaccgacagaggcugguacugcgacaacgccggcagcgugagcuucuucccccaggccgagaccugcaaggugcagagcaacagaguguucugcgacaccaugaacagcagaacccugcccagcgaggugaaccugugcaacaucgacaucuucaaccccaaguacgacugcaagaucaugaccagcaagaccgacgugagcagcagcgugaucaccagccugggcgccaucgugagcugcuacggcaagaccaagugcaccgccagcaacaagaacagaggcaucaucaagaccuucagcaacggcugcgacuacgugagcaacaagggcguggacaccgugagcgugggcaacacccuguacuacgugaacaagcaggagggcaagagccuguacgugaagggcgagcccaucaucaacuucuacgacccccugguguuccccagcgacgaguucgacgccagcaucagccaggugaacgagaagaucaaccagagccuggccuucaucagaaagagcgacgagcugcugcacaacgugaacgugggcaagagcaccaccaacaucaugaucaccaccaucaucaucgugaucaucgugauccugcugcugcugaucgccgugggccuguuccuguacugcaaggccagaagcacccccgugacccugagcaaggaccagcugagcggcaucaacaacaucgccuucagcaacugaggacuaguggaagcauuuuccuggcugauuaaaagaaauuacucagcuauggucaucuguuccuguuagaaggcuaugcagcauauuauauacuaugcgcauguuaugaaaugcauaauaaaaaauuuuaaaaaaucuaaaagaucuaaaaaaaaaaaaaaaaaaaaaaaaaaaaaaaaaaaaaaaaaaaaaaaaaaaaaaaaaaaaaaaaugcaucccccccccccccccccccccccccccccccaaaggcucuuuucagagccaccagaauu

SEQ ID NO: 13432 - RNA, 1973 nt, Artificial Sequence
  mRNA product Design f-2 comprising derived and/or modified sequence from HRSV(Memphis-37)__AIY60640.1__F_DSCav1_mut0 (opt5)
gggagagcggcucggccauuuugucccagucaguccggaggcugcggcugcagaaguaccgccugcggaguaacugcaaagaagcuuaccauggagcugcccauccucaagaccaacgccauuacaacgauccuggcugccgugacccuuugcuucgcgagcucccagaauauuacagaagaguuuuaccaaucuaccuguagcgcugucuccaaaggcuaucugucugcccucagaacagggugguacaccagcguuaucacaauugaacuguccaacaucaaggagaauaaaugcaacggaaccgacgccaaggugaaacuuaucaagcaggaacuggauaaguauaaaaaugcugugacggagcuccagcugcugaugcagucuaccccugccgcuggcagcggguccgccauugcgagcggaaucgccgucuguaaggugcuccaccuggagggcgaaguuaacaaaauuaagaaugcccuucugucuacaaacaaagcuguggucucccucagcaauggggugucuguucugaccuucaaggugcuugaccugaagaacuacaucgauaaacaacuccugccgauucugaauaagcaguccugcagcaucucuaacauugagacagucaucgaauuucagcagaaaaauaaccggcuccuggagaucacccgcgaguucuccgugaaugcuggagugacgacacccgucagcaccuauaugcuuacaaacuccgaacugcucucucugauuaacgacaugccuaucaccaaugaucaaaagaaacuuaugagcaacaauguucagauugugagacagcaguccuacagcaucauguguauuaucaaggaggaagugcuggccuaugucgugcaacucccccuguacggcguuaucgacaccccuugcuggaaacugcauacaucuccccucuguacgaccaacacaaaggagggcuccaauauuugccugacccggacagaucgcgggugguacugugacaacgcgggaagcgugagcuuuuucccucaggccgaaaccugcaagguccagucuaauagaguguuuugugauacgaugaacuccagaacacugccgucugagguuaaucucugcaacaucgacauuuucaaucccaaauaugauugcaagaucaugaccagcaaaaccgacguguccagcucugucauuacaucccugggcgcuaucgugagcuguuacgggaagaccaaaugcacagccucuaacaagaaucggggaaucauuaagacguuuuccaacggcugugauuaugucagcaauaaagggguggacaccguuuccgugggaaacacacuuuacuaugucaacaagcaagagggcaaaucucuguacgugaagggcgaaccuaucauuaauuucuaugacccccucguuuuuccuagcgaugaguucgacgcuuccaucucucaggugaacgaaaagauuaaucagagccuggccuuuauccgcaaguccgaugagcugcuccacaacgucaauguggggaaaagcaccacaaacauuaugaucaccacgaucauuaucgugauuaucguuauucugcuucugcucaucgccgucggacuguuccuguacugcaaagcuagaucuacccccgugacacuuuccaaggaccagcucagcggcaucaauaacauugcguucucuaauugaggacuaguggaagcauuuuccuggcugauuaaaagaaauuacucagcuauggucaucuguuccuguuagaaggcuaugcagcauauuauauacuaugcgcauguuaugaaaugcauaauaaaaaauuuuaaaaaaucuaaaagaucuaaaaaaaaaaaaaaaaaaaaaaaaaaaaaaaaaaaaaaaaaaaaaaaaaaaaaaaaaaaaaaaaugcaucccccccccccccccccccccccccccccccaaaggcucuuuucagagccaccagaauu

SEQ ID NO: 13433 - RNA, 1973 nt, Artificial Sequence
  mRNA product Design f-2 comprising derived and/or modified sequence from HRSV(Memphis-37)__AIY60640.1__F_DSCav1_mut0 (opt6)
gggagagcggcucggccauuuugucccagucaguccggaggcugcggcugcagaaguaccgccugcggaguaacugcaaagaagcuuaccauggaauuaccaaucuuaaaaacaaacgccauaacaaccauccucgcagcaguaacccuaugcuuugcauccucacaaaacauaacugaagaauuuuaccaaucaacaugcucagcaguaucaaaaggauaucuaucagcccucagaacaggaugguacacaucagucauuacaaucgaacuuucaaacauaaaagaaaauaaauguaacggcacagaugccaaaguaaaauuaauuaaacaagaacuugacaaauacaaaaaugccguaacagaacuacaacuacuaaugcaaaguacuccugcugcaggaagcggaucugcaauagcaucagguauagcaguauguaaaguucuacaccuagaaggcgaaguaaacaaaauuaaaaacgcacuacucucaacaaauaaagcaguugucucccuaucaaacggaguaucaguauuaacuuucaaaguacuagaccucaaaaacuauauagacaaacaacuauuaccaauacuaaacaaacaaagcugcucuaucuccaacaucgaaacaguaauagaauuucaacaaaaaaauaauagacuacuugaaauaaccagagaauuuucaguaaacgccggaguaacaacaccaguaucaacuuacaugcuaacaaacuccgaacuacuaucauuaauaaacgacaugcccauaacaaacgaccaaaaaaaauuaaugucaaacaacguccaaaucguacgacaacaauccuauuccauaauguguauaauaaaagaagaaguacuagcauacguaguacaauuaccauuauauggaguaauagauaccccuugcuggaaacuacacacaucaccccuaugcacuacaaauacgaaagaagguucaaauauaugcuuaacuagaaccgauagagguugguauugugacaacgcuggaucaguaucauuuuucccacaagcagaaacaugcaaaguacaaucaaacagaguauuuugcgacacuaugaacucaagaacuuuaccauccgaaguuaaucuauguaacauagauauauuuaacccaaaauacgacugcaaaauaaugacaucaaaaacagauguaucaucaucaguuauaaccucccucggagcaauaguaucaugcuauggaaaaacaaaaugcacagcaucaaacaaaaaucguggaauuauaaaaacauucucaaacggcugugacuacgucagcaauaaaggaguagacacagucucaguaggaaacacuuuauacuauguuaacaaacaagaaggaaaaucacucuacgucaaaggcgaaccaauaauaaauuucuaugacccacucguauucccauccgacgaauuugacgcaucaauaucacaaguaaaugaaaaaauaaaccaaagccuagcauuuauacgaaaaucagacgaacuacuacacaacguaaacguagguaaaagcacaaccaauauaaugauaacaacaauaaucauaguaauaaucguaauauuacuauuacuaauagcuguaggauuguuccuauacugcaaagcaagaucaacaccaguaaccuuaucuaaggaccaacuaucaggaaucaauaacauugccuucucaaacuaaggacuaguggaagcauuuuccuggcugauuaaaagaaauuacucagcuauggucaucuguuccuguuagaaggcuaugcagcauauuauauacuaugcgcauguuaugaaaugcauaauaaaaaauuuuaaaaaaucuaaaagaucuaaaaaaaaaaaaaaaaaaaaaaaaaaaaaaaaaaaaaaaaaaaaaaaaaaaaaaaaaaaaaaaaugcaucccccccccccccccccccccccccccccccaaaggcucuuuucagagccaccagaauu

SEQ ID NO: 13434 - RNA, 1973 nt, Artificial Sequence
  mRNA product Design f-2 comprising derived and/or modified sequence from HRSV(Memphis-37)__AIY60640.1__F_DSCav1_mut0 (opt11)
gggagagcggcucggccauuuugucccagucaguccggaggcugcggcugcagaaguaccgccugcggaguaacugcaaagaagcuuaccauggaacuaccuauccuuaaaaccaacgcaaucaccaccauccuugccgcagucacacucugcuucgcauccucacagaacaucaccgaagaguucuaucaaucaaccugcuccgccguauccaaaggauaccucucagcccuccgcaccggcugguauaccucagucauaacaaucgaauuaucaaauaucaaggagaacaaaugcaacggcaccgacgccaaagucaaacucauaaaacaagaacuagacaaauacaaaaacgccgugacagaacuccaacuccucaugcaguccacccccgcagccggauccggcucagcaaucgccucgggcauugcaguaugcaaaguccuccaccucgaaggcgaagucaacaaaaucaaaaacgcccuccucuccaccaacaaagccgucgucucccucuccaacggcguaucuguccucacuuucaagguccucgaccucaaaaacuacaucgacaagcaacuacuuccaauccucaacaagcaauccugcucaaucucaaacaucgaaaccguaauagaguuccaacaaaagaacaaccgccuccucgaaaucacccgcgaguucuccguuaacgccggugucacuaccccagucagcaccuacaugcucaccaacuccgaacuccuuucucugaucaacgacaugccaaucaccaacgaucaaaagaaauuaauguccaacaacguccagaucguccgccaacaaagcuacagcaucaugugcaucauaaaagaagaaguacuugcguacguaguucaacuaccccuuuacggcguaaucgacaccccaugcuggaaacuccacaccuccccacuaugcaccaccaacaccaaagaaggauccaacaucugccuaacccgcaccgaccgcggcugguacugcgacaacgcugggagcgucucauucuucccacaagcagaaaccugcaaaguccaaucgaaccgcguauucugcgacaccaugaacuccagaacccuaccaagcgaagucaaucuuugcaacaucgacauauuuaaccccaaauacgacugcaaaaucaugacaucaaagaccgacgucucaucuucagucauuaccucacucggcgcaauugucagcugcuacggaaagaccaaauguaccgccuccaauaaaaaccguggaaucauaaaaaccuuuagcaacggcugcgacuacgucuccaacaaaggagucgacaccgucuccgucggcaacacccucuacuacgucaacaaacaagaaggaaaaucccucuacgugaaaggcgaacccauaauaaacuucuacgacccccuagucuuccccucugacgaguucgacgccuccaucucccaagucaacgaaaagauaaaucaaucacuagccuucauacgcaaaucugacgaacuucuccacaacgucaacgucggcaaauccaccaccaacauaaugaucacaacgauaauaaucgugaucauaguaauccuacuucuccucaucgcaguaggucuauuccuauacugcaaagcccgcagcacccccgucacccuaucaaaagaccaacucuccggcaucaacaacaucgccuucucaaacuaaggacuaguggaagcauuuuccuggcugauuaaaagaaauuacucagcuauggucaucuguuccuguuagaaggcuaugcagcauauuauauacuaugcgcauguuaugaaaugcauaauaaaaaauuuuaaaaaaucuaaaagaucuaaaaaaaaaaaaaaaaaaaaaaaaaaaaaaaaaaaaaaaaaaaaaaaaaaaaaaaaaaaaaaaaugcaucccccccccccccccccccccccccccccccaaaggcucuuuucagagccaccagaauu

SEQ ID NO: 13435 - RNA, 1964 nt, Artificial Sequence
  mRNA product Design f-3 comprising derived and/or modified sequence from HRSV(Memphis-37)__AIY60640.1__F_DSCav1_mut0 (opt1)
gggagagucccgcagucggcguccagcggcucugcuuguucgugugugugucguugcaggccuuauucaagcuuaccauggagcugcccauccucaagaccaacgccaucaccacgauccuggccgcggugacccugugcuucgccagcucccagaacaucaccgaggaguucuaccagagcacgugcuccgccgucagcaagggcuaccucuccgcccugcgcaccgggugguacaccagcgugaucaccaucgagcuguccaacaucaaggagaacaagugcaacggcaccgacgccaaggugaagcucaucaagcaggagcuggacaaguacaagaacgcggucacggagcugcagcuccugaugcagagcaccccggccgccggcuccgggagcgcgaucgccuccggcaucgccgucugcaaggugcugcaccucgagggcgaggugaacaagaucaagaacgcccugcuguccaccaacaaggccgucgugagccucuccaacggggugagcguccugaccuucaaggugcuggaccucaagaacuacaucgacaagcagcugcugcccauccugaacaagcagagcugcuccaucagcaacaucgagaccgucaucgaguuccagcagaagaacaaccgccuccuggagaucacgcgggaguucagcgugaacgcgggcgugaccacccccgucuccaccuacaugcugacgaacagcgagcuccugucccugaucaacgacaugccgaucaccaacgaccagaagaagcucaugagcaacaacgugcagaucgugcgccagcaguccuacagcaucaugugcaucaucaaggaggagguccuggccuacguggugcagcugccccucuacggggucaucgacacccccugcuggaagcugcacaccagcccccugugcacgaccaacaccaaggagggcuccaacaucugccucacccggacggaccgcgggugguacugcgacaacgccggcagcguguccuucuucccgcaggccgagaccugcaagguccagagcaaccggguguucugcgacaccaugaacucccggacccugcccagcgaggugaaccucugcaacaucgacaucuucaaccccaaguacgacugcaagaucaugacguccaagaccgacgucagcuccagcgugaucaccucccugggcgccaucgugagcugcuacgggaagaccaagugcacggcgagcaacaagaaccgcggcaucaucaagaccuucuccaacgggugcgacuacgucagcaacaagggcguggacaccguguccgucggcaacacccuguacuacgugaacaagcaggagggcaagagccucuacgugaagggggagcccaucaucaacuucuacgacccgcuggucuuccccuccgacgaguucgacgccagcaucucccaggugaacgagaagaucaaccagagccuggccuucauccggaaguccgacgagcuccugcacaacgugaacgucggcaagagcaccacgaacaucaugaucaccaccaucaucaucgugaucaucgugauccugcugcuccugaucgccgucgggcuguuccucuacugcaaggcccgcuccacccccgugacgcugagcaaggaccagcuguccgggaucaacaacaucgcguucagcaacugaggacuaguacuggcugcaucucccuuuccucuguccuccauccuucucccaggauggugaagggggaccugguacccagugauccccaccccaggauccuaaaucaugacuuaccugcuaauaaaaacucauuggaaaagugagaagaucuaaaaaaaaaaaaaaaaaaaaaaaaaaaaaaaaaaaaaaaaaaaaaaaaaaaaaaaaaaaaaaaaugcaucccccccccccccccccccccccccccccccaaaggcucuuuucagagccaccagaauu

SEQ ID NO: 13436 - RNA, 1964 nt, Artificial Sequence
  mRNA product Design f-3 comprising derived and/or modified sequence from HRSV(Memphis-37)__AIY60640.1__F_DSCav1_mut0 (opt1)
gggagagucccgcagucggcguccagcggcucugcuuguucgugugugugucguugcaggccuuauucaagcuuaccauggagcugcccauccucaagaccaacgccaucaccacgauccuggccgcggugacccugugcuucgccagcucccagaacaucaccgaggaguucuaccagagcacgugcuccgccgucagcaagggcuaccucuccgcccugcgcaccgggugguacaccagcgugaucaccaucgagcuguccaacaucaaggagaacaagugcaacggcaccgacgccaaggugaagcucaucaagcaggagcuggacaaguacaagaacgcggucacggagcugcagcuccugaugcagagcaccccggccgccggguccggcagcgccaucgcguccgggaucgccgugugcaaggugcugcaccucgagggcgaggucaacaagaucaagaacgcccugcugagcaccaacaaggccguggugucccucagcaacggcgucuccgugcugaccuucaaggugcuggaccucaagaacuacaucgacaagcagcugcugcccauccucaacaagcagagcugcuccaucagcaacaucgagacggucaucgaguuccagcagaagaacaaccggcugcuggagaucacccgcgaguucuccgugaacgccggggugaccacccccgucagcacguacaugcucaccaacagcgagcugcugucccucaucaacgacaugcccaucaccaacgaccagaagaagcugaugagcaacaacgugcagaucgugcggcagcaguccuacagcaucaugugcaucaucaaggaggagguccuggcguacguggugcagcucccgcuguacggcgucaucgacacccccugcuggaagcugcacacgagcccccucugcaccaccaacaccaaggagggguccaacaucugccugacgcgcaccgaccggggcugguacugcgacaacgccggguccgugagcuucuucccccaggccgagaccugcaaggugcaguccaaccgcgucuucugcgacaccaugaacagccggacgcucccguccgaggugaaccugugcaacaucgacaucuucaaccccaaguacgacugcaagaucaugaccagcaagaccgacgucuccagcuccgugaucaccagccugggcgccaucguguccugcuacggcaagacgaagugcaccgccagcaacaagaaccgggggaucaucaagaccuucuccaacggcugcgacuacgucagcaacaaggggguggacaccgugagcgucggcaacacgcucuacuacgugaacaagcaggagggcaagucccuguacgugaagggggagcccaucaucaacuucuacgacccccuggucuucccgagcgacgaguucgacgcguccaucagccaggugaacgagaagaucaaccagucccucgccuucauccgcaagagcgacgagcugcugcacaacgugaacgucggcaaguccaccaccaacaucaugaucaccaccaucaucaucgugaucaucgugauccuccugcugcucaucgccgucgggcuguuccuguacugcaaggcccggagcacgcccgugacccuguccaaggaccagcucagcggcaucaacaacaucgccuucuccaacugaggacuaguacuggcugcaucucccuuuccucuguccuccauccuucucccaggauggugaagggggaccugguacccagugauccccaccccaggauccuaaaucaugacuuaccugcuaauaaaaacucauuggaaaagugagaagaucuaaaaaaaaaaaaaaaaaaaaaaaaaaaaaaaaaaaaaaaaaaaaaaaaaaaaaaaaaaaaaaaaugcaucccccccccccccccccccccccccccccccaaaggcucuuuucagagccaccagaauu

SEQ ID NO: 13437 - RNA, 1964 nt, Artificial Sequence
  mRNA product Design f-3 comprising derived and/or modified sequence from HRSV(Memphis-37)__AIY60640.1__F_DSCav1_mut0 (opt2)
gggagagucccgcagucggcguccagcggcucugcuuguucgugugugugucguugcaggccuuauucaagcuuaccauggagcuccccauccucaagaccaacgccaucaccaccauccucgccgccgucacccucugcuucgccuccucccagaacaucaccgaggaguucuaccaguccaccugcuccgccgucuccaagggcuaccucuccgcccuccgcaccggcugguacaccuccgucaucaccaucgagcucuccaacaucaaggagaacaagugcaacggcaccgacgccaaggucaagcucaucaagcaggagcucgacaaguacaagaacgccgucaccgagcuccagcuccucaugcaguccacccccgccgccggcuccggcuccgccaucgccuccggcaucgccgucugcaagguccuccaccucgagggcgaggucaacaagaucaagaacgcccuccucuccaccaacaaggccgucgucucccucuccaacggcgucuccguccucaccuucaagguccucgaccucaagaacuacaucgacaagcagcuccuccccauccucaacaagcaguccugcuccaucuccaacaucgagaccgucaucgaguuccagcagaagaacaaccgccuccucgagaucacccgcgaguucuccgucaacgccggcgucaccacccccgucuccaccuacaugcucaccaacuccgagcuccucucccucaucaacgacaugcccaucaccaacgaccagaagaagcucauguccaacaacguccagaucguccgccagcaguccuacuccaucaugugcaucaucaaggaggagguccucgccuacgucguccagcucccccucuacggcgucaucgacacccccugcuggaagcuccacaccuccccccucugcaccaccaacaccaaggagggcuccaacaucugccucacccgcaccgaccgcggcugguacugcgacaacgccggcuccgucuccuucuucccccaggccgagaccugcaagguccaguccaaccgcgucuucugcgacaccaugaacucccgcacccuccccuccgaggucaaccucugcaacaucgacaucuucaaccccaaguacgacugcaagaucaugaccuccaagaccgacgucuccuccuccgucaucaccucccucggcgccaucgucuccugcuacggcaagaccaagugcaccgccuccaacaagaaccgcggcaucaucaagaccuucuccaacggcugcgacuacgucuccaacaagggcgucgacaccgucuccgucggcaacacccucuacuacgucaacaagcaggagggcaagucccucuacgucaagggcgagcccaucaucaacuucuacgacccccucgucuuccccuccgacgaguucgacgccuccaucucccaggucaacgagaagaucaaccagucccucgccuucauccgcaaguccgacgagcuccuccacaacgucaacgucggcaaguccaccaccaacaucaugaucaccaccaucaucaucgucaucaucgucauccuccuccuccucaucgccgucggccucuuccucuacugcaaggcccgcuccacccccgucacccucuccaaggaccagcucuccggcaucaacaacaucgccuucuccaacugaggacuaguacuggcugcaucucccuuuccucuguccuccauccuucucccaggauggugaagggggaccugguacccagugauccccaccccaggauccuaaaucaugacuuaccugcuaauaaaaacucauuggaaaagugagaagaucuaaaaaaaaaaaaaaaaaaaaaaaaaaaaaaaaaaaaaaaaaaaaaaaaaaaaaaaaaaaaaaaaugcaucccccccccccccccccccccccccccccccaaaggcucuuuucagagccaccagaauu

SEQ ID NO: 13438 - RNA, 1964 nt, Artificial Sequence
  mRNA product Design f-3 comprising derived and/or modified sequence from HRSV(Memphis-37)__AIY60640.1__F_DSCav1_mut0 (opt3)
gggagagucccgcagucggcguccagcggcucugcuuguucgugugugugucguugcaggccuuauucaagcuuaccauggagcugcccauccucaagaccaacgccauuacaacuauacuugcugcagugacgcugugcuucgccagcucccagaauaucaccgaagaguuuuaccaaucuacauguucagcggucaguaaaggcuauuugagcgcuuuaagaacugggugguacaccuccguuauuacaaucgaacugucuaacauuaaggagaauaaaugcaacggaaccgacgccaaggugaaacuaaucaagcaggaacucgauaaguauaaaaaugcaguaacugagcugcagcuucugaugcagucgaccccugccgcugguucaggcagcgcaauagccagugggaucgcuguguguaaggucuugcaccucgagggagaagugaacaaaauuaagaaugcccugcuguccacaaacaaagcgguugugucucucagcaauggcgucuccguguuaacguucaagguacuggaccuuaagaacuacaucgauaaacaauugcugccaauucuaaauaagcagucaugcaguaucagcaacauagagacuguuauugaauuucagcagaaaaauaacaggcuccuggagaucacccgggaguucucugugaaugccggugucacaacuccgguguccaccuauaugcuuacaaacucagaacuguugagccucauuaacgacaugcccaucaccaaugaucaaaagaaacugaugaguaacaaugugcagaucguccgccagcagucuuacuccauuauguguauaaucaaggaggaaguuuuagcauaugugguacaacugccucucuacggggugauugacacgccaugcuggaaacuucauacuagcccccuguguacaaccaacacuaaggagggaucgaauaucugcuugacacgaaccgaucguggcugguacugugacaacgcuggcucugucuccuuuuucccucaggccgaaacgugcaaggugcagucaaauagaguguuuugugauaccaugaacaguagaacacugccaagcgaggugaaucucugcaacauagacauuuucaaucccaaauaugauugcaagaucaugacuuccaaaaccgacgucucuagcucagugaucacaagucugggggcaauuguauccuguuacggaaagacuaaaugcaccgcuagcaacaagaauagggguaucauuaagacauuuucuaacggcugugauuauguuucaaauaaagggguggacaccgucagugugggaaacacucuuuacuaugucaacaagcaagagggcaaaagccuguacgugaagggugaaccuauaaucaauuucuaugacccauugguuuuuccguccgaugaguucgacgccucuauuucgcagguuaacgagaaaaucaaucagagccucgcguuuauccggaaguccgaugaacuguuacacaacguaaaugucgggaagucaacgacaaacauuaugauaaccacuaucauuaucgugauuaucguuauacugcuacuccugaucgccgugggacuuuucuuguacugcaaagcacgcaguacccccgucacacugucuaaggaccagcucagcggcauuaauaacaucgcuuucuccaauugaggacuaguacuggcugcaucucccuuuccucuguccuccauccuucucccaggauggugaagggggaccugguacccagugauccccaccccaggauccuaaaucaugacuuaccugcuaauaaaaacucauuggaaaagugagaagaucuaaaaaaaaaaaaaaaaaaaaaaaaaaaaaaaaaaaaaaaaaaaaaaaaaaaaaaaaaaaaaaaaugcaucccccccccccccccccccccccccccccccaaaggcucuuuucagagccaccagaauu

SEQ ID NO: 13439 - RNA, 1964 nt, Artificial Sequence
  mRNA product Design f-3 comprising derived and/or modified sequence from HRSV(Memphis-37)__AIY60640.1__F_DSCav1_mut0 (opt4)
gggagagucccgcagucggcguccagcggcucugcuuguucgugugugugucguugcaggccuuauucaagcuuaccauggagcugcccauccugaagaccaacgccaucaccaccauccuggccgccgugacccugugcuucgccagcagccagaacaucaccgaggaguucuaccagagcaccugcagcgccgugagcaagggcuaccugagcgcccugagaaccggcugguacaccagcgugaucaccaucgagcugagcaacaucaaggagaacaagugcaacggcaccgacgccaaggugaagcugaucaagcaggagcuggacaaguacaagaacgccgugaccgagcugcagcugcugaugcagagcacccccgccgccggcagcggcagcgccaucgccagcggcaucgccgugugcaaggugcugcaccuggagggcgaggugaacaagaucaagaacgcccugcugagcaccaacaaggccguggugagccugagcaacggcgugagcgugcugaccuucaaggugcuggaccugaagaacuacaucgacaagcagcugcugcccauccugaacaagcagagcugcagcaucagcaacaucgagaccgugaucgaguuccagcagaagaacaacagacugcuggagaucaccagagaguucagcgugaacgccggcgugaccacccccgugagcaccuacaugcugaccaacagcgagcugcugagccugaucaacgacaugcccaucaccaacgaccagaagaagcugaugagcaacaacgugcagaucgugagacagcagagcuacagcaucaugugcaucaucaaggaggaggugcuggccuacguggugcagcugccccuguacggcgugaucgacacccccugcuggaagcugcacaccagcccccugugcaccaccaacaccaaggagggcagcaacaucugccugaccagaaccgacagaggcugguacugcgacaacgccggcagcgugagcuucuucccccaggccgagaccugcaaggugcagagcaacagaguguucugcgacaccaugaacagcagaacccugcccagcgaggugaaccugugcaacaucgacaucuucaaccccaaguacgacugcaagaucaugaccagcaagaccgacgugagcagcagcgugaucaccagccugggcgccaucgugagcugcuacggcaagaccaagugcaccgccagcaacaagaacagaggcaucaucaagaccuucagcaacggcugcgacuacgugagcaacaagggcguggacaccgugagcgugggcaacacccuguacuacgugaacaagcaggagggcaagagccuguacgugaagggcgagcccaucaucaacuucuacgacccccugguguuccccagcgacgaguucgacgccagcaucagccaggugaacgagaagaucaaccagagccuggccuucaucagaaagagcgacgagcugcugcacaacgugaacgugggcaagagcaccaccaacaucaugaucaccaccaucaucaucgugaucaucgugauccugcugcugcugaucgccgugggccuguuccuguacugcaaggccagaagcacccccgugacccugagcaaggaccagcugagcggcaucaacaacaucgccuucagcaacugaggacuaguacuggcugcaucucccuuuccucuguccuccauccuucucccaggauggugaagggggaccugguacccagugauccccaccccaggauccuaaaucaugacuuaccugcuaauaaaaacucauuggaaaagugagaagaucuaaaaaaaaaaaaaaaaaaaaaaaaaaaaaaaaaaaaaaaaaaaaaaaaaaaaaaaaaaaaaaaaugcaucccccccccccccccccccccccccccccccaaaggcucuuuucagagccaccagaauu

SEQ ID NO: 13440 - RNA, 1964 nt, Artificial Sequence
  mRNA product Design f-3 comprising derived and/or modified sequence from HRSV(Memphis-37)__AIY60640.1__F_DSCav1_mut0 (opt5)
gggagagucccgcagucggcguccagcggcucugcuuguucgugugugugucguugcaggccuuauucaagcuuaccauggagcugcccauccucaagaccaacgccauuacaacgauccuggcugccgugacccuuugcuucgcgagcucccagaauauuacagaagaguuuuaccaaucuaccuguagcgcugucuccaaaggcuaucugucugcccucagaacagggugguacaccagcguuaucacaauugaacuguccaacaucaaggagaauaaaugcaacggaaccgacgccaaggugaaacuuaucaagcaggaacuggauaaguauaaaaaugcugugacggagcuccagcugcugaugcagucuaccccugccgcuggcagcggguccgccauugcgagcggaaucgccgucuguaaggugcuccaccuggagggcgaaguuaacaaaauuaagaaugcccuucugucuacaaacaaagcuguggucucccucagcaauggggugucuguucugaccuucaaggugcuugaccugaagaacuacaucgauaaacaacuccugccgauucugaauaagcaguccugcagcaucucuaacauugagacagucaucgaauuucagcagaaaaauaaccggcuccuggagaucacccgcgaguucuccgugaaugcuggagugacgacacccgucagcaccuauaugcuuacaaacuccgaacugcucucucugauuaacgacaugccuaucaccaaugaucaaaagaaacuuaugagcaacaauguucagauugugagacagcaguccuacagcaucauguguauuaucaaggaggaagugcuggccuaugucgugcaacucccccuguacggcguuaucgacaccccuugcuggaaacugcauacaucuccccucuguacgaccaacacaaaggagggcuccaauauuugccugacccggacagaucgcgggugguacugugacaacgcgggaagcgugagcuuuuucccucaggccgaaaccugcaagguccagucuaauagaguguuuugugauacgaugaacuccagaacacugccgucugagguuaaucucugcaacaucgacauuuucaaucccaaauaugauugcaagaucaugaccagcaaaaccgacguguccagcucugucauuacaucccugggcgcuaucgugagcuguuacgggaagaccaaaugcacagccucuaacaagaaucggggaaucauuaagacguuuuccaacggcugugauuaugucagcaauaaagggguggacaccguuuccgugggaaacacacuuuacuaugucaacaagcaagagggcaaaucucuguacgugaagggcgaaccuaucauuaauuucuaugacccccucguuuuuccuagcgaugaguucgacgcuuccaucucucaggugaacgaaaagauuaaucagagccuggccuuuauccgcaaguccgaugagcugcuccacaacgucaauguggggaaaagcaccacaaacauuaugaucaccacgaucauuaucgugauuaucguuauucugcuucugcucaucgccgucggacuguuccuguacugcaaagcuagaucuacccccgugacacuuuccaaggaccagcucagcggcaucaauaacauugcguucucuaauugaggacuaguacuggcugcaucucccuuuccucuguccuccauccuucucccaggauggugaagggggaccugguacccagugauccccaccccaggauccuaaaucaugacuuaccugcuaauaaaaacucauuggaaaagugagaagaucuaaaaaaaaaaaaaaaaaaaaaaaaaaaaaaaaaaaaaaaaaaaaaaaaaaaaaaaaaaaaaaaaugcaucccccccccccccccccccccccccccccccaaaggcucuuuucagagccaccagaauu

SEQ ID NO: 13441 - RNA, 1964 nt, Artificial Sequence
  mRNA product Design f-3 comprising derived and/or modified sequence from HRSV(Memphis-37)__AIY60640.1__F_DSCav1_mut0 (opt6)
gggagagucccgcagucggcguccagcggcucugcuuguucgugugugugucguugcaggccuuauucaagcuuaccauggaauuaccaaucuuaaaaacaaacgccauaacaaccauccucgcagcaguaacccuaugcuuugcauccucacaaaacauaacugaagaauuuuaccaaucaacaugcucagcaguaucaaaaggauaucuaucagcccucagaacaggaugguacacaucagucauuacaaucgaacuuucaaacauaaaagaaaauaaauguaacggcacagaugccaaaguaaaauuaauuaaacaagaacuugacaaauacaaaaaugccguaacagaacuacaacuacuaaugcaaaguacuccugcugcaggaagcggaucugcaauagcaucagguauagcaguauguaaaguucuacaccuagaaggcgaaguaaacaaaauuaaaaacgcacuacucucaacaaauaaagcaguugucucccuaucaaacggaguaucaguauuaacuuucaaaguacuagaccucaaaaacuauauagacaaacaacuauuaccaauacuaaacaaacaaagcugcucuaucuccaacaucgaaacaguaauagaauuucaacaaaaaaauaauagacuacuugaaauaaccagagaauuuucaguaaacgccggaguaacaacaccaguaucaacuuacaugcuaacaaacuccgaacuacuaucauuaauaaacgacaugcccauaacaaacgaccaaaaaaaauuaaugucaaacaacguccaaaucguacgacaacaauccuauuccauaauguguauaauaaaagaagaaguacuagcauacguaguacaauuaccauuauauggaguaauagauaccccuugcuggaaacuacacacaucaccccuaugcacuacaaauacgaaagaagguucaaauauaugcuuaacuagaaccgauagagguugguauugugacaacgcuggaucaguaucauuuuucccacaagcagaaacaugcaaaguacaaucaaacagaguauuuugcgacacuaugaacucaagaacuuuaccauccgaaguuaaucuauguaacauagauauauuuaacccaaaauacgacugcaaaauaaugacaucaaaaacagauguaucaucaucaguuauaaccucccucggagcaauaguaucaugcuauggaaaaacaaaaugcacagcaucaaacaaaaaucguggaauuauaaaaacauucucaaacggcugugacuacgucagcaauaaaggaguagacacagucucaguaggaaacacuuuauacuauguuaacaaacaagaaggaaaaucacucuacgucaaaggcgaaccaauaauaaauuucuaugacccacucguauucccauccgacgaauuugacgcaucaauaucacaaguaaaugaaaaaauaaaccaaagccuagcauuuauacgaaaaucagacgaacuacuacacaacguaaacguagguaaaagcacaaccaauauaaugauaacaacaauaaucauaguaauaaucguaauauuacuauuacuaauagcuguaggauuguuccuauacugcaaagcaagaucaacaccaguaaccuuaucuaaggaccaacuaucaggaaucaauaacauugccuucucaaacuaaggacuaguacuggcugcaucucccuuuccucuguccuccauccuucucccaggauggugaagggggaccugguacccagugauccccaccccaggauccuaaaucaugacuuaccugcuaauaaaaacucauuggaaaagugagaagaucuaaaaaaaaaaaaaaaaaaaaaaaaaaaaaaaaaaaaaaaaaaaaaaaaaaaaaaaaaaaaaaaaugcaucccccccccccccccccccccccccccccccaaaggcucuuuucagagccaccagaauu

SEQ ID NO: 13442 - RNA, 1964 nt, Artificial Sequence
  mRNA product Design f-3 comprising derived and/or modified sequence from HRSV(Memphis-37)__AIY60640.1__F_DSCav1_mut0 (opt11)
gggagagucccgcagucggcguccagcggcucugcuuguucgugugugugucguugcaggccuuauucaagcuuaccauggaacuaccuauccuuaaaaccaacgcaaucaccaccauccuugccgcagucacacucugcuucgcauccucacagaacaucaccgaagaguucuaucaaucaaccugcuccgccguauccaaaggauaccucucagcccuccgcaccggcugguauaccucagucauaacaaucgaauuaucaaauaucaaggagaacaaaugcaacggcaccgacgccaaagucaaacucauaaaacaagaacuagacaaauacaaaaacgccgugacagaacuccaacuccucaugcaguccacccccgcagccggauccggcucagcaaucgccucgggcauugcaguaugcaaaguccuccaccucgaaggcgaagucaacaaaaucaaaaacgcccuccucuccaccaacaaagccgucgucucccucuccaacggcguaucuguccucacuuucaagguccucgaccucaaaaacuacaucgacaagcaacuacuuccaauccucaacaagcaauccugcucaaucucaaacaucgaaaccguaauagaguuccaacaaaagaacaaccgccuccucgaaaucacccgcgaguucuccguuaacgccggugucacuaccccagucagcaccuacaugcucaccaacuccgaacuccuuucucugaucaacgacaugccaaucaccaacgaucaaaagaaauuaauguccaacaacguccagaucguccgccaacaaagcuacagcaucaugugcaucauaaaagaagaaguacuugcguacguaguucaacuaccccuuuacggcguaaucgacaccccaugcuggaaacuccacaccuccccacuaugcaccaccaacaccaaagaaggauccaacaucugccuaacccgcaccgaccgcggcugguacugcgacaacgcugggagcgucucauucuucccacaagcagaaaccugcaaaguccaaucgaaccgcguauucugcgacaccaugaacuccagaacccuaccaagcgaagucaaucuuugcaacaucgacauauuuaaccccaaauacgacugcaaaaucaugacaucaaagaccgacgucucaucuucagucauuaccucacucggcgcaauugucagcugcuacggaaagaccaaauguaccgccuccaauaaaaaccguggaaucauaaaaaccuuuagcaacggcugcgacuacgucuccaacaaaggagucgacaccgucuccgucggcaacacccucuacuacgucaacaaacaagaaggaaaaucccucuacgugaaaggcgaacccauaauaaacuucuacgacccccuagucuuccccucugacgaguucgacgccuccaucucccaagucaacgaaaagauaaaucaaucacuagccuucauacgcaaaucugacgaacuucuccacaacgucaacgucggcaaauccaccaccaacauaaugaucacaacgauaauaaucgugaucauaguaauccuacuucuccucaucgcaguaggucuauuccuauacugcaaagcccgcagcacccccgucacccuaucaaaagaccaacucuccggcaucaacaacaucgccuucucaaacuaaggacuaguacuggcugcaucucccuuuccucuguccuccauccuucucccaggauggugaagggggaccugguacccagugauccccaccccaggauccuaaaucaugacuuaccugcuaauaaaaacucauuggaaaagugagaagaucuaaaaaaaaaaaaaaaaaaaaaaaaaaaaaaaaaaaaaaaaaaaaaaaaaaaaaaaaaaaaaaaaugcaucccccccccccccccccccccccccccccccaaaggcucuuuucagagccaccagaauu

SEQ ID NO: 13443 - RNA, 2180 nt, Artificial Sequence
  mRNA product Design f-4 comprising derived and/or modified sequence from HRSV(Memphis-37)__AIY60640.1__F_DSCav1_mut0 (opt1)
gggagagucccgcagucggcguccagcggcucugcuuguucgugugugugucguugcaggccuuauucaagcuuaccauggagcugcccauccucaagaccaacgccaucaccacgauccuggccgcggugacccugugcuucgccagcucccagaacaucaccgaggaguucuaccagagcacgugcuccgccgucagcaagggcuaccucuccgcccugcgcaccgggugguacaccagcgugaucaccaucgagcuguccaacaucaaggagaacaagugcaacggcaccgacgccaaggugaagcucaucaagcaggagcuggacaaguacaagaacgcggucacggagcugcagcuccugaugcagagcaccccggccgccggcuccgggagcgcgaucgccuccggcaucgccgucugcaaggugcugcaccucgagggcgaggugaacaagaucaagaacgcccugcuguccaccaacaaggccgucgugagccucuccaacggggugagcguccugaccuucaaggugcuggaccucaagaacuacaucgacaagcagcugcugcccauccugaacaagcagagcugcuccaucagcaacaucgagaccgucaucgaguuccagcagaagaacaaccgccuccuggagaucacgcgggaguucagcgugaacgcgggcgugaccacccccgucuccaccuacaugcugacgaacagcgagcuccugucccugaucaacgacaugccgaucaccaacgaccagaagaagcucaugagcaacaacgugcagaucgugcgccagcaguccuacagcaucaugugcaucaucaaggaggagguccuggccuacguggugcagcugccccucuacggggucaucgacacccccugcuggaagcugcacaccagcccccugugcacgaccaacaccaaggagggcuccaacaucugccucacccggacggaccgcgggugguacugcgacaacgccggcagcguguccuucuucccgcaggccgagaccugcaagguccagagcaaccggguguucugcgacaccaugaacucccggacccugcccagcgaggugaaccucugcaacaucgacaucuucaaccccaaguacgacugcaagaucaugacguccaagaccgacgucagcuccagcgugaucaccucccugggcgccaucgugagcugcuacgggaagaccaagugcacggcgagcaacaagaaccgcggcaucaucaagaccuucuccaacgggugcgacuacgucagcaacaagggcguggacaccguguccgucggcaacacccuguacuacgugaacaagcaggagggcaagagccucuacgugaagggggagcccaucaucaacuucuacgacccgcuggucuuccccuccgacgaguucgacgccagcaucucccaggugaacgagaagaucaaccagagccuggccuucauccggaaguccgacgagcuccugcacaacgugaacgucggcaagagcaccacgaacaucaugaucaccaccaucaucaucgugaucaucgugauccugcugcuccugaucgccgucgggcuguuccucuacugcaaggcccgcuccacccccgugacgcugagcaaggaccagcuguccgggaucaacaacaucgcguucagcaacugaggacuagugaagggaacacccaaauuuaauucagccuuaagcacaauuaauuaagagugaaacguaauuguacaagcaguuggucacccaccauagggcaugaucaacaccgcaaccuuuccuuuuucccccagugauucugaaaaaccccucuucccuucagcuugcuuagauguuccaaauuuaguaagcuuaaggcggccuacagaagaaaaagaaaaaaaaggccacaaaaguucccucucacuuucaguaaauaaaauaaaagcagcaacagaaauaaagaaauaaaugaaauucaaaaugaaauaaauauuguguugugcagcauuaaaaaaucaauaaaaauuaaaaaugagcaagaucuaaaaaaaaaaaaaaaaaaaaaaaaaaaaaaaaaaaaaaaaaaaaaaaaaaaaaaaaaaaaaaaaugcaucccccccccccccccccccccccccccccccaaaggcucuuuucagagccaccagaauu

SEQ ID NO: 13444 - RNA, 2180 nt, Artificial Sequence
  mRNA product Design f-4 comprising derived and/or modified sequence from HRSV(Memphis-37)__AIY60640.1__F_DSCav1_mut0 (opt1)
gggagagucccgcagucggcguccagcggcucugcuuguucgugugugugucguugcaggccuuauucaagcuuaccauggagcugcccauccucaagaccaacgccaucaccacgauccuggccgcggugacccugugcuucgccagcucccagaacaucaccgaggaguucuaccagagcacgugcuccgccgucagcaagggcuaccucuccgcccugcgcaccgggugguacaccagcgugaucaccaucgagcuguccaacaucaaggagaacaagugcaacggcaccgacgccaaggugaagcucaucaagcaggagcuggacaaguacaagaacgcggucacggagcugcagcuccugaugcagagcaccccggccgccggguccggcagcgccaucgcguccgggaucgccgugugcaaggugcugcaccucgagggcgaggucaacaagaucaagaacgcccugcugagcaccaacaaggccguggugucccucagcaacggcgucuccgugcugaccuucaaggugcuggaccucaagaacuacaucgacaagcagcugcugcccauccucaacaagcagagcugcuccaucagcaacaucgagacggucaucgaguuccagcagaagaacaaccggcugcuggagaucacccgcgaguucuccgugaacgccggggugaccacccccgucagcacguacaugcucaccaacagcgagcugcugucccucaucaacgacaugcccaucaccaacgaccagaagaagcugaugagcaacaacgugcagaucgugcggcagcaguccuacagcaucaugugcaucaucaaggaggagguccuggcguacguggugcagcucccgcuguacggcgucaucgacacccccugcuggaagcugcacacgagcccccucugcaccaccaacaccaaggagggguccaacaucugccugacgcgcaccgaccggggcugguacugcgacaacgccggguccgugagcuucuucccccaggccgagaccugcaaggugcaguccaaccgcgucuucugcgacaccaugaacagccggacgcucccguccgaggugaaccugugcaacaucgacaucuucaaccccaaguacgacugcaagaucaugaccagcaagaccgacgucuccagcuccgugaucaccagccugggcgccaucguguccugcuacggcaagacgaagugcaccgccagcaacaagaaccgggggaucaucaagaccuucuccaacggcugcgacuacgucagcaacaaggggguggacaccgugagcgucggcaacacgcucuacuacgugaacaagcaggagggcaagucccuguacgugaagggggagcccaucaucaacuucuacgacccccuggucuucccgagcgacgaguucgacgcguccaucagccaggugaacgagaagaucaaccagucccucgccuucauccgcaagagcgacgagcugcugcacaacgugaacgucggcaaguccaccaccaacaucaugaucaccaccaucaucaucgugaucaucgugauccuccugcugcucaucgccgucgggcuguuccuguacugcaaggcccggagcacgcccgugacccuguccaaggaccagcucagcggcaucaacaacaucgccuucuccaacugaggacuagugaagggaacacccaaauuuaauucagccuuaagcacaauuaauuaagagugaaacguaauuguacaagcaguuggucacccaccauagggcaugaucaacaccgcaaccuuuccuuuuucccccagugauucugaaaaaccccucuucccuucagcuugcuuagauguuccaaauuuaguaagcuuaaggcggccuacagaagaaaaagaaaaaaaaggccacaaaaguucccucucacuuucaguaaauaaaauaaaagcagcaacagaaauaaagaaauaaaugaaauucaaaaugaaauaaauauuguguugugcagcauuaaaaaaucaauaaaaauuaaaaaugagcaagaucuaaaaaaaaaaaaaaaaaaaaaaaaaaaaaaaaaaaaaaaaaaaaaaaaaaaaaaaaaaaaaaaaugcaucccccccccccccccccccccccccccccccaaaggcucuuuucagagccaccagaauu

SEQ ID NO: 13445 - RNA, 2180 nt, Artificial Sequence
  mRNA product Design f-4 comprising derived and/or modified sequence from HRSV(Memphis-37)__AIY60640.1__F_DSCav1_mut0 (opt2)
gggagagucccgcagucggcguccagcggcucugcuuguucgugugugugucguugcaggccuuauucaagcuuaccauggagcuccccauccucaagaccaacgccaucaccaccauccucgccgccgucacccucugcuucgccuccucccagaacaucaccgaggaguucuaccaguccaccugcuccgccgucuccaagggcuaccucuccgcccuccgcaccggcugguacaccuccgucaucaccaucgagcucuccaacaucaaggagaacaagugcaacggcaccgacgccaaggucaagcucaucaagcaggagcucgacaaguacaagaacgccgucaccgagcuccagcuccucaugcaguccacccccgccgccggcuccggcuccgccaucgccuccggcaucgccgucugcaagguccuccaccucgagggcgaggucaacaagaucaagaacgcccuccucuccaccaacaaggccgucgucucccucuccaacggcgucuccguccucaccuucaagguccucgaccucaagaacuacaucgacaagcagcuccuccccauccucaacaagcaguccugcuccaucuccaacaucgagaccgucaucgaguuccagcagaagaacaaccgccuccucgagaucacccgcgaguucuccgucaacgccggcgucaccacccccgucuccaccuacaugcucaccaacuccgagcuccucucccucaucaacgacaugcccaucaccaacgaccagaagaagcucauguccaacaacguccagaucguccgccagcaguccuacuccaucaugugcaucaucaaggaggagguccucgccuacgucguccagcucccccucuacggcgucaucgacacccccugcuggaagcuccacaccuccccccucugcaccaccaacaccaaggagggcuccaacaucugccucacccgcaccgaccgcggcugguacugcgacaacgccggcuccgucuccuucuucccccaggccgagaccugcaagguccaguccaaccgcgucuucugcgacaccaugaacucccgcacccuccccuccgaggucaaccucugcaacaucgacaucuucaaccccaaguacgacugcaagaucaugaccuccaagaccgacgucuccuccuccgucaucaccucccucggcgccaucgucuccugcuacggcaagaccaagugcaccgccuccaacaagaaccgcggcaucaucaagaccuucuccaacggcugcgacuacgucuccaacaagggcgucgacaccgucuccgucggcaacacccucuacuacgucaacaagcaggagggcaagucccucuacgucaagggcgagcccaucaucaacuucuacgacccccucgucuuccccuccgacgaguucgacgccuccaucucccaggucaacgagaagaucaaccagucccucgccuucauccgcaaguccgacgagcuccuccacaacgucaacgucggcaaguccaccaccaacaucaugaucaccaccaucaucaucgucaucaucgucauccuccuccuccucaucgccgucggccucuuccucuacugcaaggcccgcuccacccccgucacccucuccaaggaccagcucuccggcaucaacaacaucgccuucuccaacugaggacuagugaagggaacacccaaauuuaauucagccuuaagcacaauuaauuaagagugaaacguaauuguacaagcaguuggucacccaccauagggcaugaucaacaccgcaaccuuuccuuuuucccccagugauucugaaaaaccccucuucccuucagcuugcuuagauguuccaaauuuaguaagcuuaaggcggccuacagaagaaaaagaaaaaaaaggccacaaaaguucccucucacuuucaguaaauaaaauaaaagcagcaacagaaauaaagaaauaaaugaaauucaaaaugaaauaaauauuguguugugcagcauuaaaaaaucaauaaaaauuaaaaaugagcaagaucuaaaaaaaaaaaaaaaaaaaaaaaaaaaaaaaaaaaaaaaaaaaaaaaaaaaaaaaaaaaaaaaaugcaucccccccccccccccccccccccccccccccaaaggcucuuuucagagccaccagaauu

SEQ ID NO: 13446 - RNA, 2180 nt, Artificial Sequence
  mRNA product Design f-4 comprising derived and/or modified sequence from HRSV(Memphis-37)__AIY60640.1__F_DSCav1_mut0 (opt3)
gggagagucccgcagucggcguccagcggcucugcuuguucgugugugugucguugcaggccuuauucaagcuuaccauggagcugcccauccucaagaccaacgccauuacaacuauacuugcugcagugacgcugugcuucgccagcucccagaauaucaccgaagaguuuuaccaaucuacauguucagcggucaguaaaggcuauuugagcgcuuuaagaacugggugguacaccuccguuauuacaaucgaacugucuaacauuaaggagaauaaaugcaacggaaccgacgccaaggugaaacuaaucaagcaggaacucgauaaguauaaaaaugcaguaacugagcugcagcuucugaugcagucgaccccugccgcugguucaggcagcgcaauagccagugggaucgcuguguguaaggucuugcaccucgagggagaagugaacaaaauuaagaaugcccugcuguccacaaacaaagcgguugugucucucagcaauggcgucuccguguuaacguucaagguacuggaccuuaagaacuacaucgauaaacaauugcugccaauucuaaauaagcagucaugcaguaucagcaacauagagacuguuauugaauuucagcagaaaaauaacaggcuccuggagaucacccgggaguucucugugaaugccggugucacaacuccgguguccaccuauaugcuuacaaacucagaacuguugagccucauuaacgacaugcccaucaccaaugaucaaaagaaacugaugaguaacaaugugcagaucguccgccagcagucuuacuccauuauguguauaaucaaggaggaaguuuuagcauaugugguacaacugccucucuacggggugauugacacgccaugcuggaaacuucauacuagcccccuguguacaaccaacacuaaggagggaucgaauaucugcuugacacgaaccgaucguggcugguacugugacaacgcuggcucugucuccuuuuucccucaggccgaaacgugcaaggugcagucaaauagaguguuuugugauaccaugaacaguagaacacugccaagcgaggugaaucucugcaacauagacauuuucaaucccaaauaugauugcaagaucaugacuuccaaaaccgacgucucuagcucagugaucacaagucugggggcaauuguauccuguuacggaaagacuaaaugcaccgcuagcaacaagaauagggguaucauuaagacauuuucuaacggcugugauuauguuucaaauaaagggguggacaccgucagugugggaaacacucuuuacuaugucaacaagcaagagggcaaaagccuguacgugaagggugaaccuauaaucaauuucuaugacccauugguuuuuccguccgaugaguucgacgccucuauuucgcagguuaacgagaaaaucaaucagagccucgcguuuauccggaaguccgaugaacuguuacacaacguaaaugucgggaagucaacgacaaacauuaugauaaccacuaucauuaucgugauuaucguuauacugcuacuccugaucgccgugggacuuuucuuguacugcaaagcacgcaguacccccgucacacugucuaaggaccagcucagcggcauuaauaacaucgcuuucuccaauugaggacuagugaagggaacacccaaauuuaauucagccuuaagcacaauuaauuaagagugaaacguaauuguacaagcaguuggucacccaccauagggcaugaucaacaccgcaaccuuuccuuuuucccccagugauucugaaaaaccccucuucccuucagcuugcuuagauguuccaaauuuaguaagcuuaaggcggccuacagaagaaaaagaaaaaaaaggccacaaaaguucccucucacuuucaguaaauaaaauaaaagcagcaacagaaauaaagaaauaaaugaaauucaaaaugaaauaaauauuguguugugcagcauuaaaaaaucaauaaaaauuaaaaaugagcaagaucuaaaaaaaaaaaaaaaaaaaaaaaaaaaaaaaaaaaaaaaaaaaaaaaaaaaaaaaaaaaaaaaaugcaucccccccccccccccccccccccccccccccaaaggcucuuuucagagccaccagaauu

SEQ ID NO: 13447 - RNA, 2180 nt, Artificial Sequence
  mRNA product Design f-4 comprising derived and/or modified sequence from HRSV(Memphis-37)__AIY60640.1__F_DSCav1_mut0 (opt4)
gggagagucccgcagucggcguccagcggcucugcuuguucgugugugugucguugcaggccuuauucaagcuuaccauggagcugcccauccugaagaccaacgccaucaccaccauccuggccgccgugacccugugcuucgccagcagccagaacaucaccgaggaguucuaccagagcaccugcagcgccgugagcaagggcuaccugagcgcccugagaaccggcugguacaccagcgugaucaccaucgagcugagcaacaucaaggagaacaagugcaacggcaccgacgccaaggugaagcugaucaagcaggagcuggacaaguacaagaacgccgugaccgagcugcagcugcugaugcagagcacccccgccgccggcagcggcagcgccaucgccagcggcaucgccgugugcaaggugcugcaccuggagggcgaggugaacaagaucaagaacgcccugcugagcaccaacaaggccguggugagccugagcaacggcgugagcgugcugaccuucaaggugcuggaccugaagaacuacaucgacaagcagcugcugcccauccugaacaagcagagcugcagcaucagcaacaucgagaccgugaucgaguuccagcagaagaacaacagacugcuggagaucaccagagaguucagcgugaacgccggcgugaccacccccgugagcaccuacaugcugaccaacagcgagcugcugagccugaucaacgacaugcccaucaccaacgaccagaagaagcugaugagcaacaacgugcagaucgugagacagcagagcuacagcaucaugugcaucaucaaggaggaggugcuggccuacguggugcagcugccccuguacggcgugaucgacacccccugcuggaagcugcacaccagcccccugugcaccaccaacaccaaggagggcagcaacaucugccugaccagaaccgacagaggcugguacugcgacaacgccggcagcgugagcuucuucccccaggccgagaccugcaaggugcagagcaacagaguguucugcgacaccaugaacagcagaacccugcccagcgaggugaaccugugcaacaucgacaucuucaaccccaaguacgacugcaagaucaugaccagcaagaccgacgugagcagcagcgugaucaccagccugggcgccaucgugagcugcuacggcaagaccaagugcaccgccagcaacaagaacagaggcaucaucaagaccuucagcaacggcugcgacuacgugagcaacaagggcguggacaccgugagcgugggcaacacccuguacuacgugaacaagcaggagggcaagagccuguacgugaagggcgagcccaucaucaacuucuacgacccccugguguuccccagcgacgaguucgacgccagcaucagccaggugaacgagaagaucaaccagagccuggccuucaucagaaagagcgacgagcugcugcacaacgugaacgugggcaagagcaccaccaacaucaugaucaccaccaucaucaucgugaucaucgugauccugcugcugcugaucgccgugggccuguuccuguacugcaaggccagaagcacccccgugacccugagcaaggaccagcugagcggcaucaacaacaucgccuucagcaacugaggacuagugaagggaacacccaaauuuaauucagccuuaagcacaauuaauuaagagugaaacguaauuguacaagcaguuggucacccaccauagggcaugaucaacaccgcaaccuuuccuuuuucccccagugauucugaaaaaccccucuucccuucagcuugcuuagauguuccaaauuuaguaagcuuaaggcggccuacagaagaaaaagaaaaaaaaggccacaaaaguucccucucacuuucaguaaauaaaauaaaagcagcaacagaaauaaagaaauaaaugaaauucaaaaugaaauaaauauuguguugugcagcauuaaaaaaucaauaaaaauuaaaaaugagcaagaucuaaaaaaaaaaaaaaaaaaaaaaaaaaaaaaaaaaaaaaaaaaaaaaaaaaaaaaaaaaaaaaaaugcaucccccccccccccccccccccccccccccccaaaggcucuuuucagagccaccagaauu

SEQ ID NO: 13448 - RNA, 2180 nt, Artificial Sequence
  mRNA product Design f-4 comprising derived and/or modified sequence from HRSV(Memphis-37)__AIY60640.1__F_DSCav1_mut0 (opt5)
gggagagucccgcagucggcguccagcggcucugcuuguucgugugugugucguugcaggccuuauucaagcuuaccauggagcugcccauccucaagaccaacgccauuacaacgauccuggcugccgugacccuuugcuucgcgagcucccagaauauuacagaagaguuuuaccaaucuaccuguagcgcugucuccaaaggcuaucugucugcccucagaacagggugguacaccagcguuaucacaauugaacuguccaacaucaaggagaauaaaugcaacggaaccgacgccaaggugaaacuuaucaagcaggaacuggauaaguauaaaaaugcugugacggagcuccagcugcugaugcagucuaccccugccgcuggcagcggguccgccauugcgagcggaaucgccgucuguaaggugcuccaccuggagggcgaaguuaacaaaauuaagaaugcccuucugucuacaaacaaagcuguggucucccucagcaauggggugucuguucugaccuucaaggugcuugaccugaagaacuacaucgauaaacaacuccugccgauucugaauaagcaguccugcagcaucucuaacauugagacagucaucgaauuucagcagaaaaauaaccggcuccuggagaucacccgcgaguucuccgugaaugcuggagugacgacacccgucagcaccuauaugcuuacaaacuccgaacugcucucucugauuaacgacaugccuaucaccaaugaucaaaagaaacuuaugagcaacaauguucagauugugagacagcaguccuacagcaucauguguauuaucaaggaggaagugcuggccuaugucgugcaacucccccuguacggcguuaucgacaccccuugcuggaaacugcauacaucuccccucuguacgaccaacacaaaggagggcuccaauauuugccugacccggacagaucgcgggugguacugugacaacgcgggaagcgugagcuuuuucccucaggccgaaaccugcaagguccagucuaauagaguguuuugugauacgaugaacuccagaacacugccgucugagguuaaucucugcaacaucgacauuuucaaucccaaauaugauugcaagaucaugaccagcaaaaccgacguguccagcucugucauuacaucccugggcgcuaucgugagcuguuacgggaagaccaaaugcacagccucuaacaagaaucggggaaucauuaagacguuuuccaacggcugugauuaugucagcaauaaagggguggacaccguuuccgugggaaacacacuuuacuaugucaacaagcaagagggcaaaucucuguacgugaagggcgaaccuaucauuaauuucuaugacccccucguuuuuccuagcgaugaguucgacgcuuccaucucucaggugaacgaaaagauuaaucagagccuggccuuuauccgcaaguccgaugagcugcuccacaacgucaauguggggaaaagcaccacaaacauuaugaucaccacgaucauuaucgugauuaucguuauucugcuucugcucaucgccgucggacuguuccuguacugcaaagcuagaucuacccccgugacacuuuccaaggaccagcucagcggcaucaauaacauugcguucucuaauugaggacuagugaagggaacacccaaauuuaauucagccuuaagcacaauuaauuaagagugaaacguaauuguacaagcaguuggucacccaccauagggcaugaucaacaccgcaaccuuuccuuuuucccccagugauucugaaaaaccccucuucccuucagcuugcuuagauguuccaaauuuaguaagcuuaaggcggccuacagaagaaaaagaaaaaaaaggccacaaaaguucccucucacuuucaguaaauaaaauaaaagcagcaacagaaauaaagaaauaaaugaaauucaaaaugaaauaaauauuguguugugcagcauuaaaaaaucaauaaaaauuaaaaaugagcaagaucuaaaaaaaaaaaaaaaaaaaaaaaaaaaaaaaaaaaaaaaaaaaaaaaaaaaaaaaaaaaaaaaaugcaucccccccccccccccccccccccccccccccaaaggcucuuuucagagccaccagaauu

SEQ ID NO: 13449 - RNA, 2180 nt, Artificial Sequence
  mRNA product Design f-4 comprising derived and/or modified sequence from HRSV(Memphis-37)__AIY60640.1__F_DSCav1_mut0 (opt6)
gggagagucccgcagucggcguccagcggcucugcuuguucgugugugugucguugcaggccuuauucaagcuuaccauggaauuaccaaucuuaaaaacaaacgccauaacaaccauccucgcagcaguaacccuaugcuuugcauccucacaaaacauaacugaagaauuuuaccaaucaacaugcucagcaguaucaaaaggauaucuaucagcccucagaacaggaugguacacaucagucauuacaaucgaacuuucaaacauaaaagaaaauaaauguaacggcacagaugccaaaguaaaauuaauuaaacaagaacuugacaaauacaaaaaugccguaacagaacuacaacuacuaaugcaaaguacuccugcugcaggaagcggaucugcaauagcaucagguauagcaguauguaaaguucuacaccuagaaggcgaaguaaacaaaauuaaaaacgcacuacucucaacaaauaaagcaguugucucccuaucaaacggaguaucaguauuaacuuucaaaguacuagaccucaaaaacuauauagacaaacaacuauuaccaauacuaaacaaacaaagcugcucuaucuccaacaucgaaacaguaauagaauuucaacaaaaaaauaauagacuacuugaaauaaccagagaauuuucaguaaacgccggaguaacaacaccaguaucaacuuacaugcuaacaaacuccgaacuacuaucauuaauaaacgacaugcccauaacaaacgaccaaaaaaaauuaaugucaaacaacguccaaaucguacgacaacaauccuauuccauaauguguauaauaaaagaagaaguacuagcauacguaguacaauuaccauuauauggaguaauagauaccccuugcuggaaacuacacacaucaccccuaugcacuacaaauacgaaagaagguucaaauauaugcuuaacuagaaccgauagagguugguauugugacaacgcuggaucaguaucauuuuucccacaagcagaaacaugcaaaguacaaucaaacagaguauuuugcgacacuaugaacucaagaacuuuaccauccgaaguuaaucuauguaacauagauauauuuaacccaaaauacgacugcaaaauaaugacaucaaaaacagauguaucaucaucaguuauaaccucccucggagcaauaguaucaugcuauggaaaaacaaaaugcacagcaucaaacaaaaaucguggaauuauaaaaacauucucaaacggcugugacuacgucagcaauaaaggaguagacacagucucaguaggaaacacuuuauacuauguuaacaaacaagaaggaaaaucacucuacgucaaaggcgaaccaauaauaaauuucuaugacccacucguauucccauccgacgaauuugacgcaucaauaucacaaguaaaugaaaaaauaaaccaaagccuagcauuuauacgaaaaucagacgaacuacuacacaacguaaacguagguaaaagcacaaccaauauaaugauaacaacaauaaucauaguaauaaucguaauauuacuauuacuaauagcuguaggauuguuccuauacugcaaagcaagaucaacaccaguaaccuuaucuaaggaccaacuaucaggaaucaauaacauugccuucucaaacuaaggacuagugaagggaacacccaaauuuaauucagccuuaagcacaauuaauuaagagugaaacguaauuguacaagcaguuggucacccaccauagggcaugaucaacaccgcaaccuuuccuuuuucccccagugauucugaaaaaccccucuucccuucagcuugcuuagauguuccaaauuuaguaagcuuaaggcggccuacagaagaaaaagaaaaaaaaggccacaaaaguucccucucacuuucaguaaauaaaauaaaagcagcaacagaaauaaagaaauaaaugaaauucaaaaugaaauaaauauuguguugugcagcauuaaaaaaucaauaaaaauuaaaaaugagcaagaucuaaaaaaaaaaaaaaaaaaaaaaaaaaaaaaaaaaaaaaaaaaaaaaaaaaaaaaaaaaaaaaaaugcaucccccccccccccccccccccccccccccccaaaggcucuuuucagagccaccagaauu

SEQ ID NO: 13450 - RNA, 2180 nt, Artificial Sequence
  mRNA product Design f-4 comprising derived and/or modified sequence from HRSV(Memphis-37)__AIY60640.1__F_DSCav1_mut0 (opt11)
gggagagucccgcagucggcguccagcggcucugcuuguucgugugugugucguugcaggccuuauucaagcuuaccauggaacuaccuauccuuaaaaccaacgcaaucaccaccauccuugccgcagucacacucugcuucgcauccucacagaacaucaccgaagaguucuaucaaucaaccugcuccgccguauccaaaggauaccucucagcccuccgcaccggcugguauaccucagucauaacaaucgaauuaucaaauaucaaggagaacaaaugcaacggcaccgacgccaaagucaaacucauaaaacaagaacuagacaaauacaaaaacgccgugacagaacuccaacuccucaugcaguccacccccgcagccggauccggcucagcaaucgccucgggcauugcaguaugcaaaguccuccaccucgaaggcgaagucaacaaaaucaaaaacgcccuccucuccaccaacaaagccgucgucucccucuccaacggcguaucuguccucacuuucaagguccucgaccucaaaaacuacaucgacaagcaacuacuuccaauccucaacaagcaauccugcucaaucucaaacaucgaaaccguaauagaguuccaacaaaagaacaaccgccuccucgaaaucacccgcgaguucuccguuaacgccggugucacuaccccagucagcaccuacaugcucaccaacuccgaacuccuuucucugaucaacgacaugccaaucaccaacgaucaaaagaaauuaauguccaacaacguccagaucguccgccaacaaagcuacagcaucaugugcaucauaaaagaagaaguacuugcguacguaguucaacuaccccuuuacggcguaaucgacaccccaugcuggaaacuccacaccuccccacuaugcaccaccaacaccaaagaaggauccaacaucugccuaacccgcaccgaccgcggcugguacugcgacaacgcugggagcgucucauucuucccacaagcagaaaccugcaaaguccaaucgaaccgcguauucugcgacaccaugaacuccagaacccuaccaagcgaagucaaucuuugcaacaucgacauauuuaaccccaaauacgacugcaaaaucaugacaucaaagaccgacgucucaucuucagucauuaccucacucggcgcaauugucagcugcuacggaaagaccaaauguaccgccuccaauaaaaaccguggaaucauaaaaaccuuuagcaacggcugcgacuacgucuccaacaaaggagucgacaccgucuccgucggcaacacccucuacuacgucaacaaacaagaaggaaaaucccucuacgugaaaggcgaacccauaauaaacuucuacgacccccuagucuuccccucugacgaguucgacgccuccaucucccaagucaacgaaaagauaaaucaaucacuagccuucauacgcaaaucugacgaacuucuccacaacgucaacgucggcaaauccaccaccaacauaaugaucacaacgauaauaaucgugaucauaguaauccuacuucuccucaucgcaguaggucuauuccuauacugcaaagcccgcagcacccccgucacccuaucaaaagaccaacucuccggcaucaacaacaucgccuucucaaacuaaggacuagugaagggaacacccaaauuuaauucagccuuaagcacaauuaauuaagagugaaacguaauuguacaagcaguuggucacccaccauagggcaugaucaacaccgcaaccuuuccuuuuucccccagugauucugaaaaaccccucuucccuucagcuugcuuagauguuccaaauuuaguaagcuuaaggcggccuacagaagaaaaagaaaaaaaaggccacaaaaguucccucucacuuucaguaaauaaaauaaaagcagcaacagaaauaaagaaauaaaugaaauucaaaaugaaauaaauauuguguugugcagcauuaaaaaaucaauaaaaauuaaaaaugagcaagaucuaaaaaaaaaaaaaaaaaaaaaaaaaaaaaaaaaaaaaaaaaaaaaaaaaaaaaaaaaaaaaaaaugcaucccccccccccccccccccccccccccccccaaaggcucuuuucagagccaccagaauu

SEQ ID NO: 13451 - RNA, 1956 nt, Artificial Sequence
  mRNA product Design f-5 comprising derived and/or modified sequence from HRSV(Memphis-37)__AIY60640.1__F_DSCav1_mut0 (opt1)
gggagacuuucccauucuguagcagaauuugguguugccuguggucuuggucccgcggagaagcuuaccauggagcugcccauccucaagaccaacgccaucaccacgauccuggccgcggugacccugugcuucgccagcucccagaacaucaccgaggaguucuaccagagcacgugcuccgccgucagcaagggcuaccucuccgcccugcgcaccgggugguacaccagcgugaucaccaucgagcuguccaacaucaaggagaacaagugcaacggcaccgacgccaaggugaagcucaucaagcaggagcuggacaaguacaagaacgcggucacggagcugcagcuccugaugcagagcaccccggccgccggcuccgggagcgcgaucgccuccggcaucgccgucugcaaggugcugcaccucgagggcgaggugaacaagaucaagaacgcccugcuguccaccaacaaggccgucgugagccucuccaacggggugagcguccugaccuucaaggugcuggaccucaagaacuacaucgacaagcagcugcugcccauccugaacaagcagagcugcuccaucagcaacaucgagaccgucaucgaguuccagcagaagaacaaccgccuccuggagaucacgcgggaguucagcgugaacgcgggcgugaccacccccgucuccaccuacaugcugacgaacagcgagcuccugucccugaucaacgacaugccgaucaccaacgaccagaagaagcucaugagcaacaacgugcagaucgugcgccagcaguccuacagcaucaugugcaucaucaaggaggagguccuggccuacguggugcagcugccccucuacggggucaucgacacccccugcuggaagcugcacaccagcccccugugcacgaccaacaccaaggagggcuccaacaucugccucacccggacggaccgcgggugguacugcgacaacgccggcagcguguccuucuucccgcaggccgagaccugcaagguccagagcaaccggguguucugcgacaccaugaacucccggacccugcccagcgaggugaaccucugcaacaucgacaucuucaaccccaaguacgacugcaagaucaugacguccaagaccgacgucagcuccagcgugaucaccucccugggcgccaucgugagcugcuacgggaagaccaagugcacggcgagcaacaagaaccgcggcaucaucaagaccuucuccaacgggugcgacuacgucagcaacaagggcguggacaccguguccgucggcaacacccuguacuacgugaacaagcaggagggcaagagccucuacgugaagggggagcccaucaucaacuucuacgacccgcuggucuuccccuccgacgaguucgacgccagcaucucccaggugaacgagaagaucaaccagagccuggccuucauccggaaguccgacgagcuccugcacaacgugaacgucggcaagagcaccacgaacaucaugaucaccaccaucaucaucgugaucaucgugauccugcugcuccugaucgccgucgggcuguuccucuacugcaaggcccgcuccacccccgugacgcugagcaaggaccagcuguccgggaucaacaacaucgcguucagcaacugaggacuaguacuggcugcaucucccuuuccucuguccuccauccuucucccaggauggugaagggggaccugguacccagugauccccaccccaggauccuaaaucaugacuuaccugcuaauaaaaacucauuggaaaagugagaagaucuaaaaaaaaaaaaaaaaaaaaaaaaaaaaaaaaaaaaaaaaaaaaaaaaaaaaaaaaaaaaaaaaugcaucccccccccccccccccccccccccccccccaaaggcucuuuucagagccaccagaauu

SEQ ID NO: 13452 - RNA, 1956 nt, Artificial Sequence
  mRNA product Design f-5 comprising derived and/or modified sequence from HRSV(Memphis-37)__AIY60640.1__F_DSCav1_mut0 (opt1)
gggagacuuucccauucuguagcagaauuugguguugccuguggucuuggucccgcggagaagcuuaccauggagcugcccauccucaagaccaacgccaucaccacgauccuggccgcggugacccugugcuucgccagcucccagaacaucaccgaggaguucuaccagagcacgugcuccgccgucagcaagggcuaccucuccgcccugcgcaccgggugguacaccagcgugaucaccaucgagcuguccaacaucaaggagaacaagugcaacggcaccgacgccaaggugaagcucaucaagcaggagcuggacaaguacaagaacgcggucacggagcugcagcuccugaugcagagcaccccggccgccggguccggcagcgccaucgcguccgggaucgccgugugcaaggugcugcaccucgagggcgaggucaacaagaucaagaacgcccugcugagcaccaacaaggccguggugucccucagcaacggcgucuccgugcugaccuucaaggugcuggaccucaagaacuacaucgacaagcagcugcugcccauccucaacaagcagagcugcuccaucagcaacaucgagacggucaucgaguuccagcagaagaacaaccggcugcuggagaucacccgcgaguucuccgugaacgccggggugaccacccccgucagcacguacaugcucaccaacagcgagcugcugucccucaucaacgacaugcccaucaccaacgaccagaagaagcugaugagcaacaacgugcagaucgugcggcagcaguccuacagcaucaugugcaucaucaaggaggagguccuggcguacguggugcagcucccgcuguacggcgucaucgacacccccugcuggaagcugcacacgagcccccucugcaccaccaacaccaaggagggguccaacaucugccugacgcgcaccgaccggggcugguacugcgacaacgccggguccgugagcuucuucccccaggccgagaccugcaaggugcaguccaaccgcgucuucugcgacaccaugaacagccggacgcucccguccgaggugaaccugugcaacaucgacaucuucaaccccaaguacgacugcaagaucaugaccagcaagaccgacgucuccagcuccgugaucaccagccugggcgccaucguguccugcuacggcaagacgaagugcaccgccagcaacaagaaccgggggaucaucaagaccuucuccaacggcugcgacuacgucagcaacaaggggguggacaccgugagcgucggcaacacgcucuacuacgugaacaagcaggagggcaagucccuguacgugaagggggagcccaucaucaacuucuacgacccccuggucuucccgagcgacgaguucgacgcguccaucagccaggugaacgagaagaucaaccagucccucgccuucauccgcaagagcgacgagcugcugcacaacgugaacgucggcaaguccaccaccaacaucaugaucaccaccaucaucaucgugaucaucgugauccuccugcugcucaucgccgucgggcuguuccuguacugcaaggcccggagcacgcccgugacccuguccaaggaccagcucagcggcaucaacaacaucgccuucuccaacugaggacuaguacuggcugcaucucccuuuccucuguccuccauccuucucccaggauggugaagggggaccugguacccagugauccccaccccaggauccuaaaucaugacuuaccugcuaauaaaaacucauuggaaaagugagaagaucuaaaaaaaaaaaaaaaaaaaaaaaaaaaaaaaaaaaaaaaaaaaaaaaaaaaaaaaaaaaaaaaaugcaucccccccccccccccccccccccccccccccaaaggcucuuuucagagccaccagaauu

SEQ ID NO: 13453 - RNA, 1956 nt, Artificial Sequence
  mRNA product Design f-5 comprising derived and/or modified sequence from HRSV(Memphis-37)__AIY60640.1__F_DSCav1_mut0 (opt2)
gggagacuuucccauucuguagcagaauuugguguugccuguggucuuggucccgcggagaagcuuaccauggagcuccccauccucaagaccaacgccaucaccaccauccucgccgccgucacccucugcuucgccuccucccagaacaucaccgaggaguucuaccaguccaccugcuccgccgucuccaagggcuaccucuccgcccuccgcaccggcugguacaccuccgucaucaccaucgagcucuccaacaucaaggagaacaagugcaacggcaccgacgccaaggucaagcucaucaagcaggagcucgacaaguacaagaacgccgucaccgagcuccagcuccucaugcaguccacccccgccgccggcuccggcuccgccaucgccuccggcaucgccgucugcaagguccuccaccucgagggcgaggucaacaagaucaagaacgcccuccucuccaccaacaaggccgucgucucccucuccaacggcgucuccguccucaccuucaagguccucgaccucaagaacuacaucgacaagcagcuccuccccauccucaacaagcaguccugcuccaucuccaacaucgagaccgucaucgaguuccagcagaagaacaaccgccuccucgagaucacccgcgaguucuccgucaacgccggcgucaccacccccgucuccaccuacaugcucaccaacuccgagcuccucucccucaucaacgacaugcccaucaccaacgaccagaagaagcucauguccaacaacguccagaucguccgccagcaguccuacuccaucaugugcaucaucaaggaggagguccucgccuacgucguccagcucccccucuacggcgucaucgacacccccugcuggaagcuccacaccuccccccucugcaccaccaacaccaaggagggcuccaacaucugccucacccgcaccgaccgcggcugguacugcgacaacgccggcuccgucuccuucuucccccaggccgagaccugcaagguccaguccaaccgcgucuucugcgacaccaugaacucccgcacccuccccuccgaggucaaccucugcaacaucgacaucuucaaccccaaguacgacugcaagaucaugaccuccaagaccgacgucuccuccuccgucaucaccucccucggcgccaucgucuccugcuacggcaagaccaagugcaccgccuccaacaagaaccgcggcaucaucaagaccuucuccaacggcugcgacuacgucuccaacaagggcgucgacaccgucuccgucggcaacacccucuacuacgucaacaagcaggagggcaagucccucuacgucaagggcgagcccaucaucaacuucuacgacccccucgucuuccccuccgacgaguucgacgccuccaucucccaggucaacgagaagaucaaccagucccucgccuucauccgcaaguccgacgagcuccuccacaacgucaacgucggcaaguccaccaccaacaucaugaucaccaccaucaucaucgucaucaucgucauccuccuccuccucaucgccgucggccucuuccucuacugcaaggcccgcuccacccccgucacccucuccaaggaccagcucuccggcaucaacaacaucgccuucuccaacugaggacuaguacuggcugcaucucccuuuccucuguccuccauccuucucccaggauggugaagggggaccugguacccagugauccccaccccaggauccuaaaucaugacuuaccugcuaauaaaaacucauuggaaaagugagaagaucuaaaaaaaaaaaaaaaaaaaaaaaaaaaaaaaaaaaaaaaaaaaaaaaaaaaaaaaaaaaaaaaaugcaucccccccccccccccccccccccccccccccaaaggcucuuuucagagccaccagaauu

SEQ ID NO: 13454 - RNA, 1956 nt, Artificial Sequence
  mRNA product Design f-5 comprising derived and/or modified sequence from HRSV(Memphis-37)__AIY60640.1__F_DSCav1_mut0 (opt3)
gggagacuuucccauucuguagcagaauuugguguugccuguggucuuggucccgcggagaagcuuaccauggagcugcccauccucaagaccaacgccauuacaacuauacuugcugcagugacgcugugcuucgccagcucccagaauaucaccgaagaguuuuaccaaucuacauguucagcggucaguaaaggcuauuugagcgcuuuaagaacugggugguacaccuccguuauuacaaucgaacugucuaacauuaaggagaauaaaugcaacggaaccgacgccaaggugaaacuaaucaagcaggaacucgauaaguauaaaaaugcaguaacugagcugcagcuucugaugcagucgaccccugccgcugguucaggcagcgcaauagccagugggaucgcuguguguaaggucuugcaccucgagggagaagugaacaaaauuaagaaugcccugcuguccacaaacaaagcgguugugucucucagcaauggcgucuccguguuaacguucaagguacuggaccuuaagaacuacaucgauaaacaauugcugccaauucuaaauaagcagucaugcaguaucagcaacauagagacuguuauugaauuucagcagaaaaauaacaggcuccuggagaucacccgggaguucucugugaaugccggugucacaacuccgguguccaccuauaugcuuacaaacucagaacuguugagccucauuaacgacaugcccaucaccaaugaucaaaagaaacugaugaguaacaaugugcagaucguccgccagcagucuuacuccauuauguguauaaucaaggaggaaguuuuagcauaugugguacaacugccucucuacggggugauugacacgccaugcuggaaacuucauacuagcccccuguguacaaccaacacuaaggagggaucgaauaucugcuugacacgaaccgaucguggcugguacugugacaacgcuggcucugucuccuuuuucccucaggccgaaacgugcaaggugcagucaaauagaguguuuugugauaccaugaacaguagaacacugccaagcgaggugaaucucugcaacauagacauuuucaaucccaaauaugauugcaagaucaugacuuccaaaaccgacgucucuagcucagugaucacaagucugggggcaauuguauccuguuacggaaagacuaaaugcaccgcuagcaacaagaauagggguaucauuaagacauuuucuaacggcugugauuauguuucaaauaaagggguggacaccgucagugugggaaacacucuuuacuaugucaacaagcaagagggcaaaagccuguacgugaagggugaaccuauaaucaauuucuaugacccauugguuuuuccguccgaugaguucgacgccucuauuucgcagguuaacgagaaaaucaaucagagccucgcguuuauccggaaguccgaugaacuguuacacaacguaaaugucgggaagucaacgacaaacauuaugauaaccacuaucauuaucgugauuaucguuauacugcuacuccugaucgccgugggacuuuucuuguacugcaaagcacgcaguacccccgucacacugucuaaggaccagcucagcggcauuaauaacaucgcuuucuccaauugaggacuaguacuggcugcaucucccuuuccucuguccuccauccuucucccaggauggugaagggggaccugguacccagugauccccaccccaggauccuaaaucaugacuuaccugcuaauaaaaacucauuggaaaagugagaagaucuaaaaaaaaaaaaaaaaaaaaaaaaaaaaaaaaaaaaaaaaaaaaaaaaaaaaaaaaaaaaaaaaugcaucccccccccccccccccccccccccccccccaaaggcucuuuucagagccaccagaauu

SEQ ID NO: 13455 - RNA, 1956 nt, Artificial Sequence
  mRNA product Design f-5 comprising derived and/or modified sequence from HRSV(Memphis-37)__AIY60640.1__F_DSCav1_mut0 (opt4)
gggagacuuucccauucuguagcagaauuugguguugccuguggucuuggucccgcggagaagcuuaccauggagcugcccauccugaagaccaacgccaucaccaccauccuggccgccgugacccugugcuucgccagcagccagaacaucaccgaggaguucuaccagagcaccugcagcgccgugagcaagggcuaccugagcgcccugagaaccggcugguacaccagcgugaucaccaucgagcugagcaacaucaaggagaacaagugcaacggcaccgacgccaaggugaagcugaucaagcaggagcuggacaaguacaagaacgccgugaccgagcugcagcugcugaugcagagcacccccgccgccggcagcggcagcgccaucgccagcggcaucgccgugugcaaggugcugcaccuggagggcgaggugaacaagaucaagaacgcccugcugagcaccaacaaggccguggugagccugagcaacggcgugagcgugcugaccuucaaggugcuggaccugaagaacuacaucgacaagcagcugcugcccauccugaacaagcagagcugcagcaucagcaacaucgagaccgugaucgaguuccagcagaagaacaacagacugcuggagaucaccagagaguucagcgugaacgccggcgugaccacccccgugagcaccuacaugcugaccaacagcgagcugcugagccugaucaacgacaugcccaucaccaacgaccagaagaagcugaugagcaacaacgugcagaucgugagacagcagagcuacagcaucaugugcaucaucaaggaggaggugcuggccuacguggugcagcugccccuguacggcgugaucgacacccccugcuggaagcugcacaccagcccccugugcaccaccaacaccaaggagggcagcaacaucugccugaccagaaccgacagaggcugguacugcgacaacgccggcagcgugagcuucuucccccaggccgagaccugcaaggugcagagcaacagaguguucugcgacaccaugaacagcagaacccugcccagcgaggugaaccugugcaacaucgacaucuucaaccccaaguacgacugcaagaucaugaccagcaagaccgacgugagcagcagcgugaucaccagccugggcgccaucgugagcugcuacggcaagaccaagugcaccgccagcaacaagaacagaggcaucaucaagaccuucagcaacggcugcgacuacgugagcaacaagggcguggacaccgugagcgugggcaacacccuguacuacgugaacaagcaggagggcaagagccuguacgugaagggcgagcccaucaucaacuucuacgacccccugguguuccccagcgacgaguucgacgccagcaucagccaggugaacgagaagaucaaccagagccuggccuucaucagaaagagcgacgagcugcugcacaacgugaacgugggcaagagcaccaccaacaucaugaucaccaccaucaucaucgugaucaucgugauccugcugcugcugaucgccgugggccuguuccuguacugcaaggccagaagcacccccgugacccugagcaaggaccagcugagcggcaucaacaacaucgccuucagcaacugaggacuaguacuggcugcaucucccuuuccucuguccuccauccuucucccaggauggugaagggggaccugguacccagugauccccaccccaggauccuaaaucaugacuuaccugcuaauaaaaacucauuggaaaagugagaagaucuaaaaaaaaaaaaaaaaaaaaaaaaaaaaaaaaaaaaaaaaaaaaaaaaaaaaaaaaaaaaaaaaugcaucccccccccccccccccccccccccccccccaaaggcucuuuucagagccaccagaauu

SEQ ID NO: 13456 - RNA, 1956 nt, Artificial Sequence
  mRNA product Design f-5 comprising derived and/or modified sequence from HRSV(Memphis-37)__AIY60640.1__F_DSCav1_mut0 (opt5)
gggagacuuucccauucuguagcagaauuugguguugccuguggucuuggucccgcggagaagcuuaccauggagcugcccauccucaagaccaacgccauuacaacgauccuggcugccgugacccuuugcuucgcgagcucccagaauauuacagaagaguuuuaccaaucuaccuguagcgcugucuccaaaggcuaucugucugcccucagaacagggugguacaccagcguuaucacaauugaacuguccaacaucaaggagaauaaaugcaacggaaccgacgccaaggugaaacuuaucaagcaggaacuggauaaguauaaaaaugcugugacggagcuccagcugcugaugcagucuaccccugccgcuggcagcggguccgccauugcgagcggaaucgccgucuguaaggugcuccaccuggagggcgaaguuaacaaaauuaagaaugcccuucugucuacaaacaaagcuguggucucccucagcaauggggugucuguucugaccuucaaggugcuugaccugaagaacuacaucgauaaacaacuccugccgauucugaauaagcaguccugcagcaucucuaacauugagacagucaucgaauuucagcagaaaaauaaccggcuccuggagaucacccgcgaguucuccgugaaugcuggagugacgacacccgucagcaccuauaugcuuacaaacuccgaacugcucucucugauuaacgacaugccuaucaccaaugaucaaaagaaacuuaugagcaacaauguucagauugugagacagcaguccuacagcaucauguguauuaucaaggaggaagugcuggccuaugucgugcaacucccccuguacggcguuaucgacaccccuugcuggaaacugcauacaucuccccucuguacgaccaacacaaaggagggcuccaauauuugccugacccggacagaucgcgggugguacugugacaacgcgggaagcgugagcuuuuucccucaggccgaaaccugcaagguccagucuaauagaguguuuugugauacgaugaacuccagaacacugccgucugagguuaaucucugcaacaucgacauuuucaaucccaaauaugauugcaagaucaugaccagcaaaaccgacguguccagcucugucauuacaucccugggcgcuaucgugagcuguuacgggaagaccaaaugcacagccucuaacaagaaucggggaaucauuaagacguuuuccaacggcugugauuaugucagcaauaaagggguggacaccguuuccgugggaaacacacuuuacuaugucaacaagcaagagggcaaaucucuguacgugaagggcgaaccuaucauuaauuucuaugacccccucguuuuuccuagcgaugaguucgacgcuuccaucucucaggugaacgaaaagauuaaucagagccuggccuuuauccgcaaguccgaugagcugcuccacaacgucaauguggggaaaagcaccacaaacauuaugaucaccacgaucauuaucgugauuaucguuauucugcuucugcucaucgccgucggacuguuccuguacugcaaagcuagaucuacccccgugacacuuuccaaggaccagcucagcggcaucaauaacauugcguucucuaauugaggacuaguacuggcugcaucucccuuuccucuguccuccauccuucucccaggauggugaagggggaccugguacccagugauccccaccccaggauccuaaaucaugacuuaccugcuaauaaaaacucauuggaaaagugagaagaucuaaaaaaaaaaaaaaaaaaaaaaaaaaaaaaaaaaaaaaaaaaaaaaaaaaaaaaaaaaaaaaaaugcaucccccccccccccccccccccccccccccccaaaggcucuuuucagagccaccagaauu

SEQ ID NO: 13457 - RNA, 1956 nt, Artificial Sequence
  mRNA product Design f-5 comprising derived and/or modified sequence from HRSV(Memphis-37)__AIY60640.1__F_DSCav1_mut0 (opt6)
gggagacuuucccauucuguagcagaauuugguguugccuguggucuuggucccgcggagaagcuuaccauggaauuaccaaucuuaaaaacaaacgccauaacaaccauccucgcagcaguaacccuaugcuuugcauccucacaaaacauaacugaagaauuuuaccaaucaacaugcucagcaguaucaaaaggauaucuaucagcccucagaacaggaugguacacaucagucauuacaaucgaacuuucaaacauaaaagaaaauaaauguaacggcacagaugccaaaguaaaauuaauuaaacaagaacuugacaaauacaaaaaugccguaacagaacuacaacuacuaaugcaaaguacuccugcugcaggaagcggaucugcaauagcaucagguauagcaguauguaaaguucuacaccuagaaggcgaaguaaacaaaauuaaaaacgcacuacucucaacaaauaaagcaguugucucccuaucaaacggaguaucaguauuaacuuucaaaguacuagaccucaaaaacuauauagacaaacaacuauuaccaauacuaaacaaacaaagcugcucuaucuccaacaucgaaacaguaauagaauuucaacaaaaaaauaauagacuacuugaaauaaccagagaauuuucaguaaacgccggaguaacaacaccaguaucaacuuacaugcuaacaaacuccgaacuacuaucauuaauaaacgacaugcccauaacaaacgaccaaaaaaaauuaaugucaaacaacguccaaaucguacgacaacaauccuauuccauaauguguauaauaaaagaagaaguacuagcauacguaguacaauuaccauuauauggaguaauagauaccccuugcuggaaacuacacacaucaccccuaugcacuacaaauacgaaagaagguucaaauauaugcuuaacuagaaccgauagagguugguauugugacaacgcuggaucaguaucauuuuucccacaagcagaaacaugcaaaguacaaucaaacagaguauuuugcgacacuaugaacucaagaacuuuaccauccgaaguuaaucuauguaacauagauauauuuaacccaaaauacgacugcaaaauaaugacaucaaaaacagauguaucaucaucaguuauaaccucccucggagcaauaguaucaugcuauggaaaaacaaaaugcacagcaucaaacaaaaaucguggaauuauaaaaacauucucaaacggcugugacuacgucagcaauaaaggaguagacacagucucaguaggaaacacuuuauacuauguuaacaaacaagaaggaaaaucacucuacgucaaaggcgaaccaauaauaaauuucuaugacccacucguauucccauccgacgaauuugacgcaucaauaucacaaguaaaugaaaaaauaaaccaaagccuagcauuuauacgaaaaucagacgaacuacuacacaacguaaacguagguaaaagcacaaccaauauaaugauaacaacaauaaucauaguaauaaucguaauauuacuauuacuaauagcuguaggauuguuccuauacugcaaagcaagaucaacaccaguaaccuuaucuaaggaccaacuaucaggaaucaauaacauugccuucucaaacuaaggacuaguacuggcugcaucucccuuuccucuguccuccauccuucucccaggauggugaagggggaccugguacccagugauccccaccccaggauccuaaaucaugacuuaccugcuaauaaaaacucauuggaaaagugagaagaucuaaaaaaaaaaaaaaaaaaaaaaaaaaaaaaaaaaaaaaaaaaaaaaaaaaaaaaaaaaaaaaaaugcaucccccccccccccccccccccccccccccccaaaggcucuuuucagagccaccagaauu

SEQ ID NO: 13458 - RNA, 1956 nt, Artificial Sequence
  mRNA product Design f-5 comprising derived and/or modified sequence from HRSV(Memphis-37)__AIY60640.1__F_DSCav1_mut0 (opt11)
gggagacuuucccauucuguagcagaauuugguguugccuguggucuuggucccgcggagaagcuuaccauggaacuaccuauccuuaaaaccaacgcaaucaccaccauccuugccgcagucacacucugcuucgcauccucacagaacaucaccgaagaguucuaucaaucaaccugcuccgccguauccaaaggauaccucucagcccuccgcaccggcugguauaccucagucauaacaaucgaauuaucaaauaucaaggagaacaaaugcaacggcaccgacgccaaagucaaacucauaaaacaagaacuagacaaauacaaaaacgccgugacagaacuccaacuccucaugcaguccacccccgcagccggauccggcucagcaaucgccucgggcauugcaguaugcaaaguccuccaccucgaaggcgaagucaacaaaaucaaaaacgcccuccucuccaccaacaaagccgucgucucccucuccaacggcguaucuguccucacuuucaagguccucgaccucaaaaacuacaucgacaagcaacuacuuccaauccucaacaagcaauccugcucaaucucaaacaucgaaaccguaauagaguuccaacaaaagaacaaccgccuccucgaaaucacccgcgaguucuccguuaacgccggugucacuaccccagucagcaccuacaugcucaccaacuccgaacuccuuucucugaucaacgacaugccaaucaccaacgaucaaaagaaauuaauguccaacaacguccagaucguccgccaacaaagcuacagcaucaugugcaucauaaaagaagaaguacuugcguacguaguucaacuaccccuuuacggcguaaucgacaccccaugcuggaaacuccacaccuccccacuaugcaccaccaacaccaaagaaggauccaacaucugccuaacccgcaccgaccgcggcugguacugcgacaacgcugggagcgucucauucuucccacaagcagaaaccugcaaaguccaaucgaaccgcguauucugcgacaccaugaacuccagaacccuaccaagcgaagucaaucuuugcaacaucgacauauuuaaccccaaauacgacugcaaaaucaugacaucaaagaccgacgucucaucuucagucauuaccucacucggcgcaauugucagcugcuacggaaagaccaaauguaccgccuccaauaaaaaccguggaaucauaaaaaccuuuagcaacggcugcgacuacgucuccaacaaaggagucgacaccgucuccgucggcaacacccucuacuacgucaacaaacaagaaggaaaaucccucuacgugaaaggcgaacccauaauaaacuucuacgacccccuagucuuccccucugacgaguucgacgccuccaucucccaagucaacgaaaagauaaaucaaucacuagccuucauacgcaaaucugacgaacuucuccacaacgucaacgucggcaaauccaccaccaacauaaugaucacaacgauaauaaucgugaucauaguaauccuacuucuccucaucgcaguaggucuauuccuauacugcaaagcccgcagcacccccgucacccuaucaaaagaccaacucuccggcaucaacaacaucgccuucucaaacuaaggacuaguacuggcugcaucucccuuuccucuguccuccauccuucucccaggauggugaagggggaccugguacccagugauccccaccccaggauccuaaaucaugacuuaccugcuaauaaaaacucauuggaaaagugagaagaucuaaaaaaaaaaaaaaaaaaaaaaaaaaaaaaaaaaaaaaaaaaaaaaaaaaaaaaaaaaaaaaaaugcaucccccccccccccccccccccccccccccccaaaggcucuuuucagagccaccagaauu

SEQ ID NO: 13459 - RNA, 1952 nt, Artificial Sequence
  mRNA product Design g-1 comprising derived and/or modified sequence from HRSV(Memphis-37)__AIY60640.1__F_DSCav1_mut0 (opt1)
gggagacuuucccauucuguagcagaauuugguguugccuguggucuuggucccgcggagaagcuuaccauggagcugcccauccucaagaccaacgccaucaccacgauccuggccgcggugacccugugcuucgccagcucccagaacaucaccgaggaguucuaccagagcacgugcuccgccgucagcaagggcuaccucuccgcccugcgcaccgggugguacaccagcgugaucaccaucgagcuguccaacaucaaggagaacaagugcaacggcaccgacgccaaggugaagcucaucaagcaggagcuggacaaguacaagaacgcggucacggagcugcagcuccugaugcagagcaccccggccgccggcuccgggagcgcgaucgccuccggcaucgccgucugcaaggugcugcaccucgagggcgaggugaacaagaucaagaacgcccugcuguccaccaacaaggccgucgugagccucuccaacggggugagcguccugaccuucaaggugcuggaccucaagaacuacaucgacaagcagcugcugcccauccugaacaagcagagcugcuccaucagcaacaucgagaccgucaucgaguuccagcagaagaacaaccgccuccuggagaucacgcgggaguucagcgugaacgcgggcgugaccacccccgucuccaccuacaugcugacgaacagcgagcuccugucccugaucaacgacaugccgaucaccaacgaccagaagaagcucaugagcaacaacgugcagaucgugcgccagcaguccuacagcaucaugugcaucaucaaggaggagguccuggccuacguggugcagcugccccucuacggggucaucgacacccccugcuggaagcugcacaccagcccccugugcacgaccaacaccaaggagggcuccaacaucugccucacccggacggaccgcgggugguacugcgacaacgccggcagcguguccuucuucccgcaggccgagaccugcaagguccagagcaaccggguguucugcgacaccaugaacucccggacccugcccagcgaggugaaccucugcaacaucgacaucuucaaccccaaguacgacugcaagaucaugacguccaagaccgacgucagcuccagcgugaucaccucccugggcgccaucgugagcugcuacgggaagaccaagugcacggcgagcaacaagaaccgcggcaucaucaagaccuucuccaacgggugcgacuacgucagcaacaagggcguggacaccguguccgucggcaacacccuguacuacgugaacaagcaggagggcaagagccucuacgugaagggggagcccaucaucaacuucuacgacccgcuggucuuccccuccgacgaguucgacgccagcaucucccaggugaacgagaagaucaaccagagccuggccuucauccggaaguccgacgagcuccugcacaacgugaacgucggcaagagcaccacgaacaucaugaucaccaccaucaucaucgugaucaucgugauccugcugcuccugaucgccgucgggcuguuccucuacugcaaggcccgcuccacccccgugacgcugagcaaggaccagcuguccgggaucaacaacaucgcguucagcaacugaggacuaguggaagcauuuuccuggcugauuaaaagaaauuacucagcuauggucaucuguuccuguuagaaggcuaugcagcauauuauauacuaugcgcauguuaugaaaugcauaauaaaaaauuuuaaaaaaucuaaaagaucuaaaaaaaaaaaaaaaaaaaaaaaaaaaaaaaaaaaaaaaaaaaaaaaaaaaaaaaaaaaaaaaaugcaucccccccccccccccccccccccccccccccaaaggcucuuuucagagccaccagaauu

SEQ ID NO: 13460 - RNA, 1952 nt, Artificial Sequence
  mRNA product Design g-1 comprising derived and/or modified sequence from HRSV(Memphis-37)__AIY60640.1__F_DSCav1_mut0 (opt1)
gggagacuuucccauucuguagcagaauuugguguugccuguggucuuggucccgcggagaagcuuaccauggagcugcccauccucaagaccaacgccaucaccacgauccuggccgcggugacccugugcuucgccagcucccagaacaucaccgaggaguucuaccagagcacgugcuccgccgucagcaagggcuaccucuccgcccugcgcaccgggugguacaccagcgugaucaccaucgagcuguccaacaucaaggagaacaagugcaacggcaccgacgccaaggugaagcucaucaagcaggagcuggacaaguacaagaacgcggucacggagcugcagcuccugaugcagagcaccccggccgccggguccggcagcgccaucgcguccgggaucgccgugugcaaggugcugcaccucgagggcgaggucaacaagaucaagaacgcccugcugagcaccaacaaggccguggugucccucagcaacggcgucuccgugcugaccuucaaggugcuggaccucaagaacuacaucgacaagcagcugcugcccauccucaacaagcagagcugcuccaucagcaacaucgagacggucaucgaguuccagcagaagaacaaccggcugcuggagaucacccgcgaguucuccgugaacgccggggugaccacccccgucagcacguacaugcucaccaacagcgagcugcugucccucaucaacgacaugcccaucaccaacgaccagaagaagcugaugagcaacaacgugcagaucgugcggcagcaguccuacagcaucaugugcaucaucaaggaggagguccuggcguacguggugcagcucccgcuguacggcgucaucgacacccccugcuggaagcugcacacgagcccccucugcaccaccaacaccaaggagggguccaacaucugccugacgcgcaccgaccggggcugguacugcgacaacgccggguccgugagcuucuucccccaggccgagaccugcaaggugcaguccaaccgcgucuucugcgacaccaugaacagccggacgcucccguccgaggugaaccugugcaacaucgacaucuucaaccccaaguacgacugcaagaucaugaccagcaagaccgacgucuccagcuccgugaucaccagccugggcgccaucguguccugcuacggcaagacgaagugcaccgccagcaacaagaaccgggggaucaucaagaccuucuccaacggcugcgacuacgucagcaacaaggggguggacaccgugagcgucggcaacacgcucuacuacgugaacaagcaggagggcaagucccuguacgugaagggggagcccaucaucaacuucuacgacccccuggucuucccgagcgacgaguucgacgcguccaucagccaggugaacgagaagaucaaccagucccucgccuucauccgcaagagcgacgagcugcugcacaacgugaacgucggcaaguccaccaccaacaucaugaucaccaccaucaucaucgugaucaucgugauccuccugcugcucaucgccgucgggcuguuccuguacugcaaggcccggagcacgcccgugacccuguccaaggaccagcucagcggcaucaacaacaucgccuucuccaacugaggacuaguggaagcauuuuccuggcugauuaaaagaaauuacucagcuauggucaucuguuccuguuagaaggcuaugcagcauauuauauacuaugcgcauguuaugaaaugcauaauaaaaaauuuuaaaaaaucuaaaagaucuaaaaaaaaaaaaaaaaaaaaaaaaaaaaaaaaaaaaaaaaaaaaaaaaaaaaaaaaaaaaaaaaugcaucccccccccccccccccccccccccccccccaaaggcucuuuucagagccaccagaauu

SEQ ID NO: 13461 - RNA, 1952 nt, Artificial Sequence
  mRNA product Design g-1 comprising derived and/or modified sequence from HRSV(Memphis-37)__AIY60640.1__F_DSCav1_mut0 (opt2)
gggagacuuucccauucuguagcagaauuugguguugccuguggucuuggucccgcggagaagcuuaccauggagcuccccauccucaagaccaacgccaucaccaccauccucgccgccgucacccucugcuucgccuccucccagaacaucaccgaggaguucuaccaguccaccugcuccgccgucuccaagggcuaccucuccgcccuccgcaccggcugguacaccuccgucaucaccaucgagcucuccaacaucaaggagaacaagugcaacggcaccgacgccaaggucaagcucaucaagcaggagcucgacaaguacaagaacgccgucaccgagcuccagcuccucaugcaguccacccccgccgccggcuccggcuccgccaucgccuccggcaucgccgucugcaagguccuccaccucgagggcgaggucaacaagaucaagaacgcccuccucuccaccaacaaggccgucgucucccucuccaacggcgucuccguccucaccuucaagguccucgaccucaagaacuacaucgacaagcagcuccuccccauccucaacaagcaguccugcuccaucuccaacaucgagaccgucaucgaguuccagcagaagaacaaccgccuccucgagaucacccgcgaguucuccgucaacgccggcgucaccacccccgucuccaccuacaugcucaccaacuccgagcuccucucccucaucaacgacaugcccaucaccaacgaccagaagaagcucauguccaacaacguccagaucguccgccagcaguccuacuccaucaugugcaucaucaaggaggagguccucgccuacgucguccagcucccccucuacggcgucaucgacacccccugcuggaagcuccacaccuccccccucugcaccaccaacaccaaggagggcuccaacaucugccucacccgcaccgaccgcggcugguacugcgacaacgccggcuccgucuccuucuucccccaggccgagaccugcaagguccaguccaaccgcgucuucugcgacaccaugaacucccgcacccuccccuccgaggucaaccucugcaacaucgacaucuucaaccccaaguacgacugcaagaucaugaccuccaagaccgacgucuccuccuccgucaucaccucccucggcgccaucgucuccugcuacggcaagaccaagugcaccgccuccaacaagaaccgcggcaucaucaagaccuucuccaacggcugcgacuacgucuccaacaagggcgucgacaccgucuccgucggcaacacccucuacuacgucaacaagcaggagggcaagucccucuacgucaagggcgagcccaucaucaacuucuacgacccccucgucuuccccuccgacgaguucgacgccuccaucucccaggucaacgagaagaucaaccagucccucgccuucauccgcaaguccgacgagcuccuccacaacgucaacgucggcaaguccaccaccaacaucaugaucaccaccaucaucaucgucaucaucgucauccuccuccuccucaucgccgucggccucuuccucuacugcaaggcccgcuccacccccgucacccucuccaaggaccagcucuccggcaucaacaacaucgccuucuccaacugaggacuaguggaagcauuuuccuggcugauuaaaagaaauuacucagcuauggucaucuguuccuguuagaaggcuaugcagcauauuauauacuaugcgcauguuaugaaaugcauaauaaaaaauuuuaaaaaaucuaaaagaucuaaaaaaaaaaaaaaaaaaaaaaaaaaaaaaaaaaaaaaaaaaaaaaaaaaaaaaaaaaaaaaaaugcaucccccccccccccccccccccccccccccccaaaggcucuuuucagagccaccagaauu

SEQ ID NO: 13462 - RNA, 1952 nt, Artificial Sequence
  mRNA product Design g-1 comprising derived and/or modified sequence from HRSV(Memphis-37)__AIY60640.1__F_DSCav1_mut0 (opt3)
gggagacuuucccauucuguagcagaauuugguguugccuguggucuuggucccgcggagaagcuuaccauggagcugcccauccucaagaccaacgccauuacaacuauacuugcugcagugacgcugugcuucgccagcucccagaauaucaccgaagaguuuuaccaaucuacauguucagcggucaguaaaggcuauuugagcgcuuuaagaacugggugguacaccuccguuauuacaaucgaacugucuaacauuaaggagaauaaaugcaacggaaccgacgccaaggugaaacuaaucaagcaggaacucgauaaguauaaaaaugcaguaacugagcugcagcuucugaugcagucgaccccugccgcugguucaggcagcgcaauagccagugggaucgcuguguguaaggucuugcaccucgagggagaagugaacaaaauuaagaaugcccugcuguccacaaacaaagcgguugugucucucagcaauggcgucuccguguuaacguucaagguacuggaccuuaagaacuacaucgauaaacaauugcugccaauucuaaauaagcagucaugcaguaucagcaacauagagacuguuauugaauuucagcagaaaaauaacaggcuccuggagaucacccgggaguucucugugaaugccggugucacaacuccgguguccaccuauaugcuuacaaacucagaacuguugagccucauuaacgacaugcccaucaccaaugaucaaaagaaacugaugaguaacaaugugcagaucguccgccagcagucuuacuccauuauguguauaaucaaggaggaaguuuuagcauaugugguacaacugccucucuacggggugauugacacgccaugcuggaaacuucauacuagcccccuguguacaaccaacacuaaggagggaucgaauaucugcuugacacgaaccgaucguggcugguacugugacaacgcuggcucugucuccuuuuucccucaggccgaaacgugcaaggugcagucaaauagaguguuuugugauaccaugaacaguagaacacugccaagcgaggugaaucucugcaacauagacauuuucaaucccaaauaugauugcaagaucaugacuuccaaaaccgacgucucuagcucagugaucacaagucugggggcaauuguauccuguuacggaaagacuaaaugcaccgcuagcaacaagaauagggguaucauuaagacauuuucuaacggcugugauuauguuucaaauaaagggguggacaccgucagugugggaaacacucuuuacuaugucaacaagcaagagggcaaaagccuguacgugaagggugaaccuauaaucaauuucuaugacccauugguuuuuccguccgaugaguucgacgccucuauuucgcagguuaacgagaaaaucaaucagagccucgcguuuauccggaaguccgaugaacuguuacacaacguaaaugucgggaagucaacgacaaacauuaugauaaccacuaucauuaucgugauuaucguuauacugcuacuccugaucgccgugggacuuuucuuguacugcaaagcacgcaguacccccgucacacugucuaaggaccagcucagcggcauuaauaacaucgcuuucuccaauugaggacuaguggaagcauuuuccuggcugauuaaaagaaauuacucagcuauggucaucuguuccuguuagaaggcuaugcagcauauuauauacuaugcgcauguuaugaaaugcauaauaaaaaauuuuaaaaaaucuaaaagaucuaaaaaaaaaaaaaaaaaaaaaaaaaaaaaaaaaaaaaaaaaaaaaaaaaaaaaaaaaaaaaaaaugcaucccccccccccccccccccccccccccccccaaaggcucuuuucagagccaccagaauu

SEQ ID NO: 13463 - RNA, 1952 nt, Artificial Sequence
  mRNA product Design g-1 comprising derived and/or modified sequence from HRSV(Memphis-37)__AIY60640.1__F_DSCav1_mut0 (opt4)
gggagacuuucccauucuguagcagaauuugguguugccuguggucuuggucccgcggagaagcuuaccauggagcugcccauccugaagaccaacgccaucaccaccauccuggccgccgugacccugugcuucgccagcagccagaacaucaccgaggaguucuaccagagcaccugcagcgccgugagcaagggcuaccugagcgcccugagaaccggcugguacaccagcgugaucaccaucgagcugagcaacaucaaggagaacaagugcaacggcaccgacgccaaggugaagcugaucaagcaggagcuggacaaguacaagaacgccgugaccgagcugcagcugcugaugcagagcacccccgccgccggcagcggcagcgccaucgccagcggcaucgccgugugcaaggugcugcaccuggagggcgaggugaacaagaucaagaacgcccugcugagcaccaacaaggccguggugagccugagcaacggcgugagcgugcugaccuucaaggugcuggaccugaagaacuacaucgacaagcagcugcugcccauccugaacaagcagagcugcagcaucagcaacaucgagaccgugaucgaguuccagcagaagaacaacagacugcuggagaucaccagagaguucagcgugaacgccggcgugaccacccccgugagcaccuacaugcugaccaacagcgagcugcugagccugaucaacgacaugcccaucaccaacgaccagaagaagcugaugagcaacaacgugcagaucgugagacagcagagcuacagcaucaugugcaucaucaaggaggaggugcuggccuacguggugcagcugccccuguacggcgugaucgacacccccugcuggaagcugcacaccagcccccugugcaccaccaacaccaaggagggcagcaacaucugccugaccagaaccgacagaggcugguacugcgacaacgccggcagcgugagcuucuucccccaggccgagaccugcaaggugcagagcaacagaguguucugcgacaccaugaacagcagaacccugcccagcgaggugaaccugugcaacaucgacaucuucaaccccaaguacgacugcaagaucaugaccagcaagaccgacgugagcagcagcgugaucaccagccugggcgccaucgugagcugcuacggcaagaccaagugcaccgccagcaacaagaacagaggcaucaucaagaccuucagcaacggcugcgacuacgugagcaacaagggcguggacaccgugagcgugggcaacacccuguacuacgugaacaagcaggagggcaagagccuguacgugaagggcgagcccaucaucaacuucuacgacccccugguguuccccagcgacgaguucgacgccagcaucagccaggugaacgagaagaucaaccagagccuggccuucaucagaaagagcgacgagcugcugcacaacgugaacgugggcaagagcaccaccaacaucaugaucaccaccaucaucaucgugaucaucgugauccugcugcugcugaucgccgugggccuguuccuguacugcaaggccagaagcacccccgugacccugagcaaggaccagcugagcggcaucaacaacaucgccuucagcaacugaggacuaguggaagcauuuuccuggcugauuaaaagaaauuacucagcuauggucaucuguuccuguuagaaggcuaugcagcauauuauauacuaugcgcauguuaugaaaugcauaauaaaaaauuuuaaaaaaucuaaaagaucuaaaaaaaaaaaaaaaaaaaaaaaaaaaaaaaaaaaaaaaaaaaaaaaaaaaaaaaaaaaaaaaaugcaucccccccccccccccccccccccccccccccaaaggcucuuuucagagccaccagaauu

SEQ ID NO: 13464 - RNA, 1952 nt, Artificial Sequence
  mRNA product Design g-1 comprising derived and/or modified sequence from HRSV(Memphis-37)__AIY60640.1__F_DSCav1_mut0 (opt5)
gggagacuuucccauucuguagcagaauuugguguugccuguggucuuggucccgcggagaagcuuaccauggagcugcccauccucaagaccaacgccauuacaacgauccuggcugccgugacccuuugcuucgcgagcucccagaauauuacagaagaguuuuaccaaucuaccuguagcgcugucuccaaaggcuaucugucugcccucagaacagggugguacaccagcguuaucacaauugaacuguccaacaucaaggagaauaaaugcaacggaaccgacgccaaggugaaacuuaucaagcaggaacuggauaaguauaaaaaugcugugacggagcuccagcugcugaugcagucuaccccugccgcuggcagcggguccgccauugcgagcggaaucgccgucuguaaggugcuccaccuggagggcgaaguuaacaaaauuaagaaugcccuucugucuacaaacaaagcuguggucucccucagcaauggggugucuguucugaccuucaaggugcuugaccugaagaacuacaucgauaaacaacuccugccgauucugaauaagcaguccugcagcaucucuaacauugagacagucaucgaauuucagcagaaaaauaaccggcuccuggagaucacccgcgaguucuccgugaaugcuggagugacgacacccgucagcaccuauaugcuuacaaacuccgaacugcucucucugauuaacgacaugccuaucaccaaugaucaaaagaaacuuaugagcaacaauguucagauugugagacagcaguccuacagcaucauguguauuaucaaggaggaagugcuggccuaugucgugcaacucccccuguacggcguuaucgacaccccuugcuggaaacugcauacaucuccccucuguacgaccaacacaaaggagggcuccaauauuugccugacccggacagaucgcgggugguacugugacaacgcgggaagcgugagcuuuuucccucaggccgaaaccugcaagguccagucuaauagaguguuuugugauacgaugaacuccagaacacugccgucugagguuaaucucugcaacaucgacauuuucaaucccaaauaugauugcaagaucaugaccagcaaaaccgacguguccagcucugucauuacaucccugggcgcuaucgugagcuguuacgggaagaccaaaugcacagccucuaacaagaaucggggaaucauuaagacguuuuccaacggcugugauuaugucagcaauaaagggguggacaccguuuccgugggaaacacacuuuacuaugucaacaagcaagagggcaaaucucuguacgugaagggcgaaccuaucauuaauuucuaugacccccucguuuuuccuagcgaugaguucgacgcuuccaucucucaggugaacgaaaagauuaaucagagccuggccuuuauccgcaaguccgaugagcugcuccacaacgucaauguggggaaaagcaccacaaacauuaugaucaccacgaucauuaucgugauuaucguuauucugcuucugcucaucgccgucggacuguuccuguacugcaaagcuagaucuacccccgugacacuuuccaaggaccagcucagcggcaucaauaacauugcguucucuaauugaggacuaguggaagcauuuuccuggcugauuaaaagaaauuacucagcuauggucaucuguuccuguuagaaggcuaugcagcauauuauauacuaugcgcauguuaugaaaugcauaauaaaaaauuuuaaaaaaucuaaaagaucuaaaaaaaaaaaaaaaaaaaaaaaaaaaaaaaaaaaaaaaaaaaaaaaaaaaaaaaaaaaaaaaaugcaucccccccccccccccccccccccccccccccaaaggcucuuuucagagccaccagaauu

SEQ ID NO: 13465 - RNA, 1952 nt, Artificial Sequence
  mRNA product Design g-1 comprising derived and/or modified sequence from HRSV(Memphis-37)__AIY60640.1__F_DSCav1_mut0 (opt6)
gggagacuuucccauucuguagcagaauuugguguugccuguggucuuggucccgcggagaagcuuaccauggaauuaccaaucuuaaaaacaaacgccauaacaaccauccucgcagcaguaacccuaugcuuugcauccucacaaaacauaacugaagaauuuuaccaaucaacaugcucagcaguaucaaaaggauaucuaucagcccucagaacaggaugguacacaucagucauuacaaucgaacuuucaaacauaaaagaaaauaaauguaacggcacagaugccaaaguaaaauuaauuaaacaagaacuugacaaauacaaaaaugccguaacagaacuacaacuacuaaugcaaaguacuccugcugcaggaagcggaucugcaauagcaucagguauagcaguauguaaaguucuacaccuagaaggcgaaguaaacaaaauuaaaaacgcacuacucucaacaaauaaagcaguugucucccuaucaaacggaguaucaguauuaacuuucaaaguacuagaccucaaaaacuauauagacaaacaacuauuaccaauacuaaacaaacaaagcugcucuaucuccaacaucgaaacaguaauagaauuucaacaaaaaaauaauagacuacuugaaauaaccagagaauuuucaguaaacgccggaguaacaacaccaguaucaacuuacaugcuaacaaacuccgaacuacuaucauuaauaaacgacaugcccauaacaaacgaccaaaaaaaauuaaugucaaacaacguccaaaucguacgacaacaauccuauuccauaauguguauaauaaaagaagaaguacuagcauacguaguacaauuaccauuauauggaguaauagauaccccuugcuggaaacuacacacaucaccccuaugcacuacaaauacgaaagaagguucaaauauaugcuuaacuagaaccgauagagguugguauugugacaacgcuggaucaguaucauuuuucccacaagcagaaacaugcaaaguacaaucaaacagaguauuuugcgacacuaugaacucaagaacuuuaccauccgaaguuaaucuauguaacauagauauauuuaacccaaaauacgacugcaaaauaaugacaucaaaaacagauguaucaucaucaguuauaaccucccucggagcaauaguaucaugcuauggaaaaacaaaaugcacagcaucaaacaaaaaucguggaauuauaaaaacauucucaaacggcugugacuacgucagcaauaaaggaguagacacagucucaguaggaaacacuuuauacuauguuaacaaacaagaaggaaaaucacucuacgucaaaggcgaaccaauaauaaauuucuaugacccacucguauucccauccgacgaauuugacgcaucaauaucacaaguaaaugaaaaaauaaaccaaagccuagcauuuauacgaaaaucagacgaacuacuacacaacguaaacguagguaaaagcacaaccaauauaaugauaacaacaauaaucauaguaauaaucguaauauuacuauuacuaauagcuguaggauuguuccuauacugcaaagcaagaucaacaccaguaaccuuaucuaaggaccaacuaucaggaaucaauaacauugccuucucaaacuaaggacuaguggaagcauuuuccuggcugauuaaaagaaauuacucagcuauggucaucuguuccuguuagaaggcuaugcagcauauuauauacuaugcgcauguuaugaaaugcauaauaaaaaauuuuaaaaaaucuaaaagaucuaaaaaaaaaaaaaaaaaaaaaaaaaaaaaaaaaaaaaaaaaaaaaaaaaaaaaaaaaaaaaaaaugcaucccccccccccccccccccccccccccccccaaaggcucuuuucagagccaccagaauu

SEQ ID NO: 13466 - RNA, 1952 nt, Artificial Sequence
  mRNA product Design g-1 comprising derived and/or modified sequence from HRSV(Memphis-37)__AIY60640.1__F_DSCav1_mut0 (opt11)
gggagacuuucccauucuguagcagaauuugguguugccuguggucuuggucccgcggagaagcuuaccauggaacuaccuauccuuaaaaccaacgcaaucaccaccauccuugccgcagucacacucugcuucgcauccucacagaacaucaccgaagaguucuaucaaucaaccugcuccgccguauccaaaggauaccucucagcccuccgcaccggcugguauaccucagucauaacaaucgaauuaucaaauaucaaggagaacaaaugcaacggcaccgacgccaaagucaaacucauaaaacaagaacuagacaaauacaaaaacgccgugacagaacuccaacuccucaugcaguccacccccgcagccggauccggcucagcaaucgccucgggcauugcaguaugcaaaguccuccaccucgaaggcgaagucaacaaaaucaaaaacgcccuccucuccaccaacaaagccgucgucucccucuccaacggcguaucuguccucacuuucaagguccucgaccucaaaaacuacaucgacaagcaacuacuuccaauccucaacaagcaauccugcucaaucucaaacaucgaaaccguaauagaguuccaacaaaagaacaaccgccuccucgaaaucacccgcgaguucuccguuaacgccggugucacuaccccagucagcaccuacaugcucaccaacuccgaacuccuuucucugaucaacgacaugccaaucaccaacgaucaaaagaaauuaauguccaacaacguccagaucguccgccaacaaagcuacagcaucaugugcaucauaaaagaagaaguacuugcguacguaguucaacuaccccuuuacggcguaaucgacaccccaugcuggaaacuccacaccuccccacuaugcaccaccaacaccaaagaaggauccaacaucugccuaacccgcaccgaccgcggcugguacugcgacaacgcugggagcgucucauucuucccacaagcagaaaccugcaaaguccaaucgaaccgcguauucugcgacaccaugaacuccagaacccuaccaagcgaagucaaucuuugcaacaucgacauauuuaaccccaaauacgacugcaaaaucaugacaucaaagaccgacgucucaucuucagucauuaccucacucggcgcaauugucagcugcuacggaaagaccaaauguaccgccuccaauaaaaaccguggaaucauaaaaaccuuuagcaacggcugcgacuacgucuccaacaaaggagucgacaccgucuccgucggcaacacccucuacuacgucaacaaacaagaaggaaaaucccucuacgugaaaggcgaacccauaauaaacuucuacgacccccuagucuuccccucugacgaguucgacgccuccaucucccaagucaacgaaaagauaaaucaaucacuagccuucauacgcaaaucugacgaacuucuccacaacgucaacgucggcaaauccaccaccaacauaaugaucacaacgauaauaaucgugaucauaguaauccuacuucuccucaucgcaguaggucuauuccuauacugcaaagcccgcagcacccccgucacccuaucaaaagaccaacucuccggcaucaacaacaucgccuucucaaacuaaggacuaguggaagcauuuuccuggcugauuaaaagaaauuacucagcuauggucaucuguuccuguuagaaggcuaugcagcauauuauauacuaugcgcauguuaugaaaugcauaauaaaaaauuuuaaaaaaucuaaaagaucuaaaaaaaaaaaaaaaaaaaaaaaaaaaaaaaaaaaaaaaaaaaaaaaaaaaaaaaaaaaaaaaaugcaucccccccccccccccccccccccccccccccaaaggcucuuuucagagccaccagaauu

SEQ ID NO: 13467 - RNA, 1967 nt, Artificial Sequence
  mRNA product Design g-2 comprising derived and/or modified sequence from HRSV(Memphis-37)__AIY60640.1__F_DSCav1_mut0 (opt1)
gggagaguccgcucagccagguugcagaagcggcuuagcguguguccuaaucuucucucugcguguagguaggccugugccgcaaacaagcuuaccauggagcugcccauccucaagaccaacgccaucaccacgauccuggccgcggugacccugugcuucgccagcucccagaacaucaccgaggaguucuaccagagcacgugcuccgccgucagcaagggcuaccucuccgcccugcgcaccgggugguacaccagcgugaucaccaucgagcuguccaacaucaaggagaacaagugcaacggcaccgacgccaaggugaagcucaucaagcaggagcuggacaaguacaagaacgcggucacggagcugcagcuccugaugcagagcaccccggccgccggcuccgggagcgcgaucgccuccggcaucgccgucugcaaggugcugcaccucgagggcgaggugaacaagaucaagaacgcccugcuguccaccaacaaggccgucgugagccucuccaacggggugagcguccugaccuucaaggugcuggaccucaagaacuacaucgacaagcagcugcugcccauccugaacaagcagagcugcuccaucagcaacaucgagaccgucaucgaguuccagcagaagaacaaccgccuccuggagaucacgcgggaguucagcgugaacgcgggcgugaccacccccgucuccaccuacaugcugacgaacagcgagcuccugucccugaucaacgacaugccgaucaccaacgaccagaagaagcucaugagcaacaacgugcagaucgugcgccagcaguccuacagcaucaugugcaucaucaaggaggagguccuggccuacguggugcagcugccccucuacggggucaucgacacccccugcuggaagcugcacaccagcccccugugcacgaccaacaccaaggagggcuccaacaucugccucacccggacggaccgcgggugguacugcgacaacgccggcagcguguccuucuucccgcaggccgagaccugcaagguccagagcaaccggguguucugcgacaccaugaacucccggacccugcccagcgaggugaaccucugcaacaucgacaucuucaaccccaaguacgacugcaagaucaugacguccaagaccgacgucagcuccagcgugaucaccucccugggcgccaucgugagcugcuacgggaagaccaagugcacggcgagcaacaagaaccgcggcaucaucaagaccuucuccaacgggugcgacuacgucagcaacaagggcguggacaccguguccgucggcaacacccuguacuacgugaacaagcaggagggcaagagccucuacgugaagggggagcccaucaucaacuucuacgacccgcuggucuuccccuccgacgaguucgacgccagcaucucccaggugaacgagaagaucaaccagagccuggccuucauccggaaguccgacgagcuccugcacaacgugaacgucggcaagagcaccacgaacaucaugaucaccaccaucaucaucgugaucaucgugauccugcugcuccugaucgccgucgggcuguuccucuacugcaaggcccgcuccacccccgugacgcugagcaaggaccagcuguccgggaucaacaacaucgcguucagcaacugaggacuaguaauaaggaaacuguaugaaugucugugggcaggaagugaagagauccuucuguaaagguuuuuggaauuaugucugcugaauaauaaacuuuuuugaaauaauaaaucugguagaaaaaugagaucuaaaaaaaaaaaaaaaaaaaaaaaaaaaaaaaaaaaaaaaaaaaaaaaaaaaaaaaaaaaaaaaaugcaucccccccccccccccccccccccccccccccaaaggcucuuuucagagccaccagaauu

SEQ ID NO: 13468 - RNA, 1967 nt, Artificial Sequence
  mRNA product Design g-2 comprising derived and/or modified sequence from HRSV(Memphis-37)__AIY60640.1__F_DSCav1_mut0 (opt1)
gggagaguccgcucagccagguugcagaagcggcuuagcguguguccuaaucuucucucugcguguagguaggccugugccgcaaacaagcuuaccauggagcugcccauccucaagaccaacgccaucaccacgauccuggccgcggugacccugugcuucgccagcucccagaacaucaccgaggaguucuaccagagcacgugcuccgccgucagcaagggcuaccucuccgcccugcgcaccgggugguacaccagcgugaucaccaucgagcuguccaacaucaaggagaacaagugcaacggcaccgacgccaaggugaagcucaucaagcaggagcuggacaaguacaagaacgcggucacggagcugcagcuccugaugcagagcaccccggccgccggguccggcagcgccaucgcguccgggaucgccgugugcaaggugcugcaccucgagggcgaggucaacaagaucaagaacgcccugcugagcaccaacaaggccguggugucccucagcaacggcgucuccgugcugaccuucaaggugcuggaccucaagaacuacaucgacaagcagcugcugcccauccucaacaagcagagcugcuccaucagcaacaucgagacggucaucgaguuccagcagaagaacaaccggcugcuggagaucacccgcgaguucuccgugaacgccggggugaccacccccgucagcacguacaugcucaccaacagcgagcugcugucccucaucaacgacaugcccaucaccaacgaccagaagaagcugaugagcaacaacgugcagaucgugcggcagcaguccuacagcaucaugugcaucaucaaggaggagguccuggcguacguggugcagcucccgcuguacggcgucaucgacacccccugcuggaagcugcacacgagcccccucugcaccaccaacaccaaggagggguccaacaucugccugacgcgcaccgaccggggcugguacugcgacaacgccggguccgugagcuucuucccccaggccgagaccugcaaggugcaguccaaccgcgucuucugcgacaccaugaacagccggacgcucccguccgaggugaaccugugcaacaucgacaucuucaaccccaaguacgacugcaagaucaugaccagcaagaccgacgucuccagcuccgugaucaccagccugggcgccaucguguccugcuacggcaagacgaagugcaccgccagcaacaagaaccgggggaucaucaagaccuucuccaacggcugcgacuacgucagcaacaaggggguggacaccgugagcgucggcaacacgcucuacuacgugaacaagcaggagggcaagucccuguacgugaagggggagcccaucaucaacuucuacgacccccuggucuucccgagcgacgaguucgacgcguccaucagccaggugaacgagaagaucaaccagucccucgccuucauccgcaagagcgacgagcugcugcacaacgugaacgucggcaaguccaccaccaacaucaugaucaccaccaucaucaucgugaucaucgugauccuccugcugcucaucgccgucgggcuguuccuguacugcaaggcccggagcacgcccgugacccuguccaaggaccagcucagcggcaucaacaacaucgccuucuccaacugaggacuaguaauaaggaaacuguaugaaugucugugggcaggaagugaagagauccuucuguaaagguuuuuggaauuaugucugcugaauaauaaacuuuuuugaaauaauaaaucugguagaaaaaugagaucuaaaaaaaaaaaaaaaaaaaaaaaaaaaaaaaaaaaaaaaaaaaaaaaaaaaaaaaaaaaaaaaaugcaucccccccccccccccccccccccccccccccaaaggcucuuuucagagccaccagaauu

SEQ ID NO: 13469 - RNA, 1967 nt, Artificial Sequence
  mRNA product Design g-2 comprising derived and/or modified sequence from HRSV(Memphis-37)__AIY60640.1__F_DSCav1_mut0 (opt2)
gggagaguccgcucagccagguugcagaagcggcuuagcguguguccuaaucuucucucugcguguagguaggccugugccgcaaacaagcuuaccauggagcuccccauccucaagaccaacgccaucaccaccauccucgccgccgucacccucugcuucgccuccucccagaacaucaccgaggaguucuaccaguccaccugcuccgccgucuccaagggcuaccucuccgcccuccgcaccggcugguacaccuccgucaucaccaucgagcucuccaacaucaaggagaacaagugcaacggcaccgacgccaaggucaagcucaucaagcaggagcucgacaaguacaagaacgccgucaccgagcuccagcuccucaugcaguccacccccgccgccggcuccggcuccgccaucgccuccggcaucgccgucugcaagguccuccaccucgagggcgaggucaacaagaucaagaacgcccuccucuccaccaacaaggccgucgucucccucuccaacggcgucuccguccucaccuucaagguccucgaccucaagaacuacaucgacaagcagcuccuccccauccucaacaagcaguccugcuccaucuccaacaucgagaccgucaucgaguuccagcagaagaacaaccgccuccucgagaucacccgcgaguucuccgucaacgccggcgucaccacccccgucuccaccuacaugcucaccaacuccgagcuccucucccucaucaacgacaugcccaucaccaacgaccagaagaagcucauguccaacaacguccagaucguccgccagcaguccuacuccaucaugugcaucaucaaggaggagguccucgccuacgucguccagcucccccucuacggcgucaucgacacccccugcuggaagcuccacaccuccccccucugcaccaccaacaccaaggagggcuccaacaucugccucacccgcaccgaccgcggcugguacugcgacaacgccggcuccgucuccuucuucccccaggccgagaccugcaagguccaguccaaccgcgucuucugcgacaccaugaacucccgcacccuccccuccgaggucaaccucugcaacaucgacaucuucaaccccaaguacgacugcaagaucaugaccuccaagaccgacgucuccuccuccgucaucaccucccucggcgccaucgucuccugcuacggcaagaccaagugcaccgccuccaacaagaaccgcggcaucaucaagaccuucuccaacggcugcgacuacgucuccaacaagggcgucgacaccgucuccgucggcaacacccucuacuacgucaacaagcaggagggcaagucccucuacgucaagggcgagcccaucaucaacuucuacgacccccucgucuuccccuccgacgaguucgacgccuccaucucccaggucaacgagaagaucaaccagucccucgccuucauccgcaaguccgacgagcuccuccacaacgucaacgucggcaaguccaccaccaacaucaugaucaccaccaucaucaucgucaucaucgucauccuccuccuccucaucgccgucggccucuuccucuacugcaaggcccgcuccacccccgucacccucuccaaggaccagcucuccggcaucaacaacaucgccuucuccaacugaggacuaguaauaaggaaacuguaugaaugucugugggcaggaagugaagagauccuucuguaaagguuuuuggaauuaugucugcugaauaauaaacuuuuuugaaauaauaaaucugguagaaaaaugagaucuaaaaaaaaaaaaaaaaaaaaaaaaaaaaaaaaaaaaaaaaaaaaaaaaaaaaaaaaaaaaaaaaugcaucccccccccccccccccccccccccccccccaaaggcucuuuucagagccaccagaauu

SEQ ID NO: 13470 - RNA, 1967 nt, Artificial Sequence
  mRNA product Design g-2 comprising derived and/or modified sequence from HRSV(Memphis-37)__AIY60640.1__F_DSCav1_mut0 (opt3)
gggagaguccgcucagccagguugcagaagcggcuuagcguguguccuaaucuucucucugcguguagguaggccugugccgcaaacaagcuuaccauggagcugcccauccucaagaccaacgccauuacaacuauacuugcugcagugacgcugugcuucgccagcucccagaauaucaccgaagaguuuuaccaaucuacauguucagcggucaguaaaggcuauuugagcgcuuuaagaacugggugguacaccuccguuauuacaaucgaacugucuaacauuaaggagaauaaaugcaacggaaccgacgccaaggugaaacuaaucaagcaggaacucgauaaguauaaaaaugcaguaacugagcugcagcuucugaugcagucgaccccugccgcugguucaggcagcgcaauagccagugggaucgcuguguguaaggucuugcaccucgagggagaagugaacaaaauuaagaaugcccugcuguccacaaacaaagcgguugugucucucagcaauggcgucuccguguuaacguucaagguacuggaccuuaagaacuacaucgauaaacaauugcugccaauucuaaauaagcagucaugcaguaucagcaacauagagacuguuauugaauuucagcagaaaaauaacaggcuccuggagaucacccgggaguucucugugaaugccggugucacaacuccgguguccaccuauaugcuuacaaacucagaacuguugagccucauuaacgacaugcccaucaccaaugaucaaaagaaacugaugaguaacaaugugcagaucguccgccagcagucuuacuccauuauguguauaaucaaggaggaaguuuuagcauaugugguacaacugccucucuacggggugauugacacgccaugcuggaaacuucauacuagcccccuguguacaaccaacacuaaggagggaucgaauaucugcuugacacgaaccgaucguggcugguacugugacaacgcuggcucugucuccuuuuucccucaggccgaaacgugcaaggugcagucaaauagaguguuuugugauaccaugaacaguagaacacugccaagcgaggugaaucucugcaacauagacauuuucaaucccaaauaugauugcaagaucaugacuuccaaaaccgacgucucuagcucagugaucacaagucugggggcaauuguauccuguuacggaaagacuaaaugcaccgcuagcaacaagaauagggguaucauuaagacauuuucuaacggcugugauuauguuucaaauaaagggguggacaccgucagugugggaaacacucuuuacuaugucaacaagcaagagggcaaaagccuguacgugaagggugaaccuauaaucaauuucuaugacccauugguuuuuccguccgaugaguucgacgccucuauuucgcagguuaacgagaaaaucaaucagagccucgcguuuauccggaaguccgaugaacuguuacacaacguaaaugucgggaagucaacgacaaacauuaugauaaccacuaucauuaucgugauuaucguuauacugcuacuccugaucgccgugggacuuuucuuguacugcaaagcacgcaguacccccgucacacugucuaaggaccagcucagcggcauuaauaacaucgcuuucuccaauugaggacuaguaauaaggaaacuguaugaaugucugugggcaggaagugaagagauccuucuguaaagguuuuuggaauuaugucugcugaauaauaaacuuuuuugaaauaauaaaucugguagaaaaaugagaucuaaaaaaaaaaaaaaaaaaaaaaaaaaaaaaaaaaaaaaaaaaaaaaaaaaaaaaaaaaaaaaaaugcaucccccccccccccccccccccccccccccccaaaggcucuuuucagagccaccagaauu

SEQ ID NO: 13471 - RNA, 1967 nt, Artificial Sequence
  mRNA product Design g-2 comprising derived and/or modified sequence from HRSV(Memphis-37)__AIY60640.1__F_DSCav1_mut0 (opt4)
gggagaguccgcucagccagguugcagaagcggcuuagcguguguccuaaucuucucucugcguguagguaggccugugccgcaaacaagcuuaccauggagcugcccauccugaagaccaacgccaucaccaccauccuggccgccgugacccugugcuucgccagcagccagaacaucaccgaggaguucuaccagagcaccugcagcgccgugagcaagggcuaccugagcgcccugagaaccggcugguacaccagcgugaucaccaucgagcugagcaacaucaaggagaacaagugcaacggcaccgacgccaaggugaagcugaucaagcaggagcuggacaaguacaagaacgccgugaccgagcugcagcugcugaugcagagcacccccgccgccggcagcggcagcgccaucgccagcggcaucgccgugugcaaggugcugcaccuggagggcgaggugaacaagaucaagaacgcccugcugagcaccaacaaggccguggugagccugagcaacggcgugagcgugcugaccuucaaggugcuggaccugaagaacuacaucgacaagcagcugcugcccauccugaacaagcagagcugcagcaucagcaacaucgagaccgugaucgaguuccagcagaagaacaacagacugcuggagaucaccagagaguucagcgugaacgccggcgugaccacccccgugagcaccuacaugcugaccaacagcgagcugcugagccugaucaacgacaugcccaucaccaacgaccagaagaagcugaugagcaacaacgugcagaucgugagacagcagagcuacagcaucaugugcaucaucaaggaggaggugcuggccuacguggugcagcugccccuguacggcgugaucgacacccccugcuggaagcugcacaccagcccccugugcaccaccaacaccaaggagggcagcaacaucugccugaccagaaccgacagaggcugguacugcgacaacgccggcagcgugagcuucuucccccaggccgagaccugcaaggugcagagcaacagaguguucugcgacaccaugaacagcagaacccugcccagcgaggugaaccugugcaacaucgacaucuucaaccccaaguacgacugcaagaucaugaccagcaagaccgacgugagcagcagcgugaucaccagccugggcgccaucgugagcugcuacggcaagaccaagugcaccgccagcaacaagaacagaggcaucaucaagaccuucagcaacggcugcgacuacgugagcaacaagggcguggacaccgugagcgugggcaacacccuguacuacgugaacaagcaggagggcaagagccuguacgugaagggcgagcccaucaucaacuucuacgacccccugguguuccccagcgacgaguucgacgccagcaucagccaggugaacgagaagaucaaccagagccuggccuucaucagaaagagcgacgagcugcugcacaacgugaacgugggcaagagcaccaccaacaucaugaucaccaccaucaucaucgugaucaucgugauccugcugcugcugaucgccgugggccuguuccuguacugcaaggccagaagcacccccgugacccugagcaaggaccagcugagcggcaucaacaacaucgccuucagcaacugaggacuaguaauaaggaaacuguaugaaugucugugggcaggaagugaagagauccuucuguaaagguuuuuggaauuaugucugcugaauaauaaacuuuuuugaaauaauaaaucugguagaaaaaugagaucuaaaaaaaaaaaaaaaaaaaaaaaaaaaaaaaaaaaaaaaaaaaaaaaaaaaaaaaaaaaaaaaaugcaucccccccccccccccccccccccccccccccaaaggcucuuuucagagccaccagaauu

SEQ ID NO: 13472 - RNA, 1967 nt, Artificial Sequence
  mRNA product Design g-2 comprising derived and/or modified sequence from HRSV(Memphis-37)__AIY60640.1__F_DSCav1_mut0 (opt5)
gggagaguccgcucagccagguugcagaagcggcuuagcguguguccuaaucuucucucugcguguagguaggccugugccgcaaacaagcuuaccauggagcugcccauccucaagaccaacgccauuacaacgauccuggcugccgugacccuuugcuucgcgagcucccagaauauuacagaagaguuuuaccaaucuaccuguagcgcugucuccaaaggcuaucugucugcccucagaacagggugguacaccagcguuaucacaauugaacuguccaacaucaaggagaauaaaugcaacggaaccgacgccaaggugaaacuuaucaagcaggaacuggauaaguauaaaaaugcugugacggagcuccagcugcugaugcagucuaccccugccgcuggcagcggguccgccauugcgagcggaaucgccgucuguaaggugcuccaccuggagggcgaaguuaacaaaauuaagaaugcccuucugucuacaaacaaagcuguggucucccucagcaauggggugucuguucugaccuucaaggugcuugaccugaagaacuacaucgauaaacaacuccugccgauucugaauaagcaguccugcagcaucucuaacauugagacagucaucgaauuucagcagaaaaauaaccggcuccuggagaucacccgcgaguucuccgugaaugcuggagugacgacacccgucagcaccuauaugcuuacaaacuccgaacugcucucucugauuaacgacaugccuaucaccaaugaucaaaagaaacuuaugagcaacaauguucagauugugagacagcaguccuacagcaucauguguauuaucaaggaggaagugcuggccuaugucgugcaacucccccuguacggcguuaucgacaccccuugcuggaaacugcauacaucuccccucuguacgaccaacacaaaggagggcuccaauauuugccugacccggacagaucgcgggugguacugugacaacgcgggaagcgugagcuuuuucccucaggccgaaaccugcaagguccagucuaauagaguguuuugugauacgaugaacuccagaacacugccgucugagguuaaucucugcaacaucgacauuuucaaucccaaauaugauugcaagaucaugaccagcaaaaccgacguguccagcucugucauuacaucccugggcgcuaucgugagcuguuacgggaagaccaaaugcacagccucuaacaagaaucggggaaucauuaagacguuuuccaacggcugugauuaugucagcaauaaagggguggacaccguuuccgugggaaacacacuuuacuaugucaacaagcaagagggcaaaucucuguacgugaagggcgaaccuaucauuaauuucuaugacccccucguuuuuccuagcgaugaguucgacgcuuccaucucucaggugaacgaaaagauuaaucagagccuggccuuuauccgcaaguccgaugagcugcuccacaacgucaauguggggaaaagcaccacaaacauuaugaucaccacgaucauuaucgugauuaucguuauucugcuucugcucaucgccgucggacuguuccuguacugcaaagcuagaucuacccccgugacacuuuccaaggaccagcucagcggcaucaauaacauugcguucucuaauugaggacuaguaauaaggaaacuguaugaaugucugugggcaggaagugaagagauccuucuguaaagguuuuuggaauuaugucugcugaauaauaaacuuuuuugaaauaauaaaucugguagaaaaaugagaucuaaaaaaaaaaaaaaaaaaaaaaaaaaaaaaaaaaaaaaaaaaaaaaaaaaaaaaaaaaaaaaaaugcaucccccccccccccccccccccccccccccccaaaggcucuuuucagagccaccagaauu

SEQ ID NO: 13473 - RNA, 1967 nt, Artificial Sequence
  mRNA product Design g-2 comprising derived and/or modified sequence from HRSV(Memphis-37)__AIY60640.1__F_DSCav1_mut0 (opt6)
gggagaguccgcucagccagguugcagaagcggcuuagcguguguccuaaucuucucucugcguguagguaggccugugccgcaaacaagcuuaccauggaauuaccaaucuuaaaaacaaacgccauaacaaccauccucgcagcaguaacccuaugcuuugcauccucacaaaacauaacugaagaauuuuaccaaucaacaugcucagcaguaucaaaaggauaucuaucagcccucagaacaggaugguacacaucagucauuacaaucgaacuuucaaacauaaaagaaaauaaauguaacggcacagaugccaaaguaaaauuaauuaaacaagaacuugacaaauacaaaaaugccguaacagaacuacaacuacuaaugcaaaguacuccugcugcaggaagcggaucugcaauagcaucagguauagcaguauguaaaguucuacaccuagaaggcgaaguaaacaaaauuaaaaacgcacuacucucaacaaauaaagcaguugucucccuaucaaacggaguaucaguauuaacuuucaaaguacuagaccucaaaaacuauauagacaaacaacuauuaccaauacuaaacaaacaaagcugcucuaucuccaacaucgaaacaguaauagaauuucaacaaaaaaauaauagacuacuugaaauaaccagagaauuuucaguaaacgccggaguaacaacaccaguaucaacuuacaugcuaacaaacuccgaacuacuaucauuaauaaacgacaugcccauaacaaacgaccaaaaaaaauuaaugucaaacaacguccaaaucguacgacaacaauccuauuccauaauguguauaauaaaagaagaaguacuagcauacguaguacaauuaccauuauauggaguaauagauaccccuugcuggaaacuacacacaucaccccuaugcacuacaaauacgaaagaagguucaaauauaugcuuaacuagaaccgauagagguugguauugugacaacgcuggaucaguaucauuuuucccacaagcagaaacaugcaaaguacaaucaaacagaguauuuugcgacacuaugaacucaagaacuuuaccauccgaaguuaaucuauguaacauagauauauuuaacccaaaauacgacugcaaaauaaugacaucaaaaacagauguaucaucaucaguuauaaccucccucggagcaauaguaucaugcuauggaaaaacaaaaugcacagcaucaaacaaaaaucguggaauuauaaaaacauucucaaacggcugugacuacgucagcaauaaaggaguagacacagucucaguaggaaacacuuuauacuauguuaacaaacaagaaggaaaaucacucuacgucaaaggcgaaccaauaauaaauuucuaugacccacucguauucccauccgacgaauuugacgcaucaauaucacaaguaaaugaaaaaauaaaccaaagccuagcauuuauacgaaaaucagacgaacuacuacacaacguaaacguagguaaaagcacaaccaauauaaugauaacaacaauaaucauaguaauaaucguaauauuacuauuacuaauagcuguaggauuguuccuauacugcaaagcaagaucaacaccaguaaccuuaucuaaggaccaacuaucaggaaucaauaacauugccuucucaaacuaaggacuaguaauaaggaaacuguaugaaugucugugggcaggaagugaagagauccuucuguaaagguuuuuggaauuaugucugcugaauaauaaacuuuuuugaaauaauaaaucugguagaaaaaugagaucuaaaaaaaaaaaaaaaaaaaaaaaaaaaaaaaaaaaaaaaaaaaaaaaaaaaaaaaaaaaaaaaaugcaucccccccccccccccccccccccccccccccaaaggcucuuuucagagccaccagaauu

SEQ ID NO: 13474 - RNA, 1967 nt, Artificial Sequence
  mRNA product Design g-2 comprising derived and/or modified sequence from HRSV(Memphis-37)__AIY60640.1__F_DSCav1_mut0 (opt11)
gggagaguccgcucagccagguugcagaagcggcuuagcguguguccuaaucuucucucugcguguagguaggccugugccgcaaacaagcuuaccauggaacuaccuauccuuaaaaccaacgcaaucaccaccauccuugccgcagucacacucugcuucgcauccucacagaacaucaccgaagaguucuaucaaucaaccugcuccgccguauccaaaggauaccucucagcccuccgcaccggcugguauaccucagucauaacaaucgaauuaucaaauaucaaggagaacaaaugcaacggcaccgacgccaaagucaaacucauaaaacaagaacuagacaaauacaaaaacgccgugacagaacuccaacuccucaugcaguccacccccgcagccggauccggcucagcaaucgccucgggcauugcaguaugcaaaguccuccaccucgaaggcgaagucaacaaaaucaaaaacgcccuccucuccaccaacaaagccgucgucucccucuccaacggcguaucuguccucacuuucaagguccucgaccucaaaaacuacaucgacaagcaacuacuuccaauccucaacaagcaauccugcucaaucucaaacaucgaaaccguaauagaguuccaacaaaagaacaaccgccuccucgaaaucacccgcgaguucuccguuaacgccggugucacuaccccagucagcaccuacaugcucaccaacuccgaacuccuuucucugaucaacgacaugccaaucaccaacgaucaaaagaaauuaauguccaacaacguccagaucguccgccaacaaagcuacagcaucaugugcaucauaaaagaagaaguacuugcguacguaguucaacuaccccuuuacggcguaaucgacaccccaugcuggaaacuccacaccuccccacuaugcaccaccaacaccaaagaaggauccaacaucugccuaacccgcaccgaccgcggcugguacugcgacaacgcugggagcgucucauucuucccacaagcagaaaccugcaaaguccaaucgaaccgcguauucugcgacaccaugaacuccagaacccuaccaagcgaagucaaucuuugcaacaucgacauauuuaaccccaaauacgacugcaaaaucaugacaucaaagaccgacgucucaucuucagucauuaccucacucggcgcaauugucagcugcuacggaaagaccaaauguaccgccuccaauaaaaaccguggaaucauaaaaaccuuuagcaacggcugcgacuacgucuccaacaaaggagucgacaccgucuccgucggcaacacccucuacuacgucaacaaacaagaaggaaaaucccucuacgugaaaggcgaacccauaauaaacuucuacgacccccuagucuuccccucugacgaguucgacgccuccaucucccaagucaacgaaaagauaaaucaaucacuagccuucauacgcaaaucugacgaacuucuccacaacgucaacgucggcaaauccaccaccaacauaaugaucacaacgauaauaaucgugaucauaguaauccuacuucuccucaucgcaguaggucuauuccuauacugcaaagcccgcagcacccccgucacccuaucaaaagaccaacucuccggcaucaacaacaucgccuucucaaacuaaggacuaguaauaaggaaacuguaugaaugucugugggcaggaagugaagagauccuucuguaaagguuuuuggaauuaugucugcugaauaauaaacuuuuuugaaauaauaaaucugguagaaaaaugagaucuaaaaaaaaaaaaaaaaaaaaaaaaaaaaaaaaaaaaaaaaaaaaaaaaaaaaaaaaaaaaaaaaugcaucccccccccccccccccccccccccccccccaaaggcucuuuucagagccaccagaauu

SEQ ID NO: 13475 - RNA, 2199 nt, Artificial Sequence
  mRNA product Design g-3 comprising derived and/or modified sequence from HRSV(Memphis-37)__AIY60640.1__F_DSCav1_mut0 (opt1)
gggagaguccgcucagccagguugcagaagcggcuuagcguguguccuaaucuucucucugcguguagguaggccugugccgcaaacaagcuuaccauggagcugcccauccucaagaccaacgccaucaccacgauccuggccgcggugacccugugcuucgccagcucccagaacaucaccgaggaguucuaccagagcacgugcuccgccgucagcaagggcuaccucuccgcccugcgcaccgggugguacaccagcgugaucaccaucgagcuguccaacaucaaggagaacaagugcaacggcaccgacgccaaggugaagcucaucaagcaggagcuggacaaguacaagaacgcggucacggagcugcagcuccugaugcagagcaccccggccgccggcuccgggagcgcgaucgccuccggcaucgccgucugcaaggugcugcaccucgagggcgaggugaacaagaucaagaacgcccugcuguccaccaacaaggccgucgugagccucuccaacggggugagcguccugaccuucaaggugcuggaccucaagaacuacaucgacaagcagcugcugcccauccugaacaagcagagcugcuccaucagcaacaucgagaccgucaucgaguuccagcagaagaacaaccgccuccuggagaucacgcgggaguucagcgugaacgcgggcgugaccacccccgucuccaccuacaugcugacgaacagcgagcuccugucccugaucaacgacaugccgaucaccaacgaccagaagaagcucaugagcaacaacgugcagaucgugcgccagcaguccuacagcaucaugugcaucaucaaggaggagguccuggccuacguggugcagcugccccucuacggggucaucgacacccccugcuggaagcugcacaccagcccccugugcacgaccaacaccaaggagggcuccaacaucugccucacccggacggaccgcgggugguacugcgacaacgccggcagcguguccuucuucccgcaggccgagaccugcaagguccagagcaaccggguguucugcgacaccaugaacucccggacccugcccagcgaggugaaccucugcaacaucgacaucuucaaccccaaguacgacugcaagaucaugacguccaagaccgacgucagcuccagcgugaucaccucccugggcgccaucgugagcugcuacgggaagaccaagugcacggcgagcaacaagaaccgcggcaucaucaagaccuucuccaacgggugcgacuacgucagcaacaagggcguggacaccguguccgucggcaacacccuguacuacgugaacaagcaggagggcaagagccucuacgugaagggggagcccaucaucaacuucuacgacccgcuggucuuccccuccgacgaguucgacgccagcaucucccaggugaacgagaagaucaaccagagccuggccuucauccggaaguccgacgagcuccugcacaacgugaacgucggcaagagcaccacgaacaucaugaucaccaccaucaucaucgugaucaucgugauccugcugcuccugaucgccgucgggcuguuccucuacugcaaggcccgcuccacccccgugacgcugagcaaggaccagcuguccgggaucaacaacaucgcguucagcaacugaggacuagugaagggaacacccaaauuuaauucagccuuaagcacaauuaauuaagagugaaacguaauuguacaagcaguuggucacccaccauagggcaugaucaacaccgcaaccuuuccuuuuucccccagugauucugaaaaaccccucuucccuucagcuugcuuagauguuccaaauuuaguaagcuuaaggcggccuacagaagaaaaagaaaaaaaaggccacaaaaguucccucucacuuucaguaaauaaaauaaaagcagcaacagaaauaaagaaauaaaugaaauucaaaaugaaauaaauauuguguugugcagcauuaaaaaaucaauaaaaauuaaaaaugagcaagaucuaaaaaaaaaaaaaaaaaaaaaaaaaaaaaaaaaaaaaaaaaaaaaaaaaaaaaaaaaaaaaaaaugcaucccccccccccccccccccccccccccccccaaaggcucuuuucagagccaccagaauu

SEQ ID NO: 13476 - RNA, 2199 nt, Artificial Sequence
  mRNA product Design g-3 comprising derived and/or modified sequence from HRSV(Memphis-37)__AIY60640.1__F_DSCav1_mut0 (opt1)
gggagaguccgcucagccagguugcagaagcggcuuagcguguguccuaaucuucucucugcguguagguaggccugugccgcaaacaagcuuaccauggagcugcccauccucaagaccaacgccaucaccacgauccuggccgcggugacccugugcuucgccagcucccagaacaucaccgaggaguucuaccagagcacgugcuccgccgucagcaagggcuaccucuccgcccugcgcaccgggugguacaccagcgugaucaccaucgagcuguccaacaucaaggagaacaagugcaacggcaccgacgccaaggugaagcucaucaagcaggagcuggacaaguacaagaacgcggucacggagcugcagcuccugaugcagagcaccccggccgccggguccggcagcgccaucgcguccgggaucgccgugugcaaggugcugcaccucgagggcgaggucaacaagaucaagaacgcccugcugagcaccaacaaggccguggugucccucagcaacggcgucuccgugcugaccuucaaggugcuggaccucaagaacuacaucgacaagcagcugcugcccauccucaacaagcagagcugcuccaucagcaacaucgagacggucaucgaguuccagcagaagaacaaccggcugcuggagaucacccgcgaguucuccgugaacgccggggugaccacccccgucagcacguacaugcucaccaacagcgagcugcugucccucaucaacgacaugcccaucaccaacgaccagaagaagcugaugagcaacaacgugcagaucgugcggcagcaguccuacagcaucaugugcaucaucaaggaggagguccuggcguacguggugcagcucccgcuguacggcgucaucgacacccccugcuggaagcugcacacgagcccccucugcaccaccaacaccaaggagggguccaacaucugccugacgcgcaccgaccggggcugguacugcgacaacgccggguccgugagcuucuucccccaggccgagaccugcaaggugcaguccaaccgcgucuucugcgacaccaugaacagccggacgcucccguccgaggugaaccugugcaacaucgacaucuucaaccccaaguacgacugcaagaucaugaccagcaagaccgacgucuccagcuccgugaucaccagccugggcgccaucguguccugcuacggcaagacgaagugcaccgccagcaacaagaaccgggggaucaucaagaccuucuccaacggcugcgacuacgucagcaacaaggggguggacaccgugagcgucggcaacacgcucuacuacgugaacaagcaggagggcaagucccuguacgugaagggggagcccaucaucaacuucuacgacccccuggucuucccgagcgacgaguucgacgcguccaucagccaggugaacgagaagaucaaccagucccucgccuucauccgcaagagcgacgagcugcugcacaacgugaacgucggcaaguccaccaccaacaucaugaucaccaccaucaucaucgugaucaucgugauccuccugcugcucaucgccgucgggcuguuccuguacugcaaggcccggagcacgcccgugacccuguccaaggaccagcucagcggcaucaacaacaucgccuucuccaacugaggacuagugaagggaacacccaaauuuaauucagccuuaagcacaauuaauuaagagugaaacguaauuguacaagcaguuggucacccaccauagggcaugaucaacaccgcaaccuuuccuuuuucccccagugauucugaaaaaccccucuucccuucagcuugcuuagauguuccaaauuuaguaagcuuaaggcggccuacagaagaaaaagaaaaaaaaggccacaaaaguucccucucacuuucaguaaauaaaauaaaagcagcaacagaaauaaagaaauaaaugaaauucaaaaugaaauaaauauuguguugugcagcauuaaaaaaucaauaaaaauuaaaaaugagcaagaucuaaaaaaaaaaaaaaaaaaaaaaaaaaaaaaaaaaaaaaaaaaaaaaaaaaaaaaaaaaaaaaaaugcaucccccccccccccccccccccccccccccccaaaggcucuuuucagagccaccagaauu

SEQ ID NO: 13477 - RNA, 2199 nt, Artificial Sequence
  mRNA product Design g-3 comprising derived and/or modified sequence from HRSV(Memphis-37)__AIY60640.1__F_DSCav1_mut0 (opt2)
gggagaguccgcucagccagguugcagaagcggcuuagcguguguccuaaucuucucucugcguguagguaggccugugccgcaaacaagcuuaccauggagcuccccauccucaagaccaacgccaucaccaccauccucgccgccgucacccucugcuucgccuccucccagaacaucaccgaggaguucuaccaguccaccugcuccgccgucuccaagggcuaccucuccgcccuccgcaccggcugguacaccuccgucaucaccaucgagcucuccaacaucaaggagaacaagugcaacggcaccgacgccaaggucaagcucaucaagcaggagcucgacaaguacaagaacgccgucaccgagcuccagcuccucaugcaguccacccccgccgccggcuccggcuccgccaucgccuccggcaucgccgucugcaagguccuccaccucgagggcgaggucaacaagaucaagaacgcccuccucuccaccaacaaggccgucgucucccucuccaacggcgucuccguccucaccuucaagguccucgaccucaagaacuacaucgacaagcagcuccuccccauccucaacaagcaguccugcuccaucuccaacaucgagaccgucaucgaguuccagcagaagaacaaccgccuccucgagaucacccgcgaguucuccgucaacgccggcgucaccacccccgucuccaccuacaugcucaccaacuccgagcuccucucccucaucaacgacaugcccaucaccaacgaccagaagaagcucauguccaacaacguccagaucguccgccagcaguccuacuccaucaugugcaucaucaaggaggagguccucgccuacgucguccagcucccccucuacggcgucaucgacacccccugcuggaagcuccacaccuccccccucugcaccaccaacaccaaggagggcuccaacaucugccucacccgcaccgaccgcggcugguacugcgacaacgccggcuccgucuccuucuucccccaggccgagaccugcaagguccaguccaaccgcgucuucugcgacaccaugaacucccgcacccuccccuccgaggucaaccucugcaacaucgacaucuucaaccccaaguacgacugcaagaucaugaccuccaagaccgacgucuccuccuccgucaucaccucccucggcgccaucgucuccugcuacggcaagaccaagugcaccgccuccaacaagaaccgcggcaucaucaagaccuucuccaacggcugcgacuacgucuccaacaagggcgucgacaccgucuccgucggcaacacccucuacuacgucaacaagcaggagggcaagucccucuacgucaagggcgagcccaucaucaacuucuacgacccccucgucuuccccuccgacgaguucgacgccuccaucucccaggucaacgagaagaucaaccagucccucgccuucauccgcaaguccgacgagcuccuccacaacgucaacgucggcaaguccaccaccaacaucaugaucaccaccaucaucaucgucaucaucgucauccuccuccuccucaucgccgucggccucuuccucuacugcaaggcccgcuccacccccgucacccucuccaaggaccagcucuccggcaucaacaacaucgccuucuccaacugaggacuagugaagggaacacccaaauuuaauucagccuuaagcacaauuaauuaagagugaaacguaauuguacaagcaguuggucacccaccauagggcaugaucaacaccgcaaccuuuccuuuuucccccagugauucugaaaaaccccucuucccuucagcuugcuuagauguuccaaauuuaguaagcuuaaggcggccuacagaagaaaaagaaaaaaaaggccacaaaaguucccucucacuuucaguaaauaaaauaaaagcagcaacagaaauaaagaaauaaaugaaauucaaaaugaaauaaauauuguguugugcagcauuaaaaaaucaauaaaaauuaaaaaugagcaagaucuaaaaaaaaaaaaaaaaaaaaaaaaaaaaaaaaaaaaaaaaaaaaaaaaaaaaaaaaaaaaaaaaugcaucccccccccccccccccccccccccccccccaaaggcucuuuucagagccaccagaauu

SEQ ID NO: 13478 - RNA, 2199 nt, Artificial Sequence
  mRNA product Design g-3 comprising derived and/or modified sequence from HRSV(Memphis-37)__AIY60640.1__F_DSCav1_mut0 (opt3)
gggagaguccgcucagccagguugcagaagcggcuuagcguguguccuaaucuucucucugcguguagguaggccugugccgcaaacaagcuuaccauggagcugcccauccucaagaccaacgccauuacaacuauacuugcugcagugacgcugugcuucgccagcucccagaauaucaccgaagaguuuuaccaaucuacauguucagcggucaguaaaggcuauuugagcgcuuuaagaacugggugguacaccuccguuauuacaaucgaacugucuaacauuaaggagaauaaaugcaacggaaccgacgccaaggugaaacuaaucaagcaggaacucgauaaguauaaaaaugcaguaacugagcugcagcuucugaugcagucgaccccugccgcugguucaggcagcgcaauagccagugggaucgcuguguguaaggucuugcaccucgagggagaagugaacaaaauuaagaaugcccugcuguccacaaacaaagcgguugugucucucagcaauggcgucuccguguuaacguucaagguacuggaccuuaagaacuacaucgauaaacaauugcugccaauucuaaauaagcagucaugcaguaucagcaacauagagacuguuauugaauuucagcagaaaaauaacaggcuccuggagaucacccgggaguucucugugaaugccggugucacaacuccgguguccaccuauaugcuuacaaacucagaacuguugagccucauuaacgacaugcccaucaccaaugaucaaaagaaacugaugaguaacaaugugcagaucguccgccagcagucuuacuccauuauguguauaaucaaggaggaaguuuuagcauaugugguacaacugccucucuacggggugauugacacgccaugcuggaaacuucauacuagcccccuguguacaaccaacacuaaggagggaucgaauaucugcuugacacgaaccgaucguggcugguacugugacaacgcuggcucugucuccuuuuucccucaggccgaaacgugcaaggugcagucaaauagaguguuuugugauaccaugaacaguagaacacugccaagcgaggugaaucucugcaacauagacauuuucaaucccaaauaugauugcaagaucaugacuuccaaaaccgacgucucuagcucagugaucacaagucugggggcaauuguauccuguuacggaaagacuaaaugcaccgcuagcaacaagaauagggguaucauuaagacauuuucuaacggcugugauuauguuucaaauaaagggguggacaccgucagugugggaaacacucuuuacuaugucaacaagcaagagggcaaaagccuguacgugaagggugaaccuauaaucaauuucuaugacccauugguuuuuccguccgaugaguucgacgccucuauuucgcagguuaacgagaaaaucaaucagagccucgcguuuauccggaaguccgaugaacuguuacacaacguaaaugucgggaagucaacgacaaacauuaugauaaccacuaucauuaucgugauuaucguuauacugcuacuccugaucgccgugggacuuuucuuguacugcaaagcacgcaguacccccgucacacugucuaaggaccagcucagcggcauuaauaacaucgcuuucuccaauugaggacuagugaagggaacacccaaauuuaauucagccuuaagcacaauuaauuaagagugaaacguaauuguacaagcaguuggucacccaccauagggcaugaucaacaccgcaaccuuuccuuuuucccccagugauucugaaaaaccccucuucccuucagcuugcuuagauguuccaaauuuaguaagcuuaaggcggccuacagaagaaaaagaaaaaaaaggccacaaaaguucccucucacuuucaguaaauaaaauaaaagcagcaacagaaauaaagaaauaaaugaaauucaaaaugaaauaaauauuguguugugcagcauuaaaaaaucaauaaaaauuaaaaaugagcaagaucuaaaaaaaaaaaaaaaaaaaaaaaaaaaaaaaaaaaaaaaaaaaaaaaaaaaaaaaaaaaaaaaaugcaucccccccccccccccccccccccccccccccaaaggcucuuuucagagccaccagaauu

SEQ ID NO: 13479 - RNA, 2199 nt, Artificial Sequence
  mRNA product Design g-3 comprising derived and/or modified sequence from HRSV(Memphis-37)__AIY60640.1__F_DSCav1_mut0 (opt4)
gggagaguccgcucagccagguugcagaagcggcuuagcguguguccuaaucuucucucugcguguagguaggccugugccgcaaacaagcuuaccauggagcugcccauccugaagaccaacgccaucaccaccauccuggccgccgugacccugugcuucgccagcagccagaacaucaccgaggaguucuaccagagcaccugcagcgccgugagcaagggcuaccugagcgcccugagaaccggcugguacaccagcgugaucaccaucgagcugagcaacaucaaggagaacaagugcaacggcaccgacgccaaggugaagcugaucaagcaggagcuggacaaguacaagaacgccgugaccgagcugcagcugcugaugcagagcacccccgccgccggcagcggcagcgccaucgccagcggcaucgccgugugcaaggugcugcaccuggagggcgaggugaacaagaucaagaacgcccugcugagcaccaacaaggccguggugagccugagcaacggcgugagcgugcugaccuucaaggugcuggaccugaagaacuacaucgacaagcagcugcugcccauccugaacaagcagagcugcagcaucagcaacaucgagaccgugaucgaguuccagcagaagaacaacagacugcuggagaucaccagagaguucagcgugaacgccggcgugaccacccccgugagcaccuacaugcugaccaacagcgagcugcugagccugaucaacgacaugcccaucaccaacgaccagaagaagcugaugagcaacaacgugcagaucgugagacagcagagcuacagcaucaugugcaucaucaaggaggaggugcuggccuacguggugcagcugccccuguacggcgugaucgacacccccugcuggaagcugcacaccagcccccugugcaccaccaacaccaaggagggcagcaacaucugccugaccagaaccgacagaggcugguacugcgacaacgccggcagcgugagcuucuucccccaggccgagaccugcaaggugcagagcaacagaguguucugcgacaccaugaacagcagaacccugcccagcgaggugaaccugugcaacaucgacaucuucaaccccaaguacgacugcaagaucaugaccagcaagaccgacgugagcagcagcgugaucaccagccugggcgccaucgugagcugcuacggcaagaccaagugcaccgccagcaacaagaacagaggcaucaucaagaccuucagcaacggcugcgacuacgugagcaacaagggcguggacaccgugagcgugggcaacacccuguacuacgugaacaagcaggagggcaagagccuguacgugaagggcgagcccaucaucaacuucuacgacccccugguguuccccagcgacgaguucgacgccagcaucagccaggugaacgagaagaucaaccagagccuggccuucaucagaaagagcgacgagcugcugcacaacgugaacgugggcaagagcaccaccaacaucaugaucaccaccaucaucaucgugaucaucgugauccugcugcugcugaucgccgugggccuguuccuguacugcaaggccagaagcacccccgugacccugagcaaggaccagcugagcggcaucaacaacaucgccuucagcaacugaggacuagugaagggaacacccaaauuuaauucagccuuaagcacaauuaauuaagagugaaacguaauuguacaagcaguuggucacccaccauagggcaugaucaacaccgcaaccuuuccuuuuucccccagugauucugaaaaaccccucuucccuucagcuugcuuagauguuccaaauuuaguaagcuuaaggcggccuacagaagaaaaagaaaaaaaaggccacaaaaguucccucucacuuucaguaaauaaaauaaaagcagcaacagaaauaaagaaauaaaugaaauucaaaaugaaauaaauauuguguugugcagcauuaaaaaaucaauaaaaauuaaaaaugagcaagaucuaaaaaaaaaaaaaaaaaaaaaaaaaaaaaaaaaaaaaaaaaaaaaaaaaaaaaaaaaaaaaaaaugcaucccccccccccccccccccccccccccccccaaaggcucuuuucagagccaccagaauu

SEQ ID NO: 13480 - RNA, 2199 nt, Artificial Sequence
  mRNA product Design g-3 comprising derived and/or modified sequence from HRSV(Memphis-37)__AIY60640.1__F_DSCav1_mut0 (opt5)
gggagaguccgcucagccagguugcagaagcggcuuagcguguguccuaaucuucucucugcguguagguaggccugugccgcaaacaagcuuaccauggagcugcccauccucaagaccaacgccauuacaacgauccuggcugccgugacccuuugcuucgcgagcucccagaauauuacagaagaguuuuaccaaucuaccuguagcgcugucuccaaaggcuaucugucugcccucagaacagggugguacaccagcguuaucacaauugaacuguccaacaucaaggagaauaaaugcaacggaaccgacgccaaggugaaacuuaucaagcaggaacuggauaaguauaaaaaugcugugacggagcuccagcugcugaugcagucuaccccugccgcuggcagcggguccgccauugcgagcggaaucgccgucuguaaggugcuccaccuggagggcgaaguuaacaaaauuaagaaugcccuucugucuacaaacaaagcuguggucucccucagcaauggggugucuguucugaccuucaaggugcuugaccugaagaacuacaucgauaaacaacuccugccgauucugaauaagcaguccugcagcaucucuaacauugagacagucaucgaauuucagcagaaaaauaaccggcuccuggagaucacccgcgaguucuccgugaaugcuggagugacgacacccgucagcaccuauaugcuuacaaacuccgaacugcucucucugauuaacgacaugccuaucaccaaugaucaaaagaaacuuaugagcaacaauguucagauugugagacagcaguccuacagcaucauguguauuaucaaggaggaagugcuggccuaugucgugcaacucccccuguacggcguuaucgacaccccuugcuggaaacugcauacaucuccccucuguacgaccaacacaaaggagggcuccaauauuugccugacccggacagaucgcgggugguacugugacaacgcgggaagcgugagcuuuuucccucaggccgaaaccugcaagguccagucuaauagaguguuuugugauacgaugaacuccagaacacugccgucugagguuaaucucugcaacaucgacauuuucaaucccaaauaugauugcaagaucaugaccagcaaaaccgacguguccagcucugucauuacaucccugggcgcuaucgugagcuguuacgggaagaccaaaugcacagccucuaacaagaaucggggaaucauuaagacguuuuccaacggcugugauuaugucagcaauaaagggguggacaccguuuccgugggaaacacacuuuacuaugucaacaagcaagagggcaaaucucuguacgugaagggcgaaccuaucauuaauuucuaugacccccucguuuuuccuagcgaugaguucgacgcuuccaucucucaggugaacgaaaagauuaaucagagccuggccuuuauccgcaaguccgaugagcugcuccacaacgucaauguggggaaaagcaccacaaacauuaugaucaccacgaucauuaucgugauuaucguuauucugcuucugcucaucgccgucggacuguuccuguacugcaaagcuagaucuacccccgugacacuuuccaaggaccagcucagcggcaucaauaacauugcguucucuaauugaggacuagugaagggaacacccaaauuuaauucagccuuaagcacaauuaauuaagagugaaacguaauuguacaagcaguuggucacccaccauagggcaugaucaacaccgcaaccuuuccuuuuucccccagugauucugaaaaaccccucuucccuucagcuugcuuagauguuccaaauuuaguaagcuuaaggcggccuacagaagaaaaagaaaaaaaaggccacaaaaguucccucucacuuucaguaaauaaaauaaaagcagcaacagaaauaaagaaauaaaugaaauucaaaaugaaauaaauauuguguugugcagcauuaaaaaaucaauaaaaauuaaaaaugagcaagaucuaaaaaaaaaaaaaaaaaaaaaaaaaaaaaaaaaaaaaaaaaaaaaaaaaaaaaaaaaaaaaaaaugcaucccccccccccccccccccccccccccccccaaaggcucuuuucagagccaccagaauu

SEQ ID NO: 13481 - RNA, 2199 nt, Artificial Sequence
  mRNA product Design g-3 comprising derived and/or modified sequence from HRSV(Memphis-37)__AIY60640.1__F_DSCav1_mut0 (opt6)
gggagaguccgcucagccagguugcagaagcggcuuagcguguguccuaaucuucucucugcguguagguaggccugugccgcaaacaagcuuaccauggaauuaccaaucuuaaaaacaaacgccauaacaaccauccucgcagcaguaacccuaugcuuugcauccucacaaaacauaacugaagaauuuuaccaaucaacaugcucagcaguaucaaaaggauaucuaucagcccucagaacaggaugguacacaucagucauuacaaucgaacuuucaaacauaaaagaaaauaaauguaacggcacagaugccaaaguaaaauuaauuaaacaagaacuugacaaauacaaaaaugccguaacagaacuacaacuacuaaugcaaaguacuccugcugcaggaagcggaucugcaauagcaucagguauagcaguauguaaaguucuacaccuagaaggcgaaguaaacaaaauuaaaaacgcacuacucucaacaaauaaagcaguugucucccuaucaaacggaguaucaguauuaacuuucaaaguacuagaccucaaaaacuauauagacaaacaacuauuaccaauacuaaacaaacaaagcugcucuaucuccaacaucgaaacaguaauagaauuucaacaaaaaaauaauagacuacuugaaauaaccagagaauuuucaguaaacgccggaguaacaacaccaguaucaacuuacaugcuaacaaacuccgaacuacuaucauuaauaaacgacaugcccauaacaaacgaccaaaaaaaauuaaugucaaacaacguccaaaucguacgacaacaauccuauuccauaauguguauaauaaaagaagaaguacuagcauacguaguacaauuaccauuauauggaguaauagauaccccuugcuggaaacuacacacaucaccccuaugcacuacaaauacgaaagaagguucaaauauaugcuuaacuagaaccgauagagguugguauugugacaacgcuggaucaguaucauuuuucccacaagcagaaacaugcaaaguacaaucaaacagaguauuuugcgacacuaugaacucaagaacuuuaccauccgaaguuaaucuauguaacauagauauauuuaacccaaaauacgacugcaaaauaaugacaucaaaaacagauguaucaucaucaguuauaaccucccucggagcaauaguaucaugcuauggaaaaacaaaaugcacagcaucaaacaaaaaucguggaauuauaaaaacauucucaaacggcugugacuacgucagcaauaaaggaguagacacagucucaguaggaaacacuuuauacuauguuaacaaacaagaaggaaaaucacucuacgucaaaggcgaaccaauaauaaauuucuaugacccacucguauucccauccgacgaauuugacgcaucaauaucacaaguaaaugaaaaaauaaaccaaagccuagcauuuauacgaaaaucagacgaacuacuacacaacguaaacguagguaaaagcacaaccaauauaaugauaacaacaauaaucauaguaauaaucguaauauuacuauuacuaauagcuguaggauuguuccuauacugcaaagcaagaucaacaccaguaaccuuaucuaaggaccaacuaucaggaaucaauaacauugccuucucaaacuaaggacuagugaagggaacacccaaauuuaauucagccuuaagcacaauuaauuaagagugaaacguaauuguacaagcaguuggucacccaccauagggcaugaucaacaccgcaaccuuuccuuuuucccccagugauucugaaaaaccccucuucccuucagcuugcuuagauguuccaaauuuaguaagcuuaaggcggccuacagaagaaaaagaaaaaaaaggccacaaaaguucccucucacuuucaguaaauaaaauaaaagcagcaacagaaauaaagaaauaaaugaaauucaaaaugaaauaaauauuguguugugcagcauuaaaaaaucaauaaaaauuaaaaaugagcaagaucuaaaaaaaaaaaaaaaaaaaaaaaaaaaaaaaaaaaaaaaaaaaaaaaaaaaaaaaaaaaaaaaaugcaucccccccccccccccccccccccccccccccaaaggcucuuuucagagccaccagaauu

SEQ ID NO: 13482 - RNA, 2199 nt, Artificial Sequence
  mRNA product Design g-3 comprising derived and/or modified sequence from HRSV(Memphis-37)__AIY60640.1__F_DSCav1_mut0 (opt11)
gggagaguccgcucagccagguugcagaagcggcuuagcguguguccuaaucuucucucugcguguagguaggccugugccgcaaacaagcuuaccauggaacuaccuauccuuaaaaccaacgcaaucaccaccauccuugccgcagucacacucugcuucgcauccucacagaacaucaccgaagaguucuaucaaucaaccugcuccgccguauccaaaggauaccucucagcccuccgcaccggcugguauaccucagucauaacaaucgaauuaucaaauaucaaggagaacaaaugcaacggcaccgacgccaaagucaaacucauaaaacaagaacuagacaaauacaaaaacgccgugacagaacuccaacuccucaugcaguccacccccgcagccggauccggcucagcaaucgccucgggcauugcaguaugcaaaguccuccaccucgaaggcgaagucaacaaaaucaaaaacgcccuccucuccaccaacaaagccgucgucucccucuccaacggcguaucuguccucacuuucaagguccucgaccucaaaaacuacaucgacaagcaacuacuuccaauccucaacaagcaauccugcucaaucucaaacaucgaaaccguaauagaguuccaacaaaagaacaaccgccuccucgaaaucacccgcgaguucuccguuaacgccggugucacuaccccagucagcaccuacaugcucaccaacuccgaacuccuuucucugaucaacgacaugccaaucaccaacgaucaaaagaaauuaauguccaacaacguccagaucguccgccaacaaagcuacagcaucaugugcaucauaaaagaagaaguacuugcguacguaguucaacuaccccuuuacggcguaaucgacaccccaugcuggaaacuccacaccuccccacuaugcaccaccaacaccaaagaaggauccaacaucugccuaacccgcaccgaccgcggcugguacugcgacaacgcugggagcgucucauucuucccacaagcagaaaccugcaaaguccaaucgaaccgcguauucugcgacaccaugaacuccagaacccuaccaagcgaagucaaucuuugcaacaucgacauauuuaaccccaaauacgacugcaaaaucaugacaucaaagaccgacgucucaucuucagucauuaccucacucggcgcaauugucagcugcuacggaaagaccaaauguaccgccuccaauaaaaaccguggaaucauaaaaaccuuuagcaacggcugcgacuacgucuccaacaaaggagucgacaccgucuccgucggcaacacccucuacuacgucaacaaacaagaaggaaaaucccucuacgugaaaggcgaacccauaauaaacuucuacgacccccuagucuuccccucugacgaguucgacgccuccaucucccaagucaacgaaaagauaaaucaaucacuagccuucauacgcaaaucugacgaacuucuccacaacgucaacgucggcaaauccaccaccaacauaaugaucacaacgauaauaaucgugaucauaguaauccuacuucuccucaucgcaguaggucuauuccuauacugcaaagcccgcagcacccccgucacccuaucaaaagaccaacucuccggcaucaacaacaucgccuucucaaacuaaggacuagugaagggaacacccaaauuuaauucagccuuaagcacaauuaauuaagagugaaacguaauuguacaagcaguuggucacccaccauagggcaugaucaacaccgcaaccuuuccuuuuucccccagugauucugaaaaaccccucuucccuucagcuugcuuagauguuccaaauuuaguaagcuuaaggcggccuacagaagaaaaagaaaaaaaaggccacaaaaguucccucucacuuucaguaaauaaaauaaaagcagcaacagaaauaaagaaauaaaugaaauucaaaaugaaauaaauauuguguugugcagcauuaaaaaaucaauaaaaauuaaaaaugagcaagaucuaaaaaaaaaaaaaaaaaaaaaaaaaaaaaaaaaaaaaaaaaaaaaaaaaaaaaaaaaaaaaaaaugcaucccccccccccccccccccccccccccccccaaaggcucuuuucagagccaccagaauu

SEQ ID NO: 13483 - RNA, 1994 nt, Artificial Sequence
  mRNA product Design g-4 comprising derived and/or modified sequence from HRSV(Memphis-37)__AIY60640.1__F_DSCav1_mut0 (opt1)
gggagacuccugucgggcggaaguaggaggaguagaguuuaaaaacaguacucuuuuuccgguucgggacguaguugaagcaacgacaagccggauaaccgcucuugagacaggaagcuuaccauggagcugcccauccucaagaccaacgccaucaccacgauccuggccgcggugacccugugcuucgccagcucccagaacaucaccgaggaguucuaccagagcacgugcuccgccgucagcaagggcuaccucuccgcccugcgcaccgggugguacaccagcgugaucaccaucgagcuguccaacaucaaggagaacaagugcaacggcaccgacgccaaggugaagcucaucaagcaggagcuggacaaguacaagaacgcggucacggagcugcagcuccugaugcagagcaccccggccgccggcuccgggagcgcgaucgccuccggcaucgccgucugcaaggugcugcaccucgagggcgaggugaacaagaucaagaacgcccugcuguccaccaacaaggccgucgugagccucuccaacggggugagcguccugaccuucaaggugcuggaccucaagaacuacaucgacaagcagcugcugcccauccugaacaagcagagcugcuccaucagcaacaucgagaccgucaucgaguuccagcagaagaacaaccgccuccuggagaucacgcgggaguucagcgugaacgcgggcgugaccacccccgucuccaccuacaugcugacgaacagcgagcuccugucccugaucaacgacaugccgaucaccaacgaccagaagaagcucaugagcaacaacgugcagaucgugcgccagcaguccuacagcaucaugugcaucaucaaggaggagguccuggccuacguggugcagcugccccucuacggggucaucgacacccccugcuggaagcugcacaccagcccccugugcacgaccaacaccaaggagggcuccaacaucugccucacccggacggaccgcgggugguacugcgacaacgccggcagcguguccuucuucccgcaggccgagaccugcaagguccagagcaaccggguguucugcgacaccaugaacucccggacccugcccagcgaggugaaccucugcaacaucgacaucuucaaccccaaguacgacugcaagaucaugacguccaagaccgacgucagcuccagcgugaucaccucccugggcgccaucgugagcugcuacgggaagaccaagugcacggcgagcaacaagaaccgcggcaucaucaagaccuucuccaacgggugcgacuacgucagcaacaagggcguggacaccguguccgucggcaacacccuguacuacgugaacaagcaggagggcaagagccucuacgugaagggggagcccaucaucaacuucuacgacccgcuggucuuccccuccgacgaguucgacgccagcaucucccaggugaacgagaagaucaaccagagccuggccuucauccggaaguccgacgagcuccugcacaacgugaacgucggcaagagcaccacgaacaucaugaucaccaccaucaucaucgugaucaucgugauccugcugcuccugaucgccgucgggcuguuccucuacugcaaggcccgcuccacccccgugacgcugagcaaggaccagcuguccgggaucaacaacaucgcguucagcaacugaggacuaguaauaaggaaacuguaugaaugucugugggcaggaagugaagagauccuucuguaaagguuuuuggaauuaugucugcugaauaauaaacuuuuuugaaauaauaaaucugguagaaaaaugagaucuaaaaaaaaaaaaaaaaaaaaaaaaaaaaaaaaaaaaaaaaaaaaaaaaaaaaaaaaaaaaaaaaugcaucccccccccccccccccccccccccccccccaaaggcucuuuucagagccaccagaauu

SEQ ID NO: 13484 - RNA, 1994 nt, Artificial Sequence
  mRNA product Design g-4 comprising derived and/or modified sequence from HRSV(Memphis-37)__AIY60640.1__F_DSCav1_mut0 (opt1)
gggagacuccugucgggcggaaguaggaggaguagaguuuaaaaacaguacucuuuuuccgguucgggacguaguugaagcaacgacaagccggauaaccgcucuugagacaggaagcuuaccauggagcugcccauccucaagaccaacgccaucaccacgauccuggccgcggugacccugugcuucgccagcucccagaacaucaccgaggaguucuaccagagcacgugcuccgccgucagcaagggcuaccucuccgcccugcgcaccgggugguacaccagcgugaucaccaucgagcuguccaacaucaaggagaacaagugcaacggcaccgacgccaaggugaagcucaucaagcaggagcuggacaaguacaagaacgcggucacggagcugcagcuccugaugcagagcaccccggccgccggguccggcagcgccaucgcguccgggaucgccgugugcaaggugcugcaccucgagggcgaggucaacaagaucaagaacgcccugcugagcaccaacaaggccguggugucccucagcaacggcgucuccgugcugaccuucaaggugcuggaccucaagaacuacaucgacaagcagcugcugcccauccucaacaagcagagcugcuccaucagcaacaucgagacggucaucgaguuccagcagaagaacaaccggcugcuggagaucacccgcgaguucuccgugaacgccggggugaccacccccgucagcacguacaugcucaccaacagcgagcugcugucccucaucaacgacaugcccaucaccaacgaccagaagaagcugaugagcaacaacgugcagaucgugcggcagcaguccuacagcaucaugugcaucaucaaggaggagguccuggcguacguggugcagcucccgcuguacggcgucaucgacacccccugcuggaagcugcacacgagcccccucugcaccaccaacaccaaggagggguccaacaucugccugacgcgcaccgaccggggcugguacugcgacaacgccggguccgugagcuucuucccccaggccgagaccugcaaggugcaguccaaccgcgucuucugcgacaccaugaacagccggacgcucccguccgaggugaaccugugcaacaucgacaucuucaaccccaaguacgacugcaagaucaugaccagcaagaccgacgucuccagcuccgugaucaccagccugggcgccaucguguccugcuacggcaagacgaagugcaccgccagcaacaagaaccgggggaucaucaagaccuucuccaacggcugcgacuacgucagcaacaaggggguggacaccgugagcgucggcaacacgcucuacuacgugaacaagcaggagggcaagucccuguacgugaagggggagcccaucaucaacuucuacgacccccuggucuucccgagcgacgaguucgacgcguccaucagccaggugaacgagaagaucaaccagucccucgccuucauccgcaagagcgacgagcugcugcacaacgugaacgucggcaaguccaccaccaacaucaugaucaccaccaucaucaucgugaucaucgugauccuccugcugcucaucgccgucgggcuguuccuguacugcaaggcccggagcacgcccgugacccuguccaaggaccagcucagcggcaucaacaacaucgccuucuccaacugaggacuaguaauaaggaaacuguaugaaugucugugggcaggaagugaagagauccuucuguaaagguuuuuggaauuaugucugcugaauaauaaacuuuuuugaaauaauaaaucugguagaaaaaugagaucuaaaaaaaaaaaaaaaaaaaaaaaaaaaaaaaaaaaaaaaaaaaaaaaaaaaaaaaaaaaaaaaaugcaucccccccccccccccccccccccccccccccaaaggcucuuuucagagccaccagaauu

SEQ ID NO: 13485 - RNA, 1994 nt, Artificial Sequence
  mRNA product Design g-4 comprising derived and/or modified sequence from HRSV(Memphis-37)__AIY60640.1__F_DSCav1_mut0 (opt2)
gggagacuccugucgggcggaaguaggaggaguagaguuuaaaaacaguacucuuuuuccgguucgggacguaguugaagcaacgacaagccggauaaccgcucuugagacaggaagcuuaccauggagcuccccauccucaagaccaacgccaucaccaccauccucgccgccgucacccucugcuucgccuccucccagaacaucaccgaggaguucuaccaguccaccugcuccgccgucuccaagggcuaccucuccgcccuccgcaccggcugguacaccuccgucaucaccaucgagcucuccaacaucaaggagaacaagugcaacggcaccgacgccaaggucaagcucaucaagcaggagcucgacaaguacaagaacgccgucaccgagcuccagcuccucaugcaguccacccccgccgccggcuccggcuccgccaucgccuccggcaucgccgucugcaagguccuccaccucgagggcgaggucaacaagaucaagaacgcccuccucuccaccaacaaggccgucgucucccucuccaacggcgucuccguccucaccuucaagguccucgaccucaagaacuacaucgacaagcagcuccuccccauccucaacaagcaguccugcuccaucuccaacaucgagaccgucaucgaguuccagcagaagaacaaccgccuccucgagaucacccgcgaguucuccgucaacgccggcgucaccacccccgucuccaccuacaugcucaccaacuccgagcuccucucccucaucaacgacaugcccaucaccaacgaccagaagaagcucauguccaacaacguccagaucguccgccagcaguccuacuccaucaugugcaucaucaaggaggagguccucgccuacgucguccagcucccccucuacggcgucaucgacacccccugcuggaagcuccacaccuccccccucugcaccaccaacaccaaggagggcuccaacaucugccucacccgcaccgaccgcggcugguacugcgacaacgccggcuccgucuccuucuucccccaggccgagaccugcaagguccaguccaaccgcgucuucugcgacaccaugaacucccgcacccuccccuccgaggucaaccucugcaacaucgacaucuucaaccccaaguacgacugcaagaucaugaccuccaagaccgacgucuccuccuccgucaucaccucccucggcgccaucgucuccugcuacggcaagaccaagugcaccgccuccaacaagaaccgcggcaucaucaagaccuucuccaacggcugcgacuacgucuccaacaagggcgucgacaccgucuccgucggcaacacccucuacuacgucaacaagcaggagggcaagucccucuacgucaagggcgagcccaucaucaacuucuacgacccccucgucuuccccuccgacgaguucgacgccuccaucucccaggucaacgagaagaucaaccagucccucgccuucauccgcaaguccgacgagcuccuccacaacgucaacgucggcaaguccaccaccaacaucaugaucaccaccaucaucaucgucaucaucgucauccuccuccuccucaucgccgucggccucuuccucuacugcaaggcccgcuccacccccgucacccucuccaaggaccagcucuccggcaucaacaacaucgccuucuccaacugaggacuaguaauaaggaaacuguaugaaugucugugggcaggaagugaagagauccuucuguaaagguuuuuggaauuaugucugcugaauaauaaacuuuuuugaaauaauaaaucugguagaaaaaugagaucuaaaaaaaaaaaaaaaaaaaaaaaaaaaaaaaaaaaaaaaaaaaaaaaaaaaaaaaaaaaaaaaaugcaucccccccccccccccccccccccccccccccaaaggcucuuuucagagccaccagaauu

SEQ ID NO: 13486 - RNA, 1994 nt, Artificial Sequence
  mRNA product Design g-4 comprising derived and/or modified sequence from HRSV(Memphis-37)__AIY60640.1__F_DSCav1_mut0 (opt3)
gggagacuccugucgggcggaaguaggaggaguagaguuuaaaaacaguacucuuuuuccgguucgggacguaguugaagcaacgacaagccggauaaccgcucuugagacaggaagcuuaccauggagcugcccauccucaagaccaacgccauuacaacuauacuugcugcagugacgcugugcuucgccagcucccagaauaucaccgaagaguuuuaccaaucuacauguucagcggucaguaaaggcuauuugagcgcuuuaagaacugggugguacaccuccguuauuacaaucgaacugucuaacauuaaggagaauaaaugcaacggaaccgacgccaaggugaaacuaaucaagcaggaacucgauaaguauaaaaaugcaguaacugagcugcagcuucugaugcagucgaccccugccgcugguucaggcagcgcaauagccagugggaucgcuguguguaaggucuugcaccucgagggagaagugaacaaaauuaagaaugcccugcuguccacaaacaaagcgguugugucucucagcaauggcgucuccguguuaacguucaagguacuggaccuuaagaacuacaucgauaaacaauugcugccaauucuaaauaagcagucaugcaguaucagcaacauagagacuguuauugaauuucagcagaaaaauaacaggcuccuggagaucacccgggaguucucugugaaugccggugucacaacuccgguguccaccuauaugcuuacaaacucagaacuguugagccucauuaacgacaugcccaucaccaaugaucaaaagaaacugaugaguaacaaugugcagaucguccgccagcagucuuacuccauuauguguauaaucaaggaggaaguuuuagcauaugugguacaacugccucucuacggggugauugacacgccaugcuggaaacuucauacuagcccccuguguacaaccaacacuaaggagggaucgaauaucugcuugacacgaaccgaucguggcugguacugugacaacgcuggcucugucuccuuuuucccucaggccgaaacgugcaaggugcagucaaauagaguguuuugugauaccaugaacaguagaacacugccaagcgaggugaaucucugcaacauagacauuuucaaucccaaauaugauugcaagaucaugacuuccaaaaccgacgucucuagcucagugaucacaagucugggggcaauuguauccuguuacggaaagacuaaaugcaccgcuagcaacaagaauagggguaucauuaagacauuuucuaacggcugugauuauguuucaaauaaagggguggacaccgucagugugggaaacacucuuuacuaugucaacaagcaagagggcaaaagccuguacgugaagggugaaccuauaaucaauuucuaugacccauugguuuuuccguccgaugaguucgacgccucuauuucgcagguuaacgagaaaaucaaucagagccucgcguuuauccggaaguccgaugaacuguuacacaacguaaaugucgggaagucaacgacaaacauuaugauaaccacuaucauuaucgugauuaucguuauacugcuacuccugaucgccgugggacuuuucuuguacugcaaagcacgcaguacccccgucacacugucuaaggaccagcucagcggcauuaauaacaucgcuuucuccaauugaggacuaguaauaaggaaacuguaugaaugucugugggcaggaagugaagagauccuucuguaaagguuuuuggaauuaugucugcugaauaauaaacuuuuuugaaauaauaaaucugguagaaaaaugagaucuaaaaaaaaaaaaaaaaaaaaaaaaaaaaaaaaaaaaaaaaaaaaaaaaaaaaaaaaaaaaaaaaugcaucccccccccccccccccccccccccccccccaaaggcucuuuucagagccaccagaauu

SEQ ID NO: 13487 - RNA, 1994 nt, Artificial Sequence
  mRNA product Design g-4 comprising derived and/or modified sequence from HRSV(Memphis-37)__AIY60640.1__F_DSCav1_mut0 (opt4)
gggagacuccugucgggcggaaguaggaggaguagaguuuaaaaacaguacucuuuuuccgguucgggacguaguugaagcaacgacaagccggauaaccgcucuugagacaggaagcuuaccauggagcugcccauccugaagaccaacgccaucaccaccauccuggccgccgugacccugugcuucgccagcagccagaacaucaccgaggaguucuaccagagcaccugcagcgccgugagcaagggcuaccugagcgcccugagaaccggcugguacaccagcgugaucaccaucgagcugagcaacaucaaggagaacaagugcaacggcaccgacgccaaggugaagcugaucaagcaggagcuggacaaguacaagaacgccgugaccgagcugcagcugcugaugcagagcacccccgccgccggcagcggcagcgccaucgccagcggcaucgccgugugcaaggugcugcaccuggagggcgaggugaacaagaucaagaacgcccugcugagcaccaacaaggccguggugagccugagcaacggcgugagcgugcugaccuucaaggugcuggaccugaagaacuacaucgacaagcagcugcugcccauccugaacaagcagagcugcagcaucagcaacaucgagaccgugaucgaguuccagcagaagaacaacagacugcuggagaucaccagagaguucagcgugaacgccggcgugaccacccccgugagcaccuacaugcugaccaacagcgagcugcugagccugaucaacgacaugcccaucaccaacgaccagaagaagcugaugagcaacaacgugcagaucgugagacagcagagcuacagcaucaugugcaucaucaaggaggaggugcuggccuacguggugcagcugccccuguacggcgugaucgacacccccugcuggaagcugcacaccagcccccugugcaccaccaacaccaaggagggcagcaacaucugccugaccagaaccgacagaggcugguacugcgacaacgccggcagcgugagcuucuucccccaggccgagaccugcaaggugcagagcaacagaguguucugcgacaccaugaacagcagaacccugcccagcgaggugaaccugugcaacaucgacaucuucaaccccaaguacgacugcaagaucaugaccagcaagaccgacgugagcagcagcgugaucaccagccugggcgccaucgugagcugcuacggcaagaccaagugcaccgccagcaacaagaacagaggcaucaucaagaccuucagcaacggcugcgacuacgugagcaacaagggcguggacaccgugagcgugggcaacacccuguacuacgugaacaagcaggagggcaagagccuguacgugaagggcgagcccaucaucaacuucuacgacccccugguguuccccagcgacgaguucgacgccagcaucagccaggugaacgagaagaucaaccagagccuggccuucaucagaaagagcgacgagcugcugcacaacgugaacgugggcaagagcaccaccaacaucaugaucaccaccaucaucaucgugaucaucgugauccugcugcugcugaucgccgugggccuguuccuguacugcaaggccagaagcacccccgugacccugagcaaggaccagcugagcggcaucaacaacaucgccuucagcaacugaggacuaguaauaaggaaacuguaugaaugucugugggcaggaagugaagagauccuucuguaaagguuuuuggaauuaugucugcugaauaauaaacuuuuuugaaauaauaaaucugguagaaaaaugagaucuaaaaaaaaaaaaaaaaaaaaaaaaaaaaaaaaaaaaaaaaaaaaaaaaaaaaaaaaaaaaaaaaugcaucccccccccccccccccccccccccccccccaaaggcucuuuucagagccaccagaauu

SEQ ID NO: 13488 - RNA, 1994 nt, Artificial Sequence
  mRNA product Design g-4 comprising derived and/or modified sequence from HRSV(Memphis-37)__AIY60640.1__F_DSCav1_mut0 (opt5)
gggagacuccugucgggcggaaguaggaggaguagaguuuaaaaacaguacucuuuuuccgguucgggacguaguugaagcaacgacaagccggauaaccgcucuugagacaggaagcuuaccauggagcugcccauccucaagaccaacgccauuacaacgauccuggcugccgugacccuuugcuucgcgagcucccagaauauuacagaagaguuuuaccaaucuaccuguagcgcugucuccaaaggcuaucugucugcccucagaacagggugguacaccagcguuaucacaauugaacuguccaacaucaaggagaauaaaugcaacggaaccgacgccaaggugaaacuuaucaagcaggaacuggauaaguauaaaaaugcugugacggagcuccagcugcugaugcagucuaccccugccgcuggcagcggguccgccauugcgagcggaaucgccgucuguaaggugcuccaccuggagggcgaaguuaacaaaauuaagaaugcccuucugucuacaaacaaagcuguggucucccucagcaauggggugucuguucugaccuucaaggugcuugaccugaagaacuacaucgauaaacaacuccugccgauucugaauaagcaguccugcagcaucucuaacauugagacagucaucgaauuucagcagaaaaauaaccggcuccuggagaucacccgcgaguucuccgugaaugcuggagugacgacacccgucagcaccuauaugcuuacaaacuccgaacugcucucucugauuaacgacaugccuaucaccaaugaucaaaagaaacuuaugagcaacaauguucagauugugagacagcaguccuacagcaucauguguauuaucaaggaggaagugcuggccuaugucgugcaacucccccuguacggcguuaucgacaccccuugcuggaaacugcauacaucuccccucuguacgaccaacacaaaggagggcuccaauauuugccugacccggacagaucgcgggugguacugugacaacgcgggaagcgugagcuuuuucccucaggccgaaaccugcaagguccagucuaauagaguguuuugugauacgaugaacuccagaacacugccgucugagguuaaucucugcaacaucgacauuuucaaucccaaauaugauugcaagaucaugaccagcaaaaccgacguguccagcucugucauuacaucccugggcgcuaucgugagcuguuacgggaagaccaaaugcacagccucuaacaagaaucggggaaucauuaagacguuuuccaacggcugugauuaugucagcaauaaagggguggacaccguuuccgugggaaacacacuuuacuaugucaacaagcaagagggcaaaucucuguacgugaagggcgaaccuaucauuaauuucuaugacccccucguuuuuccuagcgaugaguucgacgcuuccaucucucaggugaacgaaaagauuaaucagagccuggccuuuauccgcaaguccgaugagcugcuccacaacgucaauguggggaaaagcaccacaaacauuaugaucaccacgaucauuaucgugauuaucguuauucugcuucugcucaucgccgucggacuguuccuguacugcaaagcuagaucuacccccgugacacuuuccaaggaccagcucagcggcaucaauaacauugcguucucuaauugaggacuaguaauaaggaaacuguaugaaugucugugggcaggaagugaagagauccuucuguaaagguuuuuggaauuaugucugcugaauaauaaacuuuuuugaaauaauaaaucugguagaaaaaugagaucuaaaaaaaaaaaaaaaaaaaaaaaaaaaaaaaaaaaaaaaaaaaaaaaaaaaaaaaaaaaaaaaaugcaucccccccccccccccccccccccccccccccaaaggcucuuuucagagccaccagaauu

SEQ ID NO: 13489 - RNA, 1994 nt, Artificial Sequence
  mRNA product Design g-4 comprising derived and/or modified sequence from HRSV(Memphis-37)__AIY60640.1__F_DSCav1_mut0 (opt6)
gggagacuccugucgggcggaaguaggaggaguagaguuuaaaaacaguacucuuuuuccgguucgggacguaguugaagcaacgacaagccggauaaccgcucuugagacaggaagcuuaccauggaauuaccaaucuuaaaaacaaacgccauaacaaccauccucgcagcaguaacccuaugcuuugcauccucacaaaacauaacugaagaauuuuaccaaucaacaugcucagcaguaucaaaaggauaucuaucagcccucagaacaggaugguacacaucagucauuacaaucgaacuuucaaacauaaaagaaaauaaauguaacggcacagaugccaaaguaaaauuaauuaaacaagaacuugacaaauacaaaaaugccguaacagaacuacaacuacuaaugcaaaguacuccugcugcaggaagcggaucugcaauagcaucagguauagcaguauguaaaguucuacaccuagaaggcgaaguaaacaaaauuaaaaacgcacuacucucaacaaauaaagcaguugucucccuaucaaacggaguaucaguauuaacuuucaaaguacuagaccucaaaaacuauauagacaaacaacuauuaccaauacuaaacaaacaaagcugcucuaucuccaacaucgaaacaguaauagaauuucaacaaaaaaauaauagacuacuugaaauaaccagagaauuuucaguaaacgccggaguaacaacaccaguaucaacuuacaugcuaacaaacuccgaacuacuaucauuaauaaacgacaugcccauaacaaacgaccaaaaaaaauuaaugucaaacaacguccaaaucguacgacaacaauccuauuccauaauguguauaauaaaagaagaaguacuagcauacguaguacaauuaccauuauauggaguaauagauaccccuugcuggaaacuacacacaucaccccuaugcacuacaaauacgaaagaagguucaaauauaugcuuaacuagaaccgauagagguugguauugugacaacgcuggaucaguaucauuuuucccacaagcagaaacaugcaaaguacaaucaaacagaguauuuugcgacacuaugaacucaagaacuuuaccauccgaaguuaaucuauguaacauagauauauuuaacccaaaauacgacugcaaaauaaugacaucaaaaacagauguaucaucaucaguuauaaccucccucggagcaauaguaucaugcuauggaaaaacaaaaugcacagcaucaaacaaaaaucguggaauuauaaaaacauucucaaacggcugugacuacgucagcaauaaaggaguagacacagucucaguaggaaacacuuuauacuauguuaacaaacaagaaggaaaaucacucuacgucaaaggcgaaccaauaauaaauuucuaugacccacucguauucccauccgacgaauuugacgcaucaauaucacaaguaaaugaaaaaauaaaccaaagccuagcauuuauacgaaaaucagacgaacuacuacacaacguaaacguagguaaaagcacaaccaauauaaugauaacaacaauaaucauaguaauaaucguaauauuacuauuacuaauagcuguaggauuguuccuauacugcaaagcaagaucaacaccaguaaccuuaucuaaggaccaacuaucaggaaucaauaacauugccuucucaaacuaaggacuaguaauaaggaaacuguaugaaugucugugggcaggaagugaagagauccuucuguaaagguuuuuggaauuaugucugcugaauaauaaacuuuuuugaaauaauaaaucugguagaaaaaugagaucuaaaaaaaaaaaaaaaaaaaaaaaaaaaaaaaaaaaaaaaaaaaaaaaaaaaaaaaaaaaaaaaaugcaucccccccccccccccccccccccccccccccaaaggcucuuuucagagccaccagaauu

SEQ ID NO: 13490 - RNA, 1994 nt, Artificial Sequence
  mRNA product Design g-4 comprising derived and/or modified sequence from HRSV(Memphis-37)__AIY60640.1__F_DSCav1_mut0 (opt11)
gggagacuccugucgggcggaaguaggaggaguagaguuuaaaaacaguacucuuuuuccgguucgggacguaguugaagcaacgacaagccggauaaccgcucuugagacaggaagcuuaccauggaacuaccuauccuuaaaaccaacgcaaucaccaccauccuugccgcagucacacucugcuucgcauccucacagaacaucaccgaagaguucuaucaaucaaccugcuccgccguauccaaaggauaccucucagcccuccgcaccggcugguauaccucagucauaacaaucgaauuaucaaauaucaaggagaacaaaugcaacggcaccgacgccaaagucaaacucauaaaacaagaacuagacaaauacaaaaacgccgugacagaacuccaacuccucaugcaguccacccccgcagccggauccggcucagcaaucgccucgggcauugcaguaugcaaaguccuccaccucgaaggcgaagucaacaaaaucaaaaacgcccuccucuccaccaacaaagccgucgucucccucuccaacggcguaucuguccucacuuucaagguccucgaccucaaaaacuacaucgacaagcaacuacuuccaauccucaacaagcaauccugcucaaucucaaacaucgaaaccguaauagaguuccaacaaaagaacaaccgccuccucgaaaucacccgcgaguucuccguuaacgccggugucacuaccccagucagcaccuacaugcucaccaacuccgaacuccuuucucugaucaacgacaugccaaucaccaacgaucaaaagaaauuaauguccaacaacguccagaucguccgccaacaaagcuacagcaucaugugcaucauaaaagaagaaguacuugcguacguaguucaacuaccccuuuacggcguaaucgacaccccaugcuggaaacuccacaccuccccacuaugcaccaccaacaccaaagaaggauccaacaucugccuaacccgcaccgaccgcggcugguacugcgacaacgcugggagcgucucauucuucccacaagcagaaaccugcaaaguccaaucgaaccgcguauucugcgacaccaugaacuccagaacccuaccaagcgaagucaaucuuugcaacaucgacauauuuaaccccaaauacgacugcaaaaucaugacaucaaagaccgacgucucaucuucagucauuaccucacucggcgcaauugucagcugcuacggaaagaccaaauguaccgccuccaauaaaaaccguggaaucauaaaaaccuuuagcaacggcugcgacuacgucuccaacaaaggagucgacaccgucuccgucggcaacacccucuacuacgucaacaaacaagaaggaaaaucccucuacgugaaaggcgaacccauaauaaacuucuacgacccccuagucuuccccucugacgaguucgacgccuccaucucccaagucaacgaaaagauaaaucaaucacuagccuucauacgcaaaucugacgaacuucuccacaacgucaacgucggcaaauccaccaccaacauaaugaucacaacgauaauaaucgugaucauaguaauccuacuucuccucaucgcaguaggucuauuccuauacugcaaagcccgcagcacccccgucacccuaucaaaagaccaacucuccggcaucaacaacaucgccuucucaaacuaaggacuaguaauaaggaaacuguaugaaugucugugggcaggaagugaagagauccuucuguaaagguuuuuggaauuaugucugcugaauaauaaacuuuuuugaaauaauaaaucugguagaaaaaugagaucuaaaaaaaaaaaaaaaaaaaaaaaaaaaaaaaaaaaaaaaaaaaaaaaaaaaaaaaaaaaaaaaaugcaucccccccccccccccccccccccccccccccaaaggcucuuuucagagccaccagaauu

SEQ ID NO: 13491 - RNA, 1970 nt, Artificial Sequence
  mRNA product Design g-5 comprising derived and/or modified sequence from HRSV(Memphis-37)__AIY60640.1__F_DSCav1_mut0 (opt1)
gggagacccgugacccggaaguuguacggcuacgcgacuuucccucccacaaacccucgcgcccuuccuuuccuacuugggcccggcagaaagcuuaccauggagcugcccauccucaagaccaacgccaucaccacgauccuggccgcggugacccugugcuucgccagcucccagaacaucaccgaggaguucuaccagagcacgugcuccgccgucagcaagggcuaccucuccgcccugcgcaccgggugguacaccagcgugaucaccaucgagcuguccaacaucaaggagaacaagugcaacggcaccgacgccaaggugaagcucaucaagcaggagcuggacaaguacaagaacgcggucacggagcugcagcuccugaugcagagcaccccggccgccggcuccgggagcgcgaucgccuccggcaucgccgucugcaaggugcugcaccucgagggcgaggugaacaagaucaagaacgcccugcuguccaccaacaaggccgucgugagccucuccaacggggugagcguccugaccuucaaggugcuggaccucaagaacuacaucgacaagcagcugcugcccauccugaacaagcagagcugcuccaucagcaacaucgagaccgucaucgaguuccagcagaagaacaaccgccuccuggagaucacgcgggaguucagcgugaacgcgggcgugaccacccccgucuccaccuacaugcugacgaacagcgagcuccugucccugaucaacgacaugccgaucaccaacgaccagaagaagcucaugagcaacaacgugcagaucgugcgccagcaguccuacagcaucaugugcaucaucaaggaggagguccuggccuacguggugcagcugccccucuacggggucaucgacacccccugcuggaagcugcacaccagcccccugugcacgaccaacaccaaggagggcuccaacaucugccucacccggacggaccgcgggugguacugcgacaacgccggcagcguguccuucuucccgcaggccgagaccugcaagguccagagcaaccggguguucugcgacaccaugaacucccggacccugcccagcgaggugaaccucugcaacaucgacaucuucaaccccaaguacgacugcaagaucaugacguccaagaccgacgucagcuccagcgugaucaccucccugggcgccaucgugagcugcuacgggaagaccaagugcacggcgagcaacaagaaccgcggcaucaucaagaccuucuccaacgggugcgacuacgucagcaacaagggcguggacaccguguccgucggcaacacccuguacuacgugaacaagcaggagggcaagagccucuacgugaagggggagcccaucaucaacuucuacgacccgcuggucuuccccuccgacgaguucgacgccagcaucucccaggugaacgagaagaucaaccagagccuggccuucauccggaaguccgacgagcuccugcacaacgugaacgucggcaagagcaccacgaacaucaugaucaccaccaucaucaucgugaucaucgugauccugcugcuccugaucgccgucgggcuguuccucuacugcaaggcccgcuccacccccgugacgcugagcaaggaccagcuguccgggaucaacaacaucgcguucagcaacugaggacuaguaauaaggaaacuguaugaaugucugugggcaggaagugaagagauccuucuguaaagguuuuuggaauuaugucugcugaauaauaaacuuuuuugaaauaauaaaucugguagaaaaaugagaucuaaaaaaaaaaaaaaaaaaaaaaaaaaaaaaaaaaaaaaaaaaaaaaaaaaaaaaaaaaaaaaaaugcaucccccccccccccccccccccccccccccccaaaggcucuuuucagagccaccagaauu

SEQ ID NO: 13492 - RNA, 1970 nt, Artificial Sequence
  mRNA product Design g-5 comprising derived and/or modified sequence from HRSV(Memphis-37)__AIY60640.1__F_DSCav1_mut0 (opt1)
gggagacccgugacccggaaguuguacggcuacgcgacuuucccucccacaaacccucgcgcccuuccuuuccuacuugggcccggcagaaagcuuaccauggagcugcccauccucaagaccaacgccaucaccacgauccuggccgcggugacccugugcuucgccagcucccagaacaucaccgaggaguucuaccagagcacgugcuccgccgucagcaagggcuaccucuccgcccugcgcaccgggugguacaccagcgugaucaccaucgagcuguccaacaucaaggagaacaagugcaacggcaccgacgccaaggugaagcucaucaagcaggagcuggacaaguacaagaacgcggucacggagcugcagcuccugaugcagagcaccccggccgccggguccggcagcgccaucgcguccgggaucgccgugugcaaggugcugcaccucgagggcgaggucaacaagaucaagaacgcccugcugagcaccaacaaggccguggugucccucagcaacggcgucuccgugcugaccuucaaggugcuggaccucaagaacuacaucgacaagcagcugcugcccauccucaacaagcagagcugcuccaucagcaacaucgagacggucaucgaguuccagcagaagaacaaccggcugcuggagaucacccgcgaguucuccgugaacgccggggugaccacccccgucagcacguacaugcucaccaacagcgagcugcugucccucaucaacgacaugcccaucaccaacgaccagaagaagcugaugagcaacaacgugcagaucgugcggcagcaguccuacagcaucaugugcaucaucaaggaggagguccuggcguacguggugcagcucccgcuguacggcgucaucgacacccccugcuggaagcugcacacgagcccccucugcaccaccaacaccaaggagggguccaacaucugccugacgcgcaccgaccggggcugguacugcgacaacgccggguccgugagcuucuucccccaggccgagaccugcaaggugcaguccaaccgcgucuucugcgacaccaugaacagccggacgcucccguccgaggugaaccugugcaacaucgacaucuucaaccccaaguacgacugcaagaucaugaccagcaagaccgacgucuccagcuccgugaucaccagccugggcgccaucguguccugcuacggcaagacgaagugcaccgccagcaacaagaaccgggggaucaucaagaccuucuccaacggcugcgacuacgucagcaacaaggggguggacaccgugagcgucggcaacacgcucuacuacgugaacaagcaggagggcaagucccuguacgugaagggggagcccaucaucaacuucuacgacccccuggucuucccgagcgacgaguucgacgcguccaucagccaggugaacgagaagaucaaccagucccucgccuucauccgcaagagcgacgagcugcugcacaacgugaacgucggcaaguccaccaccaacaucaugaucaccaccaucaucaucgugaucaucgugauccuccugcugcucaucgccgucgggcuguuccuguacugcaaggcccggagcacgcccgugacccuguccaaggaccagcucagcggcaucaacaacaucgccuucuccaacugaggacuaguaauaaggaaacuguaugaaugucugugggcaggaagugaagagauccuucuguaaagguuuuuggaauuaugucugcugaauaauaaacuuuuuugaaauaauaaaucugguagaaaaaugagaucuaaaaaaaaaaaaaaaaaaaaaaaaaaaaaaaaaaaaaaaaaaaaaaaaaaaaaaaaaaaaaaaaugcaucccccccccccccccccccccccccccccccaaaggcucuuuucagagccaccagaauu

SEQ ID NO: 13493 - RNA, 1970 nt, Artificial Sequence
  mRNA product Design g-5 comprising derived and/or modified sequence from HRSV(Memphis-37)__AIY60640.1__F_DSCav1_mut0 (opt2)
gggagacccgugacccggaaguuguacggcuacgcgacuuucccucccacaaacccucgcgcccuuccuuuccuacuugggcccggcagaaagcuuaccauggagcuccccauccucaagaccaacgccaucaccaccauccucgccgccgucacccucugcuucgccuccucccagaacaucaccgaggaguucuaccaguccaccugcuccgccgucuccaagggcuaccucuccgcccuccgcaccggcugguacaccuccgucaucaccaucgagcucuccaacaucaaggagaacaagugcaacggcaccgacgccaaggucaagcucaucaagcaggagcucgacaaguacaagaacgccgucaccgagcuccagcuccucaugcaguccacccccgccgccggcuccggcuccgccaucgccuccggcaucgccgucugcaagguccuccaccucgagggcgaggucaacaagaucaagaacgcccuccucuccaccaacaaggccgucgucucccucuccaacggcgucuccguccucaccuucaagguccucgaccucaagaacuacaucgacaagcagcuccuccccauccucaacaagcaguccugcuccaucuccaacaucgagaccgucaucgaguuccagcagaagaacaaccgccuccucgagaucacccgcgaguucuccgucaacgccggcgucaccacccccgucuccaccuacaugcucaccaacuccgagcuccucucccucaucaacgacaugcccaucaccaacgaccagaagaagcucauguccaacaacguccagaucguccgccagcaguccuacuccaucaugugcaucaucaaggaggagguccucgccuacgucguccagcucccccucuacggcgucaucgacacccccugcuggaagcuccacaccuccccccucugcaccaccaacaccaaggagggcuccaacaucugccucacccgcaccgaccgcggcugguacugcgacaacgccggcuccgucuccuucuucccccaggccgagaccugcaagguccaguccaaccgcgucuucugcgacaccaugaacucccgcacccuccccuccgaggucaaccucugcaacaucgacaucuucaaccccaaguacgacugcaagaucaugaccuccaagaccgacgucuccuccuccgucaucaccucccucggcgccaucgucuccugcuacggcaagaccaagugcaccgccuccaacaagaaccgcggcaucaucaagaccuucuccaacggcugcgacuacgucuccaacaagggcgucgacaccgucuccgucggcaacacccucuacuacgucaacaagcaggagggcaagucccucuacgucaagggcgagcccaucaucaacuucuacgacccccucgucuuccccuccgacgaguucgacgccuccaucucccaggucaacgagaagaucaaccagucccucgccuucauccgcaaguccgacgagcuccuccacaacgucaacgucggcaaguccaccaccaacaucaugaucaccaccaucaucaucgucaucaucgucauccuccuccuccucaucgccgucggccucuuccucuacugcaaggcccgcuccacccccgucacccucuccaaggaccagcucuccggcaucaacaacaucgccuucuccaacugaggacuaguaauaaggaaacuguaugaaugucugugggcaggaagugaagagauccuucuguaaagguuuuuggaauuaugucugcugaauaauaaacuuuuuugaaauaauaaaucugguagaaaaaugagaucuaaaaaaaaaaaaaaaaaaaaaaaaaaaaaaaaaaaaaaaaaaaaaaaaaaaaaaaaaaaaaaaaugcaucccccccccccccccccccccccccccccccaaaggcucuuuucagagccaccagaauu

SEQ ID NO: 13494 - RNA, 1970 nt, Artificial Sequence
  mRNA product Design g-5 comprising derived and/or modified sequence from HRSV(Memphis-37)__AIY60640.1__F_DSCav1_mut0 (opt3)
gggagacccgugacccggaaguuguacggcuacgcgacuuucccucccacaaacccucgcgcccuuccuuuccuacuugggcccggcagaaagcuuaccauggagcugcccauccucaagaccaacgccauuacaacuauacuugcugcagugacgcugugcuucgccagcucccagaauaucaccgaagaguuuuaccaaucuacauguucagcggucaguaaaggcuauuugagcgcuuuaagaacugggugguacaccuccguuauuacaaucgaacugucuaacauuaaggagaauaaaugcaacggaaccgacgccaaggugaaacuaaucaagcaggaacucgauaaguauaaaaaugcaguaacugagcugcagcuucugaugcagucgaccccugccgcugguucaggcagcgcaauagccagugggaucgcuguguguaaggucuugcaccucgagggagaagugaacaaaauuaagaaugcccugcuguccacaaacaaagcgguugugucucucagcaauggcgucuccguguuaacguucaagguacuggaccuuaagaacuacaucgauaaacaauugcugccaauucuaaauaagcagucaugcaguaucagcaacauagagacuguuauugaauuucagcagaaaaauaacaggcuccuggagaucacccgggaguucucugugaaugccggugucacaacuccgguguccaccuauaugcuuacaaacucagaacuguugagccucauuaacgacaugcccaucaccaaugaucaaaagaaacugaugaguaacaaugugcagaucguccgccagcagucuuacuccauuauguguauaaucaaggaggaaguuuuagcauaugugguacaacugccucucuacggggugauugacacgccaugcuggaaacuucauacuagcccccuguguacaaccaacacuaaggagggaucgaauaucugcuugacacgaaccgaucguggcugguacugugacaacgcuggcucugucuccuuuuucccucaggccgaaacgugcaaggugcagucaaauagaguguuuugugauaccaugaacaguagaacacugccaagcgaggugaaucucugcaacauagacauuuucaaucccaaauaugauugcaagaucaugacuuccaaaaccgacgucucuagcucagugaucacaagucugggggcaauuguauccuguuacggaaagacuaaaugcaccgcuagcaacaagaauagggguaucauuaagacauuuucuaacggcugugauuauguuucaaauaaagggguggacaccgucagugugggaaacacucuuuacuaugucaacaagcaagagggcaaaagccuguacgugaagggugaaccuauaaucaauuucuaugacccauugguuuuuccguccgaugaguucgacgccucuauuucgcagguuaacgagaaaaucaaucagagccucgcguuuauccggaaguccgaugaacuguuacacaacguaaaugucgggaagucaacgacaaacauuaugauaaccacuaucauuaucgugauuaucguuauacugcuacuccugaucgccgugggacuuuucuuguacugcaaagcacgcaguacccccgucacacugucuaaggaccagcucagcggcauuaauaacaucgcuuucuccaauugaggacuaguaauaaggaaacuguaugaaugucugugggcaggaagugaagagauccuucuguaaagguuuuuggaauuaugucugcugaauaauaaacuuuuuugaaauaauaaaucugguagaaaaaugagaucuaaaaaaaaaaaaaaaaaaaaaaaaaaaaaaaaaaaaaaaaaaaaaaaaaaaaaaaaaaaaaaaaugcaucccccccccccccccccccccccccccccccaaaggcucuuuucagagccaccagaauu

SEQ ID NO: 13495 - RNA, 1970 nt, Artificial Sequence
  mRNA product Design g-5 comprising derived and/or modified sequence from HRSV(Memphis-37)__AIY60640.1__F_DSCav1_mut0 (opt4)
gggagacccgugacccggaaguuguacggcuacgcgacuuucccucccacaaacccucgcgcccuuccuuuccuacuugggcccggcagaaagcuuaccauggagcugcccauccugaagaccaacgccaucaccaccauccuggccgccgugacccugugcuucgccagcagccagaacaucaccgaggaguucuaccagagcaccugcagcgccgugagcaagggcuaccugagcgcccugagaaccggcugguacaccagcgugaucaccaucgagcugagcaacaucaaggagaacaagugcaacggcaccgacgccaaggugaagcugaucaagcaggagcuggacaaguacaagaacgccgugaccgagcugcagcugcugaugcagagcacccccgccgccggcagcggcagcgccaucgccagcggcaucgccgugugcaaggugcugcaccuggagggcgaggugaacaagaucaagaacgcccugcugagcaccaacaaggccguggugagccugagcaacggcgugagcgugcugaccuucaaggugcuggaccugaagaacuacaucgacaagcagcugcugcccauccugaacaagcagagcugcagcaucagcaacaucgagaccgugaucgaguuccagcagaagaacaacagacugcuggagaucaccagagaguucagcgugaacgccggcgugaccacccccgugagcaccuacaugcugaccaacagcgagcugcugagccugaucaacgacaugcccaucaccaacgaccagaagaagcugaugagcaacaacgugcagaucgugagacagcagagcuacagcaucaugugcaucaucaaggaggaggugcuggccuacguggugcagcugccccuguacggcgugaucgacacccccugcuggaagcugcacaccagcccccugugcaccaccaacaccaaggagggcagcaacaucugccugaccagaaccgacagaggcugguacugcgacaacgccggcagcgugagcuucuucccccaggccgagaccugcaaggugcagagcaacagaguguucugcgacaccaugaacagcagaacccugcccagcgaggugaaccugugcaacaucgacaucuucaaccccaaguacgacugcaagaucaugaccagcaagaccgacgugagcagcagcgugaucaccagccugggcgccaucgugagcugcuacggcaagaccaagugcaccgccagcaacaagaacagaggcaucaucaagaccuucagcaacggcugcgacuacgugagcaacaagggcguggacaccgugagcgugggcaacacccuguacuacgugaacaagcaggagggcaagagccuguacgugaagggcgagcccaucaucaacuucuacgacccccugguguuccccagcgacgaguucgacgccagcaucagccaggugaacgagaagaucaaccagagccuggccuucaucagaaagagcgacgagcugcugcacaacgugaacgugggcaagagcaccaccaacaucaugaucaccaccaucaucaucgugaucaucgugauccugcugcugcugaucgccgugggccuguuccuguacugcaaggccagaagcacccccgugacccugagcaaggaccagcugagcggcaucaacaacaucgccuucagcaacugaggacuaguaauaaggaaacuguaugaaugucugugggcaggaagugaagagauccuucuguaaagguuuuuggaauuaugucugcugaauaauaaacuuuuuugaaauaauaaaucugguagaaaaaugagaucuaaaaaaaaaaaaaaaaaaaaaaaaaaaaaaaaaaaaaaaaaaaaaaaaaaaaaaaaaaaaaaaaugcaucccccccccccccccccccccccccccccccaaaggcucuuuucagagccaccagaauu

SEQ ID NO: 13496 - RNA, 1970 nt, Artificial Sequence
  mRNA product Design g-5 comprising derived and/or modified sequence from HRSV(Memphis-37)__AIY60640.1__F_DSCav1_mut0 (opt5)
gggagacccgugacccggaaguuguacggcuacgcgacuuucccucccacaaacccucgcgcccuuccuuuccuacuugggcccggcagaaagcuuaccauggagcugcccauccucaagaccaacgccauuacaacgauccuggcugccgugacccuuugcuucgcgagcucccagaauauuacagaagaguuuuaccaaucuaccuguagcgcugucuccaaaggcuaucugucugcccucagaacagggugguacaccagcguuaucacaauugaacuguccaacaucaaggagaauaaaugcaacggaaccgacgccaaggugaaacuuaucaagcaggaacuggauaaguauaaaaaugcugugacggagcuccagcugcugaugcagucuaccccugccgcuggcagcggguccgccauugcgagcggaaucgccgucuguaaggugcuccaccuggagggcgaaguuaacaaaauuaagaaugcccuucugucuacaaacaaagcuguggucucccucagcaauggggugucuguucugaccuucaaggugcuugaccugaagaacuacaucgauaaacaacuccugccgauucugaauaagcaguccugcagcaucucuaacauugagacagucaucgaauuucagcagaaaaauaaccggcuccuggagaucacccgcgaguucuccgugaaugcuggagugacgacacccgucagcaccuauaugcuuacaaacuccgaacugcucucucugauuaacgacaugccuaucaccaaugaucaaaagaaacuuaugagcaacaauguucagauugugagacagcaguccuacagcaucauguguauuaucaaggaggaagugcuggccuaugucgugcaacucccccuguacggcguuaucgacaccccuugcuggaaacugcauacaucuccccucuguacgaccaacacaaaggagggcuccaauauuugccugacccggacagaucgcgggugguacugugacaacgcgggaagcgugagcuuuuucccucaggccgaaaccugcaagguccagucuaauagaguguuuugugauacgaugaacuccagaacacugccgucugagguuaaucucugcaacaucgacauuuucaaucccaaauaugauugcaagaucaugaccagcaaaaccgacguguccagcucugucauuacaucccugggcgcuaucgugagcuguuacgggaagaccaaaugcacagccucuaacaagaaucggggaaucauuaagacguuuuccaacggcugugauuaugucagcaauaaagggguggacaccguuuccgugggaaacacacuuuacuaugucaacaagcaagagggcaaaucucuguacgugaagggcgaaccuaucauuaauuucuaugacccccucguuuuuccuagcgaugaguucgacgcuuccaucucucaggugaacgaaaagauuaaucagagccuggccuuuauccgcaaguccgaugagcugcuccacaacgucaauguggggaaaagcaccacaaacauuaugaucaccacgaucauuaucgugauuaucguuauucugcuucugcucaucgccgucggacuguuccuguacugcaaagcuagaucuacccccgugacacuuuccaaggaccagcucagcggcaucaauaacauugcguucucuaauugaggacuaguaauaaggaaacuguaugaaugucugugggcaggaagugaagagauccuucuguaaagguuuuuggaauuaugucugcugaauaauaaacuuuuuugaaauaauaaaucugguagaaaaaugagaucuaaaaaaaaaaaaaaaaaaaaaaaaaaaaaaaaaaaaaaaaaaaaaaaaaaaaaaaaaaaaaaaaugcaucccccccccccccccccccccccccccccccaaaggcucuuuucagagccaccagaauu

SEQ ID NO: 13497 - RNA, 1970 nt, Artificial Sequence
  mRNA product Design g-5 comprising derived and/or modified sequence from HRSV(Memphis-37)__AIY60640.1__F_DSCav1_mut0 (opt6)
gggagacccgugacccggaaguuguacggcuacgcgacuuucccucccacaaacccucgcgcccuuccuuuccuacuugggcccggcagaaagcuuaccauggaauuaccaaucuuaaaaacaaacgccauaacaaccauccucgcagcaguaacccuaugcuuugcauccucacaaaacauaacugaagaauuuuaccaaucaacaugcucagcaguaucaaaaggauaucuaucagcccucagaacaggaugguacacaucagucauuacaaucgaacuuucaaacauaaaagaaaauaaauguaacggcacagaugccaaaguaaaauuaauuaaacaagaacuugacaaauacaaaaaugccguaacagaacuacaacuacuaaugcaaaguacuccugcugcaggaagcggaucugcaauagcaucagguauagcaguauguaaaguucuacaccuagaaggcgaaguaaacaaaauuaaaaacgcacuacucucaacaaauaaagcaguugucucccuaucaaacggaguaucaguauuaacuuucaaaguacuagaccucaaaaacuauauagacaaacaacuauuaccaauacuaaacaaacaaagcugcucuaucuccaacaucgaaacaguaauagaauuucaacaaaaaaauaauagacuacuugaaauaaccagagaauuuucaguaaacgccggaguaacaacaccaguaucaacuuacaugcuaacaaacuccgaacuacuaucauuaauaaacgacaugcccauaacaaacgaccaaaaaaaauuaaugucaaacaacguccaaaucguacgacaacaauccuauuccauaauguguauaauaaaagaagaaguacuagcauacguaguacaauuaccauuauauggaguaauagauaccccuugcuggaaacuacacacaucaccccuaugcacuacaaauacgaaagaagguucaaauauaugcuuaacuagaaccgauagagguugguauugugacaacgcuggaucaguaucauuuuucccacaagcagaaacaugcaaaguacaaucaaacagaguauuuugcgacacuaugaacucaagaacuuuaccauccgaaguuaaucuauguaacauagauauauuuaacccaaaauacgacugcaaaauaaugacaucaaaaacagauguaucaucaucaguuauaaccucccucggagcaauaguaucaugcuauggaaaaacaaaaugcacagcaucaaacaaaaaucguggaauuauaaaaacauucucaaacggcugugacuacgucagcaauaaaggaguagacacagucucaguaggaaacacuuuauacuauguuaacaaacaagaaggaaaaucacucuacgucaaaggcgaaccaauaauaaauuucuaugacccacucguauucccauccgacgaauuugacgcaucaauaucacaaguaaaugaaaaaauaaaccaaagccuagcauuuauacgaaaaucagacgaacuacuacacaacguaaacguagguaaaagcacaaccaauauaaugauaacaacaauaaucauaguaauaaucguaauauuacuauuacuaauagcuguaggauuguuccuauacugcaaagcaagaucaacaccaguaaccuuaucuaaggaccaacuaucaggaaucaauaacauugccuucucaaacuaaggacuaguaauaaggaaacuguaugaaugucugugggcaggaagugaagagauccuucuguaaagguuuuuggaauuaugucugcugaauaauaaacuuuuuugaaauaauaaaucugguagaaaaaugagaucuaaaaaaaaaaaaaaaaaaaaaaaaaaaaaaaaaaaaaaaaaaaaaaaaaaaaaaaaaaaaaaaaugcaucccccccccccccccccccccccccccccccaaaggcucuuuucagagccaccagaauu

SEQ ID NO: 13498 - RNA, 1970 nt, Artificial Sequence
  mRNA product Design g-5 comprising derived and/or modified sequence from HRSV(Memphis-37)__AIY60640.1__F_DSCav1_mut0 (opt11)
gggagacccgugacccggaaguuguacggcuacgcgacuuucccucccacaaacccucgcgcccuuccuuuccuacuugggcccggcagaaagcuuaccauggaacuaccuauccuuaaaaccaacgcaaucaccaccauccuugccgcagucacacucugcuucgcauccucacagaacaucaccgaagaguucuaucaaucaaccugcuccgccguauccaaaggauaccucucagcccuccgcaccggcugguauaccucagucauaacaaucgaauuaucaaauaucaaggagaacaaaugcaacggcaccgacgccaaagucaaacucauaaaacaagaacuagacaaauacaaaaacgccgugacagaacuccaacuccucaugcaguccacccccgcagccggauccggcucagcaaucgccucgggcauugcaguaugcaaaguccuccaccucgaaggcgaagucaacaaaaucaaaaacgcccuccucuccaccaacaaagccgucgucucccucuccaacggcguaucuguccucacuuucaagguccucgaccucaaaaacuacaucgacaagcaacuacuuccaauccucaacaagcaauccugcucaaucucaaacaucgaaaccguaauagaguuccaacaaaagaacaaccgccuccucgaaaucacccgcgaguucuccguuaacgccggugucacuaccccagucagcaccuacaugcucaccaacuccgaacuccuuucucugaucaacgacaugccaaucaccaacgaucaaaagaaauuaauguccaacaacguccagaucguccgccaacaaagcuacagcaucaugugcaucauaaaagaagaaguacuugcguacguaguucaacuaccccuuuacggcguaaucgacaccccaugcuggaaacuccacaccuccccacuaugcaccaccaacaccaaagaaggauccaacaucugccuaacccgcaccgaccgcggcugguacugcgacaacgcugggagcgucucauucuucccacaagcagaaaccugcaaaguccaaucgaaccgcguauucugcgacaccaugaacuccagaacccuaccaagcgaagucaaucuuugcaacaucgacauauuuaaccccaaauacgacugcaaaaucaugacaucaaagaccgacgucucaucuucagucauuaccucacucggcgcaauugucagcugcuacggaaagaccaaauguaccgccuccaauaaaaaccguggaaucauaaaaaccuuuagcaacggcugcgacuacgucuccaacaaaggagucgacaccgucuccgucggcaacacccucuacuacgucaacaaacaagaaggaaaaucccucuacgugaaaggcgaacccauaauaaacuucuacgacccccuagucuuccccucugacgaguucgacgccuccaucucccaagucaacgaaaagauaaaucaaucacuagccuucauacgcaaaucugacgaacuucuccacaacgucaacgucggcaaauccaccaccaacauaaugaucacaacgauaauaaucgugaucauaguaauccuacuucuccucaucgcaguaggucuauuccuauacugcaaagcccgcagcacccccgucacccuaucaaaagaccaacucuccggcaucaacaacaucgccuucucaaacuaaggacuaguaauaaggaaacuguaugaaugucugugggcaggaagugaagagauccuucuguaaagguuuuuggaauuaugucugcugaauaauaaacuuuuuugaaauaauaaaucugguagaaaaaugagaucuaaaaaaaaaaaaaaaaaaaaaaaaaaaaaaaaaaaaaaaaaaaaaaaaaaaaaaaaaaaaaaaaugcaucccccccccccccccccccccccccccccccaaaggcucuuuucagagccaccagaauu

SEQ ID NO: 13499 - RNA, 1986 nt, Artificial Sequence
  mRNA product Design h-1 comprising derived and/or modified sequence from HRSV(Memphis-37)__AIY60640.1__F_DSCav1_mut0 (opt1)
gggagacccgugacccggaaguuguacggcuacgcgacuuucccucccacaaacccucgcgcccuuccuuuccuacuugggcccggcagaaagcuuaccauggagcugcccauccucaagaccaacgccaucaccacgauccuggccgcggugacccugugcuucgccagcucccagaacaucaccgaggaguucuaccagagcacgugcuccgccgucagcaagggcuaccucuccgcccugcgcaccgggugguacaccagcgugaucaccaucgagcuguccaacaucaaggagaacaagugcaacggcaccgacgccaaggugaagcucaucaagcaggagcuggacaaguacaagaacgcggucacggagcugcagcuccugaugcagagcaccccggccgccggcuccgggagcgcgaucgccuccggcaucgccgucugcaaggugcugcaccucgagggcgaggugaacaagaucaagaacgcccugcuguccaccaacaaggccgucgugagccucuccaacggggugagcguccugaccuucaaggugcuggaccucaagaacuacaucgacaagcagcugcugcccauccugaacaagcagagcugcuccaucagcaacaucgagaccgucaucgaguuccagcagaagaacaaccgccuccuggagaucacgcgggaguucagcgugaacgcgggcgugaccacccccgucuccaccuacaugcugacgaacagcgagcuccugucccugaucaacgacaugccgaucaccaacgaccagaagaagcucaugagcaacaacgugcagaucgugcgccagcaguccuacagcaucaugugcaucaucaaggaggagguccuggccuacguggugcagcugccccucuacggggucaucgacacccccugcuggaagcugcacaccagcccccugugcacgaccaacaccaaggagggcuccaacaucugccucacccggacggaccgcgggugguacugcgacaacgccggcagcguguccuucuucccgcaggccgagaccugcaagguccagagcaaccggguguucugcgacaccaugaacucccggacccugcccagcgaggugaaccucugcaacaucgacaucuucaaccccaaguacgacugcaagaucaugacguccaagaccgacgucagcuccagcgugaucaccucccugggcgccaucgugagcugcuacgggaagaccaagugcacggcgagcaacaagaaccgcggcaucaucaagaccuucuccaacgggugcgacuacgucagcaacaagggcguggacaccguguccgucggcaacacccuguacuacgugaacaagcaggagggcaagagccucuacgugaagggggagcccaucaucaacuucuacgacccgcuggucuuccccuccgacgaguucgacgccagcaucucccaggugaacgagaagaucaaccagagccuggccuucauccggaaguccgacgagcuccugcacaacgugaacgucggcaagagcaccacgaacaucaugaucaccaccaucaucaucgugaucaucgugauccugcugcuccugaucgccgucgggcuguuccucuacugcaaggcccgcuccacccccgugacgcugagcaaggaccagcuguccgggaucaacaacaucgcguucagcaacugaggacuaguacuggcugcaucucccuuuccucuguccuccauccuucucccaggauggugaagggggaccugguacccagugauccccaccccaggauccuaaaucaugacuuaccugcuaauaaaaacucauuggaaaagugagaagaucuaaaaaaaaaaaaaaaaaaaaaaaaaaaaaaaaaaaaaaaaaaaaaaaaaaaaaaaaaaaaaaaaugcaucccccccccccccccccccccccccccccccaaaggcucuuuucagagccaccagaauu

SEQ ID NO: 13500 - RNA, 1986 nt, Artificial Sequence
  mRNA product Design h-1 comprising derived and/or modified sequence from HRSV(Memphis-37)__AIY60640.1__F_DSCav1_mut0 (opt1)
gggagacccgugacccggaaguuguacggcuacgcgacuuucccucccacaaacccucgcgcccuuccuuuccuacuugggcccggcagaaagcuuaccauggagcugcccauccucaagaccaacgccaucaccacgauccuggccgcggugacccugugcuucgccagcucccagaacaucaccgaggaguucuaccagagcacgugcuccgccgucagcaagggcuaccucuccgcccugcgcaccgggugguacaccagcgugaucaccaucgagcuguccaacaucaaggagaacaagugcaacggcaccgacgccaaggugaagcucaucaagcaggagcuggacaaguacaagaacgcggucacggagcugcagcuccugaugcagagcaccccggccgccggguccggcagcgccaucgcguccgggaucgccgugugcaaggugcugcaccucgagggcgaggucaacaagaucaagaacgcccugcugagcaccaacaaggccguggugucccucagcaacggcgucuccgugcugaccuucaaggugcuggaccucaagaacuacaucgacaagcagcugcugcccauccucaacaagcagagcugcuccaucagcaacaucgagacggucaucgaguuccagcagaagaacaaccggcugcuggagaucacccgcgaguucuccgugaacgccggggugaccacccccgucagcacguacaugcucaccaacagcgagcugcugucccucaucaacgacaugcccaucaccaacgaccagaagaagcugaugagcaacaacgugcagaucgugcggcagcaguccuacagcaucaugugcaucaucaaggaggagguccuggcguacguggugcagcucccgcuguacggcgucaucgacacccccugcuggaagcugcacacgagcccccucugcaccaccaacaccaaggagggguccaacaucugccugacgcgcaccgaccggggcugguacugcgacaacgccggguccgugagcuucuucccccaggccgagaccugcaaggugcaguccaaccgcgucuucugcgacaccaugaacagccggacgcucccguccgaggugaaccugugcaacaucgacaucuucaaccccaaguacgacugcaagaucaugaccagcaagaccgacgucuccagcuccgugaucaccagccugggcgccaucguguccugcuacggcaagacgaagugcaccgccagcaacaagaaccgggggaucaucaagaccuucuccaacggcugcgacuacgucagcaacaaggggguggacaccgugagcgucggcaacacgcucuacuacgugaacaagcaggagggcaagucccuguacgugaagggggagcccaucaucaacuucuacgacccccuggucuucccgagcgacgaguucgacgcguccaucagccaggugaacgagaagaucaaccagucccucgccuucauccgcaagagcgacgagcugcugcacaacgugaacgucggcaaguccaccaccaacaucaugaucaccaccaucaucaucgugaucaucgugauccuccugcugcucaucgccgucgggcuguuccuguacugcaaggcccggagcacgcccgugacccuguccaaggaccagcucagcggcaucaacaacaucgccuucuccaacugaggacuaguacuggcugcaucucccuuuccucuguccuccauccuucucccaggauggugaagggggaccugguacccagugauccccaccccaggauccuaaaucaugacuuaccugcuaauaaaaacucauuggaaaagugagaagaucuaaaaaaaaaaaaaaaaaaaaaaaaaaaaaaaaaaaaaaaaaaaaaaaaaaaaaaaaaaaaaaaaugcaucccccccccccccccccccccccccccccccaaaggcucuuuucagagccaccagaauu

SEQ ID NO: 13501 - RNA, 1986 nt, Artificial Sequence
  mRNA product Design h-1 comprising derived and/or modified sequence from HRSV(Memphis-37)__AIY60640.1__F_DSCav1_mut0 (opt2)
gggagacccgugacccggaaguuguacggcuacgcgacuuucccucccacaaacccucgcgcccuuccuuuccuacuugggcccggcagaaagcuuaccauggagcuccccauccucaagaccaacgccaucaccaccauccucgccgccgucacccucugcuucgccuccucccagaacaucaccgaggaguucuaccaguccaccugcuccgccgucuccaagggcuaccucuccgcccuccgcaccggcugguacaccuccgucaucaccaucgagcucuccaacaucaaggagaacaagugcaacggcaccgacgccaaggucaagcucaucaagcaggagcucgacaaguacaagaacgccgucaccgagcuccagcuccucaugcaguccacccccgccgccggcuccggcuccgccaucgccuccggcaucgccgucugcaagguccuccaccucgagggcgaggucaacaagaucaagaacgcccuccucuccaccaacaaggccgucgucucccucuccaacggcgucuccguccucaccuucaagguccucgaccucaagaacuacaucgacaagcagcuccuccccauccucaacaagcaguccugcuccaucuccaacaucgagaccgucaucgaguuccagcagaagaacaaccgccuccucgagaucacccgcgaguucuccgucaacgccggcgucaccacccccgucuccaccuacaugcucaccaacuccgagcuccucucccucaucaacgacaugcccaucaccaacgaccagaagaagcucauguccaacaacguccagaucguccgccagcaguccuacuccaucaugugcaucaucaaggaggagguccucgccuacgucguccagcucccccucuacggcgucaucgacacccccugcuggaagcuccacaccuccccccucugcaccaccaacaccaaggagggcuccaacaucugccucacccgcaccgaccgcggcugguacugcgacaacgccggcuccgucuccuucuucccccaggccgagaccugcaagguccaguccaaccgcgucuucugcgacaccaugaacucccgcacccuccccuccgaggucaaccucugcaacaucgacaucuucaaccccaaguacgacugcaagaucaugaccuccaagaccgacgucuccuccuccgucaucaccucccucggcgccaucgucuccugcuacggcaagaccaagugcaccgccuccaacaagaaccgcggcaucaucaagaccuucuccaacggcugcgacuacgucuccaacaagggcgucgacaccgucuccgucggcaacacccucuacuacgucaacaagcaggagggcaagucccucuacgucaagggcgagcccaucaucaacuucuacgacccccucgucuuccccuccgacgaguucgacgccuccaucucccaggucaacgagaagaucaaccagucccucgccuucauccgcaaguccgacgagcuccuccacaacgucaacgucggcaaguccaccaccaacaucaugaucaccaccaucaucaucgucaucaucgucauccuccuccuccucaucgccgucggccucuuccucuacugcaaggcccgcuccacccccgucacccucuccaaggaccagcucuccggcaucaacaacaucgccuucuccaacugaggacuaguacuggcugcaucucccuuuccucuguccuccauccuucucccaggauggugaagggggaccugguacccagugauccccaccccaggauccuaaaucaugacuuaccugcuaauaaaaacucauuggaaaagugagaagaucuaaaaaaaaaaaaaaaaaaaaaaaaaaaaaaaaaaaaaaaaaaaaaaaaaaaaaaaaaaaaaaaaugcaucccccccccccccccccccccccccccccccaaaggcucuuuucagagccaccagaauu

SEQ ID NO: 13502 - RNA, 1986 nt, Artificial Sequence
  mRNA product Design h-1 comprising derived and/or modified sequence from HRSV(Memphis-37)__AIY60640.1__F_DSCav1_mut0 (opt3)
gggagacccgugacccggaaguuguacggcuacgcgacuuucccucccacaaacccucgcgcccuuccuuuccuacuugggcccggcagaaagcuuaccauggagcugcccauccucaagaccaacgccauuacaacuauacuugcugcagugacgcugugcuucgccagcucccagaauaucaccgaagaguuuuaccaaucuacauguucagcggucaguaaaggcuauuugagcgcuuuaagaacugggugguacaccuccguuauuacaaucgaacugucuaacauuaaggagaauaaaugcaacggaaccgacgccaaggugaaacuaaucaagcaggaacucgauaaguauaaaaaugcaguaacugagcugcagcuucugaugcagucgaccccugccgcugguucaggcagcgcaauagccagugggaucgcuguguguaaggucuugcaccucgagggagaagugaacaaaauuaagaaugcccugcuguccacaaacaaagcgguugugucucucagcaauggcgucuccguguuaacguucaagguacuggaccuuaagaacuacaucgauaaacaauugcugccaauucuaaauaagcagucaugcaguaucagcaacauagagacuguuauugaauuucagcagaaaaauaacaggcuccuggagaucacccgggaguucucugugaaugccggugucacaacuccgguguccaccuauaugcuuacaaacucagaacuguugagccucauuaacgacaugcccaucaccaaugaucaaaagaaacugaugaguaacaaugugcagaucguccgccagcagucuuacuccauuauguguauaaucaaggaggaaguuuuagcauaugugguacaacugccucucuacggggugauugacacgccaugcuggaaacuucauacuagcccccuguguacaaccaacacuaaggagggaucgaauaucugcuugacacgaaccgaucguggcugguacugugacaacgcuggcucugucuccuuuuucccucaggccgaaacgugcaaggugcagucaaauagaguguuuugugauaccaugaacaguagaacacugccaagcgaggugaaucucugcaacauagacauuuucaaucccaaauaugauugcaagaucaugacuuccaaaaccgacgucucuagcucagugaucacaagucugggggcaauuguauccuguuacggaaagacuaaaugcaccgcuagcaacaagaauagggguaucauuaagacauuuucuaacggcugugauuauguuucaaauaaagggguggacaccgucagugugggaaacacucuuuacuaugucaacaagcaagagggcaaaagccuguacgugaagggugaaccuauaaucaauuucuaugacccauugguuuuuccguccgaugaguucgacgccucuauuucgcagguuaacgagaaaaucaaucagagccucgcguuuauccggaaguccgaugaacuguuacacaacguaaaugucgggaagucaacgacaaacauuaugauaaccacuaucauuaucgugauuaucguuauacugcuacuccugaucgccgugggacuuuucuuguacugcaaagcacgcaguacccccgucacacugucuaaggaccagcucagcggcauuaauaacaucgcuuucuccaauugaggacuaguacuggcugcaucucccuuuccucuguccuccauccuucucccaggauggugaagggggaccugguacccagugauccccaccccaggauccuaaaucaugacuuaccugcuaauaaaaacucauuggaaaagugagaagaucuaaaaaaaaaaaaaaaaaaaaaaaaaaaaaaaaaaaaaaaaaaaaaaaaaaaaaaaaaaaaaaaaugcaucccccccccccccccccccccccccccccccaaaggcucuuuucagagccaccagaauu

SEQ ID NO: 13503 - RNA, 1986 nt, Artificial Sequence
  mRNA product Design h-1 comprising derived and/or modified sequence from HRSV(Memphis-37)__AIY60640.1__F_DSCav1_mut0 (opt4)
gggagacccgugacccggaaguuguacggcuacgcgacuuucccucccacaaacccucgcgcccuuccuuuccuacuugggcccggcagaaagcuuaccauggagcugcccauccugaagaccaacgccaucaccaccauccuggccgccgugacccugugcuucgccagcagccagaacaucaccgaggaguucuaccagagcaccugcagcgccgugagcaagggcuaccugagcgcccugagaaccggcugguacaccagcgugaucaccaucgagcugagcaacaucaaggagaacaagugcaacggcaccgacgccaaggugaagcugaucaagcaggagcuggacaaguacaagaacgccgugaccgagcugcagcugcugaugcagagcacccccgccgccggcagcggcagcgccaucgccagcggcaucgccgugugcaaggugcugcaccuggagggcgaggugaacaagaucaagaacgcccugcugagcaccaacaaggccguggugagccugagcaacggcgugagcgugcugaccuucaaggugcuggaccugaagaacuacaucgacaagcagcugcugcccauccugaacaagcagagcugcagcaucagcaacaucgagaccgugaucgaguuccagcagaagaacaacagacugcuggagaucaccagagaguucagcgugaacgccggcgugaccacccccgugagcaccuacaugcugaccaacagcgagcugcugagccugaucaacgacaugcccaucaccaacgaccagaagaagcugaugagcaacaacgugcagaucgugagacagcagagcuacagcaucaugugcaucaucaaggaggaggugcuggccuacguggugcagcugccccuguacggcgugaucgacacccccugcuggaagcugcacaccagcccccugugcaccaccaacaccaaggagggcagcaacaucugccugaccagaaccgacagaggcugguacugcgacaacgccggcagcgugagcuucuucccccaggccgagaccugcaaggugcagagcaacagaguguucugcgacaccaugaacagcagaacccugcccagcgaggugaaccugugcaacaucgacaucuucaaccccaaguacgacugcaagaucaugaccagcaagaccgacgugagcagcagcgugaucaccagccugggcgccaucgugagcugcuacggcaagaccaagugcaccgccagcaacaagaacagaggcaucaucaagaccuucagcaacggcugcgacuacgugagcaacaagggcguggacaccgugagcgugggcaacacccuguacuacgugaacaagcaggagggcaagagccuguacgugaagggcgagcccaucaucaacuucuacgacccccugguguuccccagcgacgaguucgacgccagcaucagccaggugaacgagaagaucaaccagagccuggccuucaucagaaagagcgacgagcugcugcacaacgugaacgugggcaagagcaccaccaacaucaugaucaccaccaucaucaucgugaucaucgugauccugcugcugcugaucgccgugggccuguuccuguacugcaaggccagaagcacccccgugacccugagcaaggaccagcugagcggcaucaacaacaucgccuucagcaacugaggacuaguacuggcugcaucucccuuuccucuguccuccauccuucucccaggauggugaagggggaccugguacccagugauccccaccccaggauccuaaaucaugacuuaccugcuaauaaaaacucauuggaaaagugagaagaucuaaaaaaaaaaaaaaaaaaaaaaaaaaaaaaaaaaaaaaaaaaaaaaaaaaaaaaaaaaaaaaaaugcaucccccccccccccccccccccccccccccccaaaggcucuuuucagagccaccagaauu

SEQ ID NO: 13504 - RNA, 1986 nt, Artificial Sequence
  mRNA product Design h-1 comprising derived and/or modified sequence from HRSV(Memphis-37)__AIY60640.1__F_DSCav1_mut0 (opt5)
gggagacccgugacccggaaguuguacggcuacgcgacuuucccucccacaaacccucgcgcccuuccuuuccuacuugggcccggcagaaagcuuaccauggagcugcccauccucaagaccaacgccauuacaacgauccuggcugccgugacccuuugcuucgcgagcucccagaauauuacagaagaguuuuaccaaucuaccuguagcgcugucuccaaaggcuaucugucugcccucagaacagggugguacaccagcguuaucacaauugaacuguccaacaucaaggagaauaaaugcaacggaaccgacgccaaggugaaacuuaucaagcaggaacuggauaaguauaaaaaugcugugacggagcuccagcugcugaugcagucuaccccugccgcuggcagcggguccgccauugcgagcggaaucgccgucuguaaggugcuccaccuggagggcgaaguuaacaaaauuaagaaugcccuucugucuacaaacaaagcuguggucucccucagcaauggggugucuguucugaccuucaaggugcuugaccugaagaacuacaucgauaaacaacuccugccgauucugaauaagcaguccugcagcaucucuaacauugagacagucaucgaauuucagcagaaaaauaaccggcuccuggagaucacccgcgaguucuccgugaaugcuggagugacgacacccgucagcaccuauaugcuuacaaacuccgaacugcucucucugauuaacgacaugccuaucaccaaugaucaaaagaaacuuaugagcaacaauguucagauugugagacagcaguccuacagcaucauguguauuaucaaggaggaagugcuggccuaugucgugcaacucccccuguacggcguuaucgacaccccuugcuggaaacugcauacaucuccccucuguacgaccaacacaaaggagggcuccaauauuugccugacccggacagaucgcgggugguacugugacaacgcgggaagcgugagcuuuuucccucaggccgaaaccugcaagguccagucuaauagaguguuuugugauacgaugaacuccagaacacugccgucugagguuaaucucugcaacaucgacauuuucaaucccaaauaugauugcaagaucaugaccagcaaaaccgacguguccagcucugucauuacaucccugggcgcuaucgugagcuguuacgggaagaccaaaugcacagccucuaacaagaaucggggaaucauuaagacguuuuccaacggcugugauuaugucagcaauaaagggguggacaccguuuccgugggaaacacacuuuacuaugucaacaagcaagagggcaaaucucuguacgugaagggcgaaccuaucauuaauuucuaugacccccucguuuuuccuagcgaugaguucgacgcuuccaucucucaggugaacgaaaagauuaaucagagccuggccuuuauccgcaaguccgaugagcugcuccacaacgucaauguggggaaaagcaccacaaacauuaugaucaccacgaucauuaucgugauuaucguuauucugcuucugcucaucgccgucggacuguuccuguacugcaaagcuagaucuacccccgugacacuuuccaaggaccagcucagcggcaucaauaacauugcguucucuaauugaggacuaguacuggcugcaucucccuuuccucuguccuccauccuucucccaggauggugaagggggaccugguacccagugauccccaccccaggauccuaaaucaugacuuaccugcuaauaaaaacucauuggaaaagugagaagaucuaaaaaaaaaaaaaaaaaaaaaaaaaaaaaaaaaaaaaaaaaaaaaaaaaaaaaaaaaaaaaaaaugcaucccccccccccccccccccccccccccccccaaaggcucuuuucagagccaccagaauu

SEQ ID NO: 13505 - RNA, 1986 nt, Artificial Sequence
  mRNA product Design h-1 comprising derived and/or modified sequence from HRSV(Memphis-37)__AIY60640.1__F_DSCav1_mut0 (opt6)
gggagacccgugacccggaaguuguacggcuacgcgacuuucccucccacaaacccucgcgcccuuccuuuccuacuugggcccggcagaaagcuuaccauggaauuaccaaucuuaaaaacaaacgccauaacaaccauccucgcagcaguaacccuaugcuuugcauccucacaaaacauaacugaagaauuuuaccaaucaacaugcucagcaguaucaaaaggauaucuaucagcccucagaacaggaugguacacaucagucauuacaaucgaacuuucaaacauaaaagaaaauaaauguaacggcacagaugccaaaguaaaauuaauuaaacaagaacuugacaaauacaaaaaugccguaacagaacuacaacuacuaaugcaaaguacuccugcugcaggaagcggaucugcaauagcaucagguauagcaguauguaaaguucuacaccuagaaggcgaaguaaacaaaauuaaaaacgcacuacucucaacaaauaaagcaguugucucccuaucaaacggaguaucaguauuaacuuucaaaguacuagaccucaaaaacuauauagacaaacaacuauuaccaauacuaaacaaacaaagcugcucuaucuccaacaucgaaacaguaauagaauuucaacaaaaaaauaauagacuacuugaaauaaccagagaauuuucaguaaacgccggaguaacaacaccaguaucaacuuacaugcuaacaaacuccgaacuacuaucauuaauaaacgacaugcccauaacaaacgaccaaaaaaaauuaaugucaaacaacguccaaaucguacgacaacaauccuauuccauaauguguauaauaaaagaagaaguacuagcauacguaguacaauuaccauuauauggaguaauagauaccccuugcuggaaacuacacacaucaccccuaugcacuacaaauacgaaagaagguucaaauauaugcuuaacuagaaccgauagagguugguauugugacaacgcuggaucaguaucauuuuucccacaagcagaaacaugcaaaguacaaucaaacagaguauuuugcgacacuaugaacucaagaacuuuaccauccgaaguuaaucuauguaacauagauauauuuaacccaaaauacgacugcaaaauaaugacaucaaaaacagauguaucaucaucaguuauaaccucccucggagcaauaguaucaugcuauggaaaaacaaaaugcacagcaucaaacaaaaaucguggaauuauaaaaacauucucaaacggcugugacuacgucagcaauaaaggaguagacacagucucaguaggaaacacuuuauacuauguuaacaaacaagaaggaaaaucacucuacgucaaaggcgaaccaauaauaaauuucuaugacccacucguauucccauccgacgaauuugacgcaucaauaucacaaguaaaugaaaaaauaaaccaaagccuagcauuuauacgaaaaucagacgaacuacuacacaacguaaacguagguaaaagcacaaccaauauaaugauaacaacaauaaucauaguaauaaucguaauauuacuauuacuaauagcuguaggauuguuccuauacugcaaagcaagaucaacaccaguaaccuuaucuaaggaccaacuaucaggaaucaauaacauugccuucucaaacuaaggacuaguacuggcugcaucucccuuuccucuguccuccauccuucucccaggauggugaagggggaccugguacccagugauccccaccccaggauccuaaaucaugacuuaccugcuaauaaaaacucauuggaaaagugagaagaucuaaaaaaaaaaaaaaaaaaaaaaaaaaaaaaaaaaaaaaaaaaaaaaaaaaaaaaaaaaaaaaaaugcaucccccccccccccccccccccccccccccccaaaggcucuuuucagagccaccagaauu

SEQ ID NO: 13506 - RNA, 1986 nt, Artificial Sequence
  mRNA product Design h-1 comprising derived and/or modified sequence from HRSV(Memphis-37)__AIY60640.1__F_DSCav1_mut0 (opt11)
gggagacccgugacccggaaguuguacggcuacgcgacuuucccucccacaaacccucgcgcccuuccuuuccuacuugggcccggcagaaagcuuaccauggaacuaccuauccuuaaaaccaacgcaaucaccaccauccuugccgcagucacacucugcuucgcauccucacagaacaucaccgaagaguucuaucaaucaaccugcuccgccguauccaaaggauaccucucagcccuccgcaccggcugguauaccucagucauaacaaucgaauuaucaaauaucaaggagaacaaaugcaacggcaccgacgccaaagucaaacucauaaaacaagaacuagacaaauacaaaaacgccgugacagaacuccaacuccucaugcaguccacccccgcagccggauccggcucagcaaucgccucgggcauugcaguaugcaaaguccuccaccucgaaggcgaagucaacaaaaucaaaaacgcccuccucuccaccaacaaagccgucgucucccucuccaacggcguaucuguccucacuuucaagguccucgaccucaaaaacuacaucgacaagcaacuacuuccaauccucaacaagcaauccugcucaaucucaaacaucgaaaccguaauagaguuccaacaaaagaacaaccgccuccucgaaaucacccgcgaguucuccguuaacgccggugucacuaccccagucagcaccuacaugcucaccaacuccgaacuccuuucucugaucaacgacaugccaaucaccaacgaucaaaagaaauuaauguccaacaacguccagaucguccgccaacaaagcuacagcaucaugugcaucauaaaagaagaaguacuugcguacguaguucaacuaccccuuuacggcguaaucgacaccccaugcuggaaacuccacaccuccccacuaugcaccaccaacaccaaagaaggauccaacaucugccuaacccgcaccgaccgcggcugguacugcgacaacgcugggagcgucucauucuucccacaagcagaaaccugcaaaguccaaucgaaccgcguauucugcgacaccaugaacuccagaacccuaccaagcgaagucaaucuuugcaacaucgacauauuuaaccccaaauacgacugcaaaaucaugacaucaaagaccgacgucucaucuucagucauuaccucacucggcgcaauugucagcugcuacggaaagaccaaauguaccgccuccaauaaaaaccguggaaucauaaaaaccuuuagcaacggcugcgacuacgucuccaacaaaggagucgacaccgucuccgucggcaacacccucuacuacgucaacaaacaagaaggaaaaucccucuacgugaaaggcgaacccauaauaaacuucuacgacccccuagucuuccccucugacgaguucgacgccuccaucucccaagucaacgaaaagauaaaucaaucacuagccuucauacgcaaaucugacgaacuucuccacaacgucaacgucggcaaauccaccaccaacauaaugaucacaacgauaauaaucgugaucauaguaauccuacuucuccucaucgcaguaggucuauuccuauacugcaaagcccgcagcacccccgucacccuaucaaaagaccaacucuccggcaucaacaacaucgccuucucaaacuaaggacuaguacuggcugcaucucccuuuccucuguccuccauccuucucccaggauggugaagggggaccugguacccagugauccccaccccaggauccuaaaucaugacuuaccugcuaauaaaaacucauuggaaaagugagaagaucuaaaaaaaaaaaaaaaaaaaaaaaaaaaaaaaaaaaaaaaaaaaaaaaaaaaaaaaaaaaaaaaaugcaucccccccccccccccccccccccccccccccaaaggcucuuuucagagccaccagaauu

SEQ ID NO: 13507 - RNA, 2202 nt, Artificial Sequence
  mRNA product Design h-2 comprising derived and/or modified sequence from HRSV(Memphis-37)__AIY60640.1__F_DSCav1_mut0 (opt1)
gggagacccgugacccggaaguuguacggcuacgcgacuuucccucccacaaacccucgcgcccuuccuuuccuacuugggcccggcagaaagcuuaccauggagcugcccauccucaagaccaacgccaucaccacgauccuggccgcggugacccugugcuucgccagcucccagaacaucaccgaggaguucuaccagagcacgugcuccgccgucagcaagggcuaccucuccgcccugcgcaccgggugguacaccagcgugaucaccaucgagcuguccaacaucaaggagaacaagugcaacggcaccgacgccaaggugaagcucaucaagcaggagcuggacaaguacaagaacgcggucacggagcugcagcuccugaugcagagcaccccggccgccggcuccgggagcgcgaucgccuccggcaucgccgucugcaaggugcugcaccucgagggcgaggugaacaagaucaagaacgcccugcuguccaccaacaaggccgucgugagccucuccaacggggugagcguccugaccuucaaggugcuggaccucaagaacuacaucgacaagcagcugcugcccauccugaacaagcagagcugcuccaucagcaacaucgagaccgucaucgaguuccagcagaagaacaaccgccuccuggagaucacgcgggaguucagcgugaacgcgggcgugaccacccccgucuccaccuacaugcugacgaacagcgagcuccugucccugaucaacgacaugccgaucaccaacgaccagaagaagcucaugagcaacaacgugcagaucgugcgccagcaguccuacagcaucaugugcaucaucaaggaggagguccuggccuacguggugcagcugccccucuacggggucaucgacacccccugcuggaagcugcacaccagcccccugugcacgaccaacaccaaggagggcuccaacaucugccucacccggacggaccgcgggugguacugcgacaacgccggcagcguguccuucuucccgcaggccgagaccugcaagguccagagcaaccggguguucugcgacaccaugaacucccggacccugcccagcgaggugaaccucugcaacaucgacaucuucaaccccaaguacgacugcaagaucaugacguccaagaccgacgucagcuccagcgugaucaccucccugggcgccaucgugagcugcuacgggaagaccaagugcacggcgagcaacaagaaccgcggcaucaucaagaccuucuccaacgggugcgacuacgucagcaacaagggcguggacaccguguccgucggcaacacccuguacuacgugaacaagcaggagggcaagagccucuacgugaagggggagcccaucaucaacuucuacgacccgcuggucuuccccuccgacgaguucgacgccagcaucucccaggugaacgagaagaucaaccagagccuggccuucauccggaaguccgacgagcuccugcacaacgugaacgucggcaagagcaccacgaacaucaugaucaccaccaucaucaucgugaucaucgugauccugcugcuccugaucgccgucgggcuguuccucuacugcaaggcccgcuccacccccgugacgcugagcaaggaccagcuguccgggaucaacaacaucgcguucagcaacugaggacuagugaagggaacacccaaauuuaauucagccuuaagcacaauuaauuaagagugaaacguaauuguacaagcaguuggucacccaccauagggcaugaucaacaccgcaaccuuuccuuuuucccccagugauucugaaaaaccccucuucccuucagcuugcuuagauguuccaaauuuaguaagcuuaaggcggccuacagaagaaaaagaaaaaaaaggccacaaaaguucccucucacuuucaguaaauaaaauaaaagcagcaacagaaauaaagaaauaaaugaaauucaaaaugaaauaaauauuguguugugcagcauuaaaaaaucaauaaaaauuaaaaaugagcaagaucuaaaaaaaaaaaaaaaaaaaaaaaaaaaaaaaaaaaaaaaaaaaaaaaaaaaaaaaaaaaaaaaaugcaucccccccccccccccccccccccccccccccaaaggcucuuuucagagccaccagaauu

SEQ ID NO: 13508 - RNA, 2202 nt, Artificial Sequence
  mRNA product Design h-2 comprising derived and/or modified sequence from HRSV(Memphis-37)__AIY60640.1__F_DSCav1_mut0 (opt1)
gggagacccgugacccggaaguuguacggcuacgcgacuuucccucccacaaacccucgcgcccuuccuuuccuacuugggcccggcagaaagcuuaccauggagcugcccauccucaagaccaacgccaucaccacgauccuggccgcggugacccugugcuucgccagcucccagaacaucaccgaggaguucuaccagagcacgugcuccgccgucagcaagggcuaccucuccgcccugcgcaccgggugguacaccagcgugaucaccaucgagcuguccaacaucaaggagaacaagugcaacggcaccgacgccaaggugaagcucaucaagcaggagcuggacaaguacaagaacgcggucacggagcugcagcuccugaugcagagcaccccggccgccggguccggcagcgccaucgcguccgggaucgccgugugcaaggugcugcaccucgagggcgaggucaacaagaucaagaacgcccugcugagcaccaacaaggccguggugucccucagcaacggcgucuccgugcugaccuucaaggugcuggaccucaagaacuacaucgacaagcagcugcugcccauccucaacaagcagagcugcuccaucagcaacaucgagacggucaucgaguuccagcagaagaacaaccggcugcuggagaucacccgcgaguucuccgugaacgccggggugaccacccccgucagcacguacaugcucaccaacagcgagcugcugucccucaucaacgacaugcccaucaccaacgaccagaagaagcugaugagcaacaacgugcagaucgugcggcagcaguccuacagcaucaugugcaucaucaaggaggagguccuggcguacguggugcagcucccgcuguacggcgucaucgacacccccugcuggaagcugcacacgagcccccucugcaccaccaacaccaaggagggguccaacaucugccugacgcgcaccgaccggggcugguacugcgacaacgccggguccgugagcuucuucccccaggccgagaccugcaaggugcaguccaaccgcgucuucugcgacaccaugaacagccggacgcucccguccgaggugaaccugugcaacaucgacaucuucaaccccaaguacgacugcaagaucaugaccagcaagaccgacgucuccagcuccgugaucaccagccugggcgccaucguguccugcuacggcaagacgaagugcaccgccagcaacaagaaccgggggaucaucaagaccuucuccaacggcugcgacuacgucagcaacaaggggguggacaccgugagcgucggcaacacgcucuacuacgugaacaagcaggagggcaagucccuguacgugaagggggagcccaucaucaacuucuacgacccccuggucuucccgagcgacgaguucgacgcguccaucagccaggugaacgagaagaucaaccagucccucgccuucauccgcaagagcgacgagcugcugcacaacgugaacgucggcaaguccaccaccaacaucaugaucaccaccaucaucaucgugaucaucgugauccuccugcugcucaucgccgucgggcuguuccuguacugcaaggcccggagcacgcccgugacccuguccaaggaccagcucagcggcaucaacaacaucgccuucuccaacugaggacuagugaagggaacacccaaauuuaauucagccuuaagcacaauuaauuaagagugaaacguaauuguacaagcaguuggucacccaccauagggcaugaucaacaccgcaaccuuuccuuuuucccccagugauucugaaaaaccccucuucccuucagcuugcuuagauguuccaaauuuaguaagcuuaaggcggccuacagaagaaaaagaaaaaaaaggccacaaaaguucccucucacuuucaguaaauaaaauaaaagcagcaacagaaauaaagaaauaaaugaaauucaaaaugaaauaaauauuguguugugcagcauuaaaaaaucaauaaaaauuaaaaaugagcaagaucuaaaaaaaaaaaaaaaaaaaaaaaaaaaaaaaaaaaaaaaaaaaaaaaaaaaaaaaaaaaaaaaaugcaucccccccccccccccccccccccccccccccaaaggcucuuuucagagccaccagaauu

SEQ ID NO: 13509 - RNA, 2202 nt, Artificial Sequence
  mRNA product Design h-2 comprising derived and/or modified sequence from HRSV(Memphis-37)__AIY60640.1__F_DSCav1_mut0 (opt2)
gggagacccgugacccggaaguuguacggcuacgcgacuuucccucccacaaacccucgcgcccuuccuuuccuacuugggcccggcagaaagcuuaccauggagcuccccauccucaagaccaacgccaucaccaccauccucgccgccgucacccucugcuucgccuccucccagaacaucaccgaggaguucuaccaguccaccugcuccgccgucuccaagggcuaccucuccgcccuccgcaccggcugguacaccuccgucaucaccaucgagcucuccaacaucaaggagaacaagugcaacggcaccgacgccaaggucaagcucaucaagcaggagcucgacaaguacaagaacgccgucaccgagcuccagcuccucaugcaguccacccccgccgccggcuccggcuccgccaucgccuccggcaucgccgucugcaagguccuccaccucgagggcgaggucaacaagaucaagaacgcccuccucuccaccaacaaggccgucgucucccucuccaacggcgucuccguccucaccuucaagguccucgaccucaagaacuacaucgacaagcagcuccuccccauccucaacaagcaguccugcuccaucuccaacaucgagaccgucaucgaguuccagcagaagaacaaccgccuccucgagaucacccgcgaguucuccgucaacgccggcgucaccacccccgucuccaccuacaugcucaccaacuccgagcuccucucccucaucaacgacaugcccaucaccaacgaccagaagaagcucauguccaacaacguccagaucguccgccagcaguccuacuccaucaugugcaucaucaaggaggagguccucgccuacgucguccagcucccccucuacggcgucaucgacacccccugcuggaagcuccacaccuccccccucugcaccaccaacaccaaggagggcuccaacaucugccucacccgcaccgaccgcggcugguacugcgacaacgccggcuccgucuccuucuucccccaggccgagaccugcaagguccaguccaaccgcgucuucugcgacaccaugaacucccgcacccuccccuccgaggucaaccucugcaacaucgacaucuucaaccccaaguacgacugcaagaucaugaccuccaagaccgacgucuccuccuccgucaucaccucccucggcgccaucgucuccugcuacggcaagaccaagugcaccgccuccaacaagaaccgcggcaucaucaagaccuucuccaacggcugcgacuacgucuccaacaagggcgucgacaccgucuccgucggcaacacccucuacuacgucaacaagcaggagggcaagucccucuacgucaagggcgagcccaucaucaacuucuacgacccccucgucuuccccuccgacgaguucgacgccuccaucucccaggucaacgagaagaucaaccagucccucgccuucauccgcaaguccgacgagcuccuccacaacgucaacgucggcaaguccaccaccaacaucaugaucaccaccaucaucaucgucaucaucgucauccuccuccuccucaucgccgucggccucuuccucuacugcaaggcccgcuccacccccgucacccucuccaaggaccagcucuccggcaucaacaacaucgccuucuccaacugaggacuagugaagggaacacccaaauuuaauucagccuuaagcacaauuaauuaagagugaaacguaauuguacaagcaguuggucacccaccauagggcaugaucaacaccgcaaccuuuccuuuuucccccagugauucugaaaaaccccucuucccuucagcuugcuuagauguuccaaauuuaguaagcuuaaggcggccuacagaagaaaaagaaaaaaaaggccacaaaaguucccucucacuuucaguaaauaaaauaaaagcagcaacagaaauaaagaaauaaaugaaauucaaaaugaaauaaauauuguguugugcagcauuaaaaaaucaauaaaaauuaaaaaugagcaagaucuaaaaaaaaaaaaaaaaaaaaaaaaaaaaaaaaaaaaaaaaaaaaaaaaaaaaaaaaaaaaaaaaugcaucccccccccccccccccccccccccccccccaaaggcucuuuucagagccaccagaauu

SEQ ID NO: 13510 - RNA, 2202 nt, Artificial Sequence
  mRNA product Design h-2 comprising derived and/or modified sequence from HRSV(Memphis-37)__AIY60640.1__F_DSCav1_mut0 (opt3)
gggagacccgugacccggaaguuguacggcuacgcgacuuucccucccacaaacccucgcgcccuuccuuuccuacuugggcccggcagaaagcuuaccauggagcugcccauccucaagaccaacgccauuacaacuauacuugcugcagugacgcugugcuucgccagcucccagaauaucaccgaagaguuuuaccaaucuacauguucagcggucaguaaaggcuauuugagcgcuuuaagaacugggugguacaccuccguuauuacaaucgaacugucuaacauuaaggagaauaaaugcaacggaaccgacgccaaggugaaacuaaucaagcaggaacucgauaaguauaaaaaugcaguaacugagcugcagcuucugaugcagucgaccccugccgcugguucaggcagcgcaauagccagugggaucgcuguguguaaggucuugcaccucgagggagaagugaacaaaauuaagaaugcccugcuguccacaaacaaagcgguugugucucucagcaauggcgucuccguguuaacguucaagguacuggaccuuaagaacuacaucgauaaacaauugcugccaauucuaaauaagcagucaugcaguaucagcaacauagagacuguuauugaauuucagcagaaaaauaacaggcuccuggagaucacccgggaguucucugugaaugccggugucacaacuccgguguccaccuauaugcuuacaaacucagaacuguugagccucauuaacgacaugcccaucaccaaugaucaaaagaaacugaugaguaacaaugugcagaucguccgccagcagucuuacuccauuauguguauaaucaaggaggaaguuuuagcauaugugguacaacugccucucuacggggugauugacacgccaugcuggaaacuucauacuagcccccuguguacaaccaacacuaaggagggaucgaauaucugcuugacacgaaccgaucguggcugguacugugacaacgcuggcucugucuccuuuuucccucaggccgaaacgugcaaggugcagucaaauagaguguuuugugauaccaugaacaguagaacacugccaagcgaggugaaucucugcaacauagacauuuucaaucccaaauaugauugcaagaucaugacuuccaaaaccgacgucucuagcucagugaucacaagucugggggcaauuguauccuguuacggaaagacuaaaugcaccgcuagcaacaagaauagggguaucauuaagacauuuucuaacggcugugauuauguuucaaauaaagggguggacaccgucagugugggaaacacucuuuacuaugucaacaagcaagagggcaaaagccuguacgugaagggugaaccuauaaucaauuucuaugacccauugguuuuuccguccgaugaguucgacgccucuauuucgcagguuaacgagaaaaucaaucagagccucgcguuuauccggaaguccgaugaacuguuacacaacguaaaugucgggaagucaacgacaaacauuaugauaaccacuaucauuaucgugauuaucguuauacugcuacuccugaucgccgugggacuuuucuuguacugcaaagcacgcaguacccccgucacacugucuaaggaccagcucagcggcauuaauaacaucgcuuucuccaauugaggacuagugaagggaacacccaaauuuaauucagccuuaagcacaauuaauuaagagugaaacguaauuguacaagcaguuggucacccaccauagggcaugaucaacaccgcaaccuuuccuuuuucccccagugauucugaaaaaccccucuucccuucagcuugcuuagauguuccaaauuuaguaagcuuaaggcggccuacagaagaaaaagaaaaaaaaggccacaaaaguucccucucacuuucaguaaauaaaauaaaagcagcaacagaaauaaagaaauaaaugaaauucaaaaugaaauaaauauuguguugugcagcauuaaaaaaucaauaaaaauuaaaaaugagcaagaucuaaaaaaaaaaaaaaaaaaaaaaaaaaaaaaaaaaaaaaaaaaaaaaaaaaaaaaaaaaaaaaaaugcaucccccccccccccccccccccccccccccccaaaggcucuuuucagagccaccagaauu

SEQ ID NO: 13511 - RNA, 2202 nt, Artificial Sequence
  mRNA product Design h-2 comprising derived and/or modified sequence from HRSV(Memphis-37)__AIY60640.1__F_DSCav1_mut0 (opt4)
gggagacccgugacccggaaguuguacggcuacgcgacuuucccucccacaaacccucgcgcccuuccuuuccuacuugggcccggcagaaagcuuaccauggagcugcccauccugaagaccaacgccaucaccaccauccuggccgccgugacccugugcuucgccagcagccagaacaucaccgaggaguucuaccagagcaccugcagcgccgugagcaagggcuaccugagcgcccugagaaccggcugguacaccagcgugaucaccaucgagcugagcaacaucaaggagaacaagugcaacggcaccgacgccaaggugaagcugaucaagcaggagcuggacaaguacaagaacgccgugaccgagcugcagcugcugaugcagagcacccccgccgccggcagcggcagcgccaucgccagcggcaucgccgugugcaaggugcugcaccuggagggcgaggugaacaagaucaagaacgcccugcugagcaccaacaaggccguggugagccugagcaacggcgugagcgugcugaccuucaaggugcuggaccugaagaacuacaucgacaagcagcugcugcccauccugaacaagcagagcugcagcaucagcaacaucgagaccgugaucgaguuccagcagaagaacaacagacugcuggagaucaccagagaguucagcgugaacgccggcgugaccacccccgugagcaccuacaugcugaccaacagcgagcugcugagccugaucaacgacaugcccaucaccaacgaccagaagaagcugaugagcaacaacgugcagaucgugagacagcagagcuacagcaucaugugcaucaucaaggaggaggugcuggccuacguggugcagcugccccuguacggcgugaucgacacccccugcuggaagcugcacaccagcccccugugcaccaccaacaccaaggagggcagcaacaucugccugaccagaaccgacagaggcugguacugcgacaacgccggcagcgugagcuucuucccccaggccgagaccugcaaggugcagagcaacagaguguucugcgacaccaugaacagcagaacccugcccagcgaggugaaccugugcaacaucgacaucuucaaccccaaguacgacugcaagaucaugaccagcaagaccgacgugagcagcagcgugaucaccagccugggcgccaucgugagcugcuacggcaagaccaagugcaccgccagcaacaagaacagaggcaucaucaagaccuucagcaacggcugcgacuacgugagcaacaagggcguggacaccgugagcgugggcaacacccuguacuacgugaacaagcaggagggcaagagccuguacgugaagggcgagcccaucaucaacuucuacgacccccugguguuccccagcgacgaguucgacgccagcaucagccaggugaacgagaagaucaaccagagccuggccuucaucagaaagagcgacgagcugcugcacaacgugaacgugggcaagagcaccaccaacaucaugaucaccaccaucaucaucgugaucaucgugauccugcugcugcugaucgccgugggccuguuccuguacugcaaggccagaagcacccccgugacccugagcaaggaccagcugagcggcaucaacaacaucgccuucagcaacugaggacuagugaagggaacacccaaauuuaauucagccuuaagcacaauuaauuaagagugaaacguaauuguacaagcaguuggucacccaccauagggcaugaucaacaccgcaaccuuuccuuuuucccccagugauucugaaaaaccccucuucccuucagcuugcuuagauguuccaaauuuaguaagcuuaaggcggccuacagaagaaaaagaaaaaaaaggccacaaaaguucccucucacuuucaguaaauaaaauaaaagcagcaacagaaauaaagaaauaaaugaaauucaaaaugaaauaaauauuguguugugcagcauuaaaaaaucaauaaaaauuaaaaaugagcaagaucuaaaaaaaaaaaaaaaaaaaaaaaaaaaaaaaaaaaaaaaaaaaaaaaaaaaaaaaaaaaaaaaaugcaucccccccccccccccccccccccccccccccaaaggcucuuuucagagccaccagaauu

SEQ ID NO: 13512 - RNA, 2202 nt, Artificial Sequence
  mRNA product Design h-2 comprising derived and/or modified sequence from HRSV(Memphis-37)__AIY60640.1__F_DSCav1_mut0 (opt5)
gggagacccgugacccggaaguuguacggcuacgcgacuuucccucccacaaacccucgcgcccuuccuuuccuacuugggcccggcagaaagcuuaccauggagcugcccauccucaagaccaacgccauuacaacgauccuggcugccgugacccuuugcuucgcgagcucccagaauauuacagaagaguuuuaccaaucuaccuguagcgcugucuccaaaggcuaucugucugcccucagaacagggugguacaccagcguuaucacaauugaacuguccaacaucaaggagaauaaaugcaacggaaccgacgccaaggugaaacuuaucaagcaggaacuggauaaguauaaaaaugcugugacggagcuccagcugcugaugcagucuaccccugccgcuggcagcggguccgccauugcgagcggaaucgccgucuguaaggugcuccaccuggagggcgaaguuaacaaaauuaagaaugcccuucugucuacaaacaaagcuguggucucccucagcaauggggugucuguucugaccuucaaggugcuugaccugaagaacuacaucgauaaacaacuccugccgauucugaauaagcaguccugcagcaucucuaacauugagacagucaucgaauuucagcagaaaaauaaccggcuccuggagaucacccgcgaguucuccgugaaugcuggagugacgacacccgucagcaccuauaugcuuacaaacuccgaacugcucucucugauuaacgacaugccuaucaccaaugaucaaaagaaacuuaugagcaacaauguucagauugugagacagcaguccuacagcaucauguguauuaucaaggaggaagugcuggccuaugucgugcaacucccccuguacggcguuaucgacaccccuugcuggaaacugcauacaucuccccucuguacgaccaacacaaaggagggcuccaauauuugccugacccggacagaucgcgggugguacugugacaacgcgggaagcgugagcuuuuucccucaggccgaaaccugcaagguccagucuaauagaguguuuugugauacgaugaacuccagaacacugccgucugagguuaaucucugcaacaucgacauuuucaaucccaaauaugauugcaagaucaugaccagcaaaaccgacguguccagcucugucauuacaucccugggcgcuaucgugagcuguuacgggaagaccaaaugcacagccucuaacaagaaucggggaaucauuaagacguuuuccaacggcugugauuaugucagcaauaaagggguggacaccguuuccgugggaaacacacuuuacuaugucaacaagcaagagggcaaaucucuguacgugaagggcgaaccuaucauuaauuucuaugacccccucguuuuuccuagcgaugaguucgacgcuuccaucucucaggugaacgaaaagauuaaucagagccuggccuuuauccgcaaguccgaugagcugcuccacaacgucaauguggggaaaagcaccacaaacauuaugaucaccacgaucauuaucgugauuaucguuauucugcuucugcucaucgccgucggacuguuccuguacugcaaagcuagaucuacccccgugacacuuuccaaggaccagcucagcggcaucaauaacauugcguucucuaauugaggacuagugaagggaacacccaaauuuaauucagccuuaagcacaauuaauuaagagugaaacguaauuguacaagcaguuggucacccaccauagggcaugaucaacaccgcaaccuuuccuuuuucccccagugauucugaaaaaccccucuucccuucagcuugcuuagauguuccaaauuuaguaagcuuaaggcggccuacagaagaaaaagaaaaaaaaggccacaaaaguucccucucacuuucaguaaauaaaauaaaagcagcaacagaaauaaagaaauaaaugaaauucaaaaugaaauaaauauuguguugugcagcauuaaaaaaucaauaaaaauuaaaaaugagcaagaucuaaaaaaaaaaaaaaaaaaaaaaaaaaaaaaaaaaaaaaaaaaaaaaaaaaaaaaaaaaaaaaaaugcaucccccccccccccccccccccccccccccccaaaggcucuuuucagagccaccagaauu

SEQ ID NO: 13513 - RNA, 2202 nt, Artificial Sequence
  mRNA product Design h-2 comprising derived and/or modified sequence from HRSV(Memphis-37)__AIY60640.1__F_DSCav1_mut0 (opt6)
gggagacccgugacccggaaguuguacggcuacgcgacuuucccucccacaaacccucgcgcccuuccuuuccuacuugggcccggcagaaagcuuaccauggaauuaccaaucuuaaaaacaaacgccauaacaaccauccucgcagcaguaacccuaugcuuugcauccucacaaaacauaacugaagaauuuuaccaaucaacaugcucagcaguaucaaaaggauaucuaucagcccucagaacaggaugguacacaucagucauuacaaucgaacuuucaaacauaaaagaaaauaaauguaacggcacagaugccaaaguaaaauuaauuaaacaagaacuugacaaauacaaaaaugccguaacagaacuacaacuacuaaugcaaaguacuccugcugcaggaagcggaucugcaauagcaucagguauagcaguauguaaaguucuacaccuagaaggcgaaguaaacaaaauuaaaaacgcacuacucucaacaaauaaagcaguugucucccuaucaaacggaguaucaguauuaacuuucaaaguacuagaccucaaaaacuauauagacaaacaacuauuaccaauacuaaacaaacaaagcugcucuaucuccaacaucgaaacaguaauagaauuucaacaaaaaaauaauagacuacuugaaauaaccagagaauuuucaguaaacgccggaguaacaacaccaguaucaacuuacaugcuaacaaacuccgaacuacuaucauuaauaaacgacaugcccauaacaaacgaccaaaaaaaauuaaugucaaacaacguccaaaucguacgacaacaauccuauuccauaauguguauaauaaaagaagaaguacuagcauacguaguacaauuaccauuauauggaguaauagauaccccuugcuggaaacuacacacaucaccccuaugcacuacaaauacgaaagaagguucaaauauaugcuuaacuagaaccgauagagguugguauugugacaacgcuggaucaguaucauuuuucccacaagcagaaacaugcaaaguacaaucaaacagaguauuuugcgacacuaugaacucaagaacuuuaccauccgaaguuaaucuauguaacauagauauauuuaacccaaaauacgacugcaaaauaaugacaucaaaaacagauguaucaucaucaguuauaaccucccucggagcaauaguaucaugcuauggaaaaacaaaaugcacagcaucaaacaaaaaucguggaauuauaaaaacauucucaaacggcugugacuacgucagcaauaaaggaguagacacagucucaguaggaaacacuuuauacuauguuaacaaacaagaaggaaaaucacucuacgucaaaggcgaaccaauaauaaauuucuaugacccacucguauucccauccgacgaauuugacgcaucaauaucacaaguaaaugaaaaaauaaaccaaagccuagcauuuauacgaaaaucagacgaacuacuacacaacguaaacguagguaaaagcacaaccaauauaaugauaacaacaauaaucauaguaauaaucguaauauuacuauuacuaauagcuguaggauuguuccuauacugcaaagcaagaucaacaccaguaaccuuaucuaaggaccaacuaucaggaaucaauaacauugccuucucaaacuaaggacuagugaagggaacacccaaauuuaauucagccuuaagcacaauuaauuaagagugaaacguaauuguacaagcaguuggucacccaccauagggcaugaucaacaccgcaaccuuuccuuuuucccccagugauucugaaaaaccccucuucccuucagcuugcuuagauguuccaaauuuaguaagcuuaaggcggccuacagaagaaaaagaaaaaaaaggccacaaaaguucccucucacuuucaguaaauaaaauaaaagcagcaacagaaauaaagaaauaaaugaaauucaaaaugaaauaaauauuguguugugcagcauuaaaaaaucaauaaaaauuaaaaaugagcaagaucuaaaaaaaaaaaaaaaaaaaaaaaaaaaaaaaaaaaaaaaaaaaaaaaaaaaaaaaaaaaaaaaaugcaucccccccccccccccccccccccccccccccaaaggcucuuuucagagccaccagaauu

SEQ ID NO: 13514 - RNA, 2202 nt, Artificial Sequence
  mRNA product Design h-2 comprising derived and/or modified sequence from HRSV(Memphis-37)__AIY60640.1__F_DSCav1_mut0 (opt11)
gggagacccgugacccggaaguuguacggcuacgcgacuuucccucccacaaacccucgcgcccuuccuuuccuacuugggcccggcagaaagcuuaccauggaacuaccuauccuuaaaaccaacgcaaucaccaccauccuugccgcagucacacucugcuucgcauccucacagaacaucaccgaagaguucuaucaaucaaccugcuccgccguauccaaaggauaccucucagcccuccgcaccggcugguauaccucagucauaacaaucgaauuaucaaauaucaaggagaacaaaugcaacggcaccgacgccaaagucaaacucauaaaacaagaacuagacaaauacaaaaacgccgugacagaacuccaacuccucaugcaguccacccccgcagccggauccggcucagcaaucgccucgggcauugcaguaugcaaaguccuccaccucgaaggcgaagucaacaaaaucaaaaacgcccuccucuccaccaacaaagccgucgucucccucuccaacggcguaucuguccucacuuucaagguccucgaccucaaaaacuacaucgacaagcaacuacuuccaauccucaacaagcaauccugcucaaucucaaacaucgaaaccguaauagaguuccaacaaaagaacaaccgccuccucgaaaucacccgcgaguucuccguuaacgccggugucacuaccccagucagcaccuacaugcucaccaacuccgaacuccuuucucugaucaacgacaugccaaucaccaacgaucaaaagaaauuaauguccaacaacguccagaucguccgccaacaaagcuacagcaucaugugcaucauaaaagaagaaguacuugcguacguaguucaacuaccccuuuacggcguaaucgacaccccaugcuggaaacuccacaccuccccacuaugcaccaccaacaccaaagaaggauccaacaucugccuaacccgcaccgaccgcggcugguacugcgacaacgcugggagcgucucauucuucccacaagcagaaaccugcaaaguccaaucgaaccgcguauucugcgacaccaugaacuccagaacccuaccaagcgaagucaaucuuugcaacaucgacauauuuaaccccaaauacgacugcaaaaucaugacaucaaagaccgacgucucaucuucagucauuaccucacucggcgcaauugucagcugcuacggaaagaccaaauguaccgccuccaauaaaaaccguggaaucauaaaaaccuuuagcaacggcugcgacuacgucuccaacaaaggagucgacaccgucuccgucggcaacacccucuacuacgucaacaaacaagaaggaaaaucccucuacgugaaaggcgaacccauaauaaacuucuacgacccccuagucuuccccucugacgaguucgacgccuccaucucccaagucaacgaaaagauaaaucaaucacuagccuucauacgcaaaucugacgaacuucuccacaacgucaacgucggcaaauccaccaccaacauaaugaucacaacgauaauaaucgugaucauaguaauccuacuucuccucaucgcaguaggucuauuccuauacugcaaagcccgcagcacccccgucacccuaucaaaagaccaacucuccggcaucaacaacaucgccuucucaaacuaaggacuagugaagggaacacccaaauuuaauucagccuuaagcacaauuaauuaagagugaaacguaauuguacaagcaguuggucacccaccauagggcaugaucaacaccgcaaccuuuccuuuuucccccagugauucugaaaaaccccucuucccuucagcuugcuuagauguuccaaauuuaguaagcuuaaggcggccuacagaagaaaaagaaaaaaaaggccacaaaaguucccucucacuuucaguaaauaaaauaaaagcagcaacagaaauaaagaaauaaaugaaauucaaaaugaaauaaauauuguguugugcagcauuaaaaaaucaauaaaaauuaaaaaugagcaagaucuaaaaaaaaaaaaaaaaaaaaaaaaaaaaaaaaaaaaaaaaaaaaaaaaaaaaaaaaaaaaaaaaugcaucccccccccccccccccccccccccccccccaaaggcucuuuucagagccaccagaauu

SEQ ID NO: 13515 - RNA, 1982 nt, Artificial Sequence
  mRNA product Design h-3 comprising derived and/or modified sequence from HRSV(Memphis-37)__AIY60640.1__F_DSCav1_mut0 (opt1)
gggagacccgugacccggaaguuguacggcuacgcgacuuucccucccacaaacccucgcgcccuuccuuuccuacuugggcccggcagaaagcuuaccauggagcugcccauccucaagaccaacgccaucaccacgauccuggccgcggugacccugugcuucgccagcucccagaacaucaccgaggaguucuaccagagcacgugcuccgccgucagcaagggcuaccucuccgcccugcgcaccgggugguacaccagcgugaucaccaucgagcuguccaacaucaaggagaacaagugcaacggcaccgacgccaaggugaagcucaucaagcaggagcuggacaaguacaagaacgcggucacggagcugcagcuccugaugcagagcaccccggccgccggcuccgggagcgcgaucgccuccggcaucgccgucugcaaggugcugcaccucgagggcgaggugaacaagaucaagaacgcccugcuguccaccaacaaggccgucgugagccucuccaacggggugagcguccugaccuucaaggugcuggaccucaagaacuacaucgacaagcagcugcugcccauccugaacaagcagagcugcuccaucagcaacaucgagaccgucaucgaguuccagcagaagaacaaccgccuccuggagaucacgcgggaguucagcgugaacgcgggcgugaccacccccgucuccaccuacaugcugacgaacagcgagcuccugucccugaucaacgacaugccgaucaccaacgaccagaagaagcucaugagcaacaacgugcagaucgugcgccagcaguccuacagcaucaugugcaucaucaaggaggagguccuggccuacguggugcagcugccccucuacggggucaucgacacccccugcuggaagcugcacaccagcccccugugcacgaccaacaccaaggagggcuccaacaucugccucacccggacggaccgcgggugguacugcgacaacgccggcagcguguccuucuucccgcaggccgagaccugcaagguccagagcaaccggguguucugcgacaccaugaacucccggacccugcccagcgaggugaaccucugcaacaucgacaucuucaaccccaaguacgacugcaagaucaugacguccaagaccgacgucagcuccagcgugaucaccucccugggcgccaucgugagcugcuacgggaagaccaagugcacggcgagcaacaagaaccgcggcaucaucaagaccuucuccaacgggugcgacuacgucagcaacaagggcguggacaccguguccgucggcaacacccuguacuacgugaacaagcaggagggcaagagccucuacgugaagggggagcccaucaucaacuucuacgacccgcuggucuuccccuccgacgaguucgacgccagcaucucccaggugaacgagaagaucaaccagagccuggccuucauccggaaguccgacgagcuccugcacaacgugaacgucggcaagagcaccacgaacaucaugaucaccaccaucaucaucgugaucaucgugauccugcugcuccugaucgccgucgggcuguuccucuacugcaaggcccgcuccacccccgugacgcugagcaaggaccagcuguccgggaucaacaacaucgcguucagcaacugaggacuaguggaagcauuuuccuggcugauuaaaagaaauuacucagcuauggucaucuguuccuguuagaaggcuaugcagcauauuauauacuaugcgcauguuaugaaaugcauaauaaaaaauuuuaaaaaaucuaaaagaucuaaaaaaaaaaaaaaaaaaaaaaaaaaaaaaaaaaaaaaaaaaaaaaaaaaaaaaaaaaaaaaaaugcaucccccccccccccccccccccccccccccccaaaggcucuuuucagagccaccagaauu

SEQ ID NO: 13516 - RNA, 1982 nt, Artificial Sequence
  mRNA product Design h-3 comprising derived and/or modified sequence from HRSV(Memphis-37)__AIY60640.1__F_DSCav1_mut0 (opt1)
gggagacccgugacccggaaguuguacggcuacgcgacuuucccucccacaaacccucgcgcccuuccuuuccuacuugggcccggcagaaagcuuaccauggagcugcccauccucaagaccaacgccaucaccacgauccuggccgcggugacccugugcuucgccagcucccagaacaucaccgaggaguucuaccagagcacgugcuccgccgucagcaagggcuaccucuccgcccugcgcaccgggugguacaccagcgugaucaccaucgagcuguccaacaucaaggagaacaagugcaacggcaccgacgccaaggugaagcucaucaagcaggagcuggacaaguacaagaacgcggucacggagcugcagcuccugaugcagagcaccccggccgccggguccggcagcgccaucgcguccgggaucgccgugugcaaggugcugcaccucgagggcgaggucaacaagaucaagaacgcccugcugagcaccaacaaggccguggugucccucagcaacggcgucuccgugcugaccuucaaggugcuggaccucaagaacuacaucgacaagcagcugcugcccauccucaacaagcagagcugcuccaucagcaacaucgagacggucaucgaguuccagcagaagaacaaccggcugcuggagaucacccgcgaguucuccgugaacgccggggugaccacccccgucagcacguacaugcucaccaacagcgagcugcugucccucaucaacgacaugcccaucaccaacgaccagaagaagcugaugagcaacaacgugcagaucgugcggcagcaguccuacagcaucaugugcaucaucaaggaggagguccuggcguacguggugcagcucccgcuguacggcgucaucgacacccccugcuggaagcugcacacgagcccccucugcaccaccaacaccaaggagggguccaacaucugccugacgcgcaccgaccggggcugguacugcgacaacgccggguccgugagcuucuucccccaggccgagaccugcaaggugcaguccaaccgcgucuucugcgacaccaugaacagccggacgcucccguccgaggugaaccugugcaacaucgacaucuucaaccccaaguacgacugcaagaucaugaccagcaagaccgacgucuccagcuccgugaucaccagccugggcgccaucguguccugcuacggcaagacgaagugcaccgccagcaacaagaaccgggggaucaucaagaccuucuccaacggcugcgacuacgucagcaacaaggggguggacaccgugagcgucggcaacacgcucuacuacgugaacaagcaggagggcaagucccuguacgugaagggggagcccaucaucaacuucuacgacccccuggucuucccgagcgacgaguucgacgcguccaucagccaggugaacgagaagaucaaccagucccucgccuucauccgcaagagcgacgagcugcugcacaacgugaacgucggcaaguccaccaccaacaucaugaucaccaccaucaucaucgugaucaucgugauccuccugcugcucaucgccgucgggcuguuccuguacugcaaggcccggagcacgcccgugacccuguccaaggaccagcucagcggcaucaacaacaucgccuucuccaacugaggacuaguggaagcauuuuccuggcugauuaaaagaaauuacucagcuauggucaucuguuccuguuagaaggcuaugcagcauauuauauacuaugcgcauguuaugaaaugcauaauaaaaaauuuuaaaaaaucuaaaagaucuaaaaaaaaaaaaaaaaaaaaaaaaaaaaaaaaaaaaaaaaaaaaaaaaaaaaaaaaaaaaaaaaugcaucccccccccccccccccccccccccccccccaaaggcucuuuucagagccaccagaauu

SEQ ID NO: 13517 - RNA, 1982 nt, Artificial Sequence
  mRNA product Design h-3 comprising derived and/or modified sequence from HRSV(Memphis-37)__AIY60640.1__F_DSCav1_mut0 (opt2)
gggagacccgugacccggaaguuguacggcuacgcgacuuucccucccacaaacccucgcgcccuuccuuuccuacuugggcccggcagaaagcuuaccauggagcuccccauccucaagaccaacgccaucaccaccauccucgccgccgucacccucugcuucgccuccucccagaacaucaccgaggaguucuaccaguccaccugcuccgccgucuccaagggcuaccucuccgcccuccgcaccggcugguacaccuccgucaucaccaucgagcucuccaacaucaaggagaacaagugcaacggcaccgacgccaaggucaagcucaucaagcaggagcucgacaaguacaagaacgccgucaccgagcuccagcuccucaugcaguccacccccgccgccggcuccggcuccgccaucgccuccggcaucgccgucugcaagguccuccaccucgagggcgaggucaacaagaucaagaacgcccuccucuccaccaacaaggccgucgucucccucuccaacggcgucuccguccucaccuucaagguccucgaccucaagaacuacaucgacaagcagcuccuccccauccucaacaagcaguccugcuccaucuccaacaucgagaccgucaucgaguuccagcagaagaacaaccgccuccucgagaucacccgcgaguucuccgucaacgccggcgucaccacccccgucuccaccuacaugcucaccaacuccgagcuccucucccucaucaacgacaugcccaucaccaacgaccagaagaagcucauguccaacaacguccagaucguccgccagcaguccuacuccaucaugugcaucaucaaggaggagguccucgccuacgucguccagcucccccucuacggcgucaucgacacccccugcuggaagcuccacaccuccccccucugcaccaccaacaccaaggagggcuccaacaucugccucacccgcaccgaccgcggcugguacugcgacaacgccggcuccgucuccuucuucccccaggccgagaccugcaagguccaguccaaccgcgucuucugcgacaccaugaacucccgcacccuccccuccgaggucaaccucugcaacaucgacaucuucaaccccaaguacgacugcaagaucaugaccuccaagaccgacgucuccuccuccgucaucaccucccucggcgccaucgucuccugcuacggcaagaccaagugcaccgccuccaacaagaaccgcggcaucaucaagaccuucuccaacggcugcgacuacgucuccaacaagggcgucgacaccgucuccgucggcaacacccucuacuacgucaacaagcaggagggcaagucccucuacgucaagggcgagcccaucaucaacuucuacgacccccucgucuuccccuccgacgaguucgacgccuccaucucccaggucaacgagaagaucaaccagucccucgccuucauccgcaaguccgacgagcuccuccacaacgucaacgucggcaaguccaccaccaacaucaugaucaccaccaucaucaucgucaucaucgucauccuccuccuccucaucgccgucggccucuuccucuacugcaaggcccgcuccacccccgucacccucuccaaggaccagcucuccggcaucaacaacaucgccuucuccaacugaggacuaguggaagcauuuuccuggcugauuaaaagaaauuacucagcuauggucaucuguuccuguuagaaggcuaugcagcauauuauauacuaugcgcauguuaugaaaugcauaauaaaaaauuuuaaaaaaucuaaaagaucuaaaaaaaaaaaaaaaaaaaaaaaaaaaaaaaaaaaaaaaaaaaaaaaaaaaaaaaaaaaaaaaaugcaucccccccccccccccccccccccccccccccaaaggcucuuuucagagccaccagaauu

SEQ ID NO: 13518 - RNA, 1982 nt, Artificial Sequence
  mRNA product Design h-3 comprising derived and/or modified sequence from HRSV(Memphis-37)__AIY60640.1__F_DSCav1_mut0 (opt3)
gggagacccgugacccggaaguuguacggcuacgcgacuuucccucccacaaacccucgcgcccuuccuuuccuacuugggcccggcagaaagcuuaccauggagcugcccauccucaagaccaacgccauuacaacuauacuugcugcagugacgcugugcuucgccagcucccagaauaucaccgaagaguuuuaccaaucuacauguucagcggucaguaaaggcuauuugagcgcuuuaagaacugggugguacaccuccguuauuacaaucgaacugucuaacauuaaggagaauaaaugcaacggaaccgacgccaaggugaaacuaaucaagcaggaacucgauaaguauaaaaaugcaguaacugagcugcagcuucugaugcagucgaccccugccgcugguucaggcagcgcaauagccagugggaucgcuguguguaaggucuugcaccucgagggagaagugaacaaaauuaagaaugcccugcuguccacaaacaaagcgguugugucucucagcaauggcgucuccguguuaacguucaagguacuggaccuuaagaacuacaucgauaaacaauugcugccaauucuaaauaagcagucaugcaguaucagcaacauagagacuguuauugaauuucagcagaaaaauaacaggcuccuggagaucacccgggaguucucugugaaugccggugucacaacuccgguguccaccuauaugcuuacaaacucagaacuguugagccucauuaacgacaugcccaucaccaaugaucaaaagaaacugaugaguaacaaugugcagaucguccgccagcagucuuacuccauuauguguauaaucaaggaggaaguuuuagcauaugugguacaacugccucucuacggggugauugacacgccaugcuggaaacuucauacuagcccccuguguacaaccaacacuaaggagggaucgaauaucugcuugacacgaaccgaucguggcugguacugugacaacgcuggcucugucuccuuuuucccucaggccgaaacgugcaaggugcagucaaauagaguguuuugugauaccaugaacaguagaacacugccaagcgaggugaaucucugcaacauagacauuuucaaucccaaauaugauugcaagaucaugacuuccaaaaccgacgucucuagcucagugaucacaagucugggggcaauuguauccuguuacggaaagacuaaaugcaccgcuagcaacaagaauagggguaucauuaagacauuuucuaacggcugugauuauguuucaaauaaagggguggacaccgucagugugggaaacacucuuuacuaugucaacaagcaagagggcaaaagccuguacgugaagggugaaccuauaaucaauuucuaugacccauugguuuuuccguccgaugaguucgacgccucuauuucgcagguuaacgagaaaaucaaucagagccucgcguuuauccggaaguccgaugaacuguuacacaacguaaaugucgggaagucaacgacaaacauuaugauaaccacuaucauuaucgugauuaucguuauacugcuacuccugaucgccgugggacuuuucuuguacugcaaagcacgcaguacccccgucacacugucuaaggaccagcucagcggcauuaauaacaucgcuuucuccaauugaggacuaguggaagcauuuuccuggcugauuaaaagaaauuacucagcuauggucaucuguuccuguuagaaggcuaugcagcauauuauauacuaugcgcauguuaugaaaugcauaauaaaaaauuuuaaaaaaucuaaaagaucuaaaaaaaaaaaaaaaaaaaaaaaaaaaaaaaaaaaaaaaaaaaaaaaaaaaaaaaaaaaaaaaaugcaucccccccccccccccccccccccccccccccaaaggcucuuuucagagccaccagaauu

SEQ ID NO: 13519 - RNA, 1982 nt, Artificial Sequence
  mRNA product Design h-3 comprising derived and/or modified sequence from HRSV(Memphis-37)__AIY60640.1__F_DSCav1_mut0 (opt4)
gggagacccgugacccggaaguuguacggcuacgcgacuuucccucccacaaacccucgcgcccuuccuuuccuacuugggcccggcagaaagcuuaccauggagcugcccauccugaagaccaacgccaucaccaccauccuggccgccgugacccugugcuucgccagcagccagaacaucaccgaggaguucuaccagagcaccugcagcgccgugagcaagggcuaccugagcgcccugagaaccggcugguacaccagcgugaucaccaucgagcugagcaacaucaaggagaacaagugcaacggcaccgacgccaaggugaagcugaucaagcaggagcuggacaaguacaagaacgccgugaccgagcugcagcugcugaugcagagcacccccgccgccggcagcggcagcgccaucgccagcggcaucgccgugugcaaggugcugcaccuggagggcgaggugaacaagaucaagaacgcccugcugagcaccaacaaggccguggugagccugagcaacggcgugagcgugcugaccuucaaggugcuggaccugaagaacuacaucgacaagcagcugcugcccauccugaacaagcagagcugcagcaucagcaacaucgagaccgugaucgaguuccagcagaagaacaacagacugcuggagaucaccagagaguucagcgugaacgccggcgugaccacccccgugagcaccuacaugcugaccaacagcgagcugcugagccugaucaacgacaugcccaucaccaacgaccagaagaagcugaugagcaacaacgugcagaucgugagacagcagagcuacagcaucaugugcaucaucaaggaggaggugcuggccuacguggugcagcugccccuguacggcgugaucgacacccccugcuggaagcugcacaccagcccccugugcaccaccaacaccaaggagggcagcaacaucugccugaccagaaccgacagaggcugguacugcgacaacgccggcagcgugagcuucuucccccaggccgagaccugcaaggugcagagcaacagaguguucugcgacaccaugaacagcagaacccugcccagcgaggugaaccugugcaacaucgacaucuucaaccccaaguacgacugcaagaucaugaccagcaagaccgacgugagcagcagcgugaucaccagccugggcgccaucgugagcugcuacggcaagaccaagugcaccgccagcaacaagaacagaggcaucaucaagaccuucagcaacggcugcgacuacgugagcaacaagggcguggacaccgugagcgugggcaacacccuguacuacgugaacaagcaggagggcaagagccuguacgugaagggcgagcccaucaucaacuucuacgacccccugguguuccccagcgacgaguucgacgccagcaucagccaggugaacgagaagaucaaccagagccuggccuucaucagaaagagcgacgagcugcugcacaacgugaacgugggcaagagcaccaccaacaucaugaucaccaccaucaucaucgugaucaucgugauccugcugcugcugaucgccgugggccuguuccuguacugcaaggccagaagcacccccgugacccugagcaaggaccagcugagcggcaucaacaacaucgccuucagcaacugaggacuaguggaagcauuuuccuggcugauuaaaagaaauuacucagcuauggucaucuguuccuguuagaaggcuaugcagcauauuauauacuaugcgcauguuaugaaaugcauaauaaaaaauuuuaaaaaaucuaaaagaucuaaaaaaaaaaaaaaaaaaaaaaaaaaaaaaaaaaaaaaaaaaaaaaaaaaaaaaaaaaaaaaaaugcaucccccccccccccccccccccccccccccccaaaggcucuuuucagagccaccagaauu

SEQ ID NO: 13520 - RNA, 1982 nt, Artificial Sequence
  mRNA product Design h-3 comprising derived and/or modified sequence from HRSV(Memphis-37)__AIY60640.1__F_DSCav1_mut0 (opt5)
gggagacccgugacccggaaguuguacggcuacgcgacuuucccucccacaaacccucgcgcccuuccuuuccuacuugggcccggcagaaagcuuaccauggagcugcccauccucaagaccaacgccauuacaacgauccuggcugccgugacccuuugcuucgcgagcucccagaauauuacagaagaguuuuaccaaucuaccuguagcgcugucuccaaaggcuaucugucugcccucagaacagggugguacaccagcguuaucacaauugaacuguccaacaucaaggagaauaaaugcaacggaaccgacgccaaggugaaacuuaucaagcaggaacuggauaaguauaaaaaugcugugacggagcuccagcugcugaugcagucuaccccugccgcuggcagcggguccgccauugcgagcggaaucgccgucuguaaggugcuccaccuggagggcgaaguuaacaaaauuaagaaugcccuucugucuacaaacaaagcuguggucucccucagcaauggggugucuguucugaccuucaaggugcuugaccugaagaacuacaucgauaaacaacuccugccgauucugaauaagcaguccugcagcaucucuaacauugagacagucaucgaauuucagcagaaaaauaaccggcuccuggagaucacccgcgaguucuccgugaaugcuggagugacgacacccgucagcaccuauaugcuuacaaacuccgaacugcucucucugauuaacgacaugccuaucaccaaugaucaaaagaaacuuaugagcaacaauguucagauugugagacagcaguccuacagcaucauguguauuaucaaggaggaagugcuggccuaugucgugcaacucccccuguacggcguuaucgacaccccuugcuggaaacugcauacaucuccccucuguacgaccaacacaaaggagggcuccaauauuugccugacccggacagaucgcgggugguacugugacaacgcgggaagcgugagcuuuuucccucaggccgaaaccugcaagguccagucuaauagaguguuuugugauacgaugaacuccagaacacugccgucugagguuaaucucugcaacaucgacauuuucaaucccaaauaugauugcaagaucaugaccagcaaaaccgacguguccagcucugucauuacaucccugggcgcuaucgugagcuguuacgggaagaccaaaugcacagccucuaacaagaaucggggaaucauuaagacguuuuccaacggcugugauuaugucagcaauaaagggguggacaccguuuccgugggaaacacacuuuacuaugucaacaagcaagagggcaaaucucuguacgugaagggcgaaccuaucauuaauuucuaugacccccucguuuuuccuagcgaugaguucgacgcuuccaucucucaggugaacgaaaagauuaaucagagccuggccuuuauccgcaaguccgaugagcugcuccacaacgucaauguggggaaaagcaccacaaacauuaugaucaccacgaucauuaucgugauuaucguuauucugcuucugcucaucgccgucggacuguuccuguacugcaaagcuagaucuacccccgugacacuuuccaaggaccagcucagcggcaucaauaacauugcguucucuaauugaggacuaguggaagcauuuuccuggcugauuaaaagaaauuacucagcuauggucaucuguuccuguuagaaggcuaugcagcauauuauauacuaugcgcauguuaugaaaugcauaauaaaaaauuuuaaaaaaucuaaaagaucuaaaaaaaaaaaaaaaaaaaaaaaaaaaaaaaaaaaaaaaaaaaaaaaaaaaaaaaaaaaaaaaaugcaucccccccccccccccccccccccccccccccaaaggcucuuuucagagccaccagaauu

SEQ ID NO: 13521 - RNA, 1982 nt, Artificial Sequence
  mRNA product Design h-3 comprising derived and/or modified sequence from HRSV(Memphis-37)__AIY60640.1__F_DSCav1_mut0 (opt6)
gggagacccgugacccggaaguuguacggcuacgcgacuuucccucccacaaacccucgcgcccuuccuuuccuacuugggcccggcagaaagcuuaccauggaauuaccaaucuuaaaaacaaacgccauaacaaccauccucgcagcaguaacccuaugcuuugcauccucacaaaacauaacugaagaauuuuaccaaucaacaugcucagcaguaucaaaaggauaucuaucagcccucagaacaggaugguacacaucagucauuacaaucgaacuuucaaacauaaaagaaaauaaauguaacggcacagaugccaaaguaaaauuaauuaaacaagaacuugacaaauacaaaaaugccguaacagaacuacaacuacuaaugcaaaguacuccugcugcaggaagcggaucugcaauagcaucagguauagcaguauguaaaguucuacaccuagaaggcgaaguaaacaaaauuaaaaacgcacuacucucaacaaauaaagcaguugucucccuaucaaacggaguaucaguauuaacuuucaaaguacuagaccucaaaaacuauauagacaaacaacuauuaccaauacuaaacaaacaaagcugcucuaucuccaacaucgaaacaguaauagaauuucaacaaaaaaauaauagacuacuugaaauaaccagagaauuuucaguaaacgccggaguaacaacaccaguaucaacuuacaugcuaacaaacuccgaacuacuaucauuaauaaacgacaugcccauaacaaacgaccaaaaaaaauuaaugucaaacaacguccaaaucguacgacaacaauccuauuccauaauguguauaauaaaagaagaaguacuagcauacguaguacaauuaccauuauauggaguaauagauaccccuugcuggaaacuacacacaucaccccuaugcacuacaaauacgaaagaagguucaaauauaugcuuaacuagaaccgauagagguugguauugugacaacgcuggaucaguaucauuuuucccacaagcagaaacaugcaaaguacaaucaaacagaguauuuugcgacacuaugaacucaagaacuuuaccauccgaaguuaaucuauguaacauagauauauuuaacccaaaauacgacugcaaaauaaugacaucaaaaacagauguaucaucaucaguuauaaccucccucggagcaauaguaucaugcuauggaaaaacaaaaugcacagcaucaaacaaaaaucguggaauuauaaaaacauucucaaacggcugugacuacgucagcaauaaaggaguagacacagucucaguaggaaacacuuuauacuauguuaacaaacaagaaggaaaaucacucuacgucaaaggcgaaccaauaauaaauuucuaugacccacucguauucccauccgacgaauuugacgcaucaauaucacaaguaaaugaaaaaauaaaccaaagccuagcauuuauacgaaaaucagacgaacuacuacacaacguaaacguagguaaaagcacaaccaauauaaugauaacaacaauaaucauaguaauaaucguaauauuacuauuacuaauagcuguaggauuguuccuauacugcaaagcaagaucaacaccaguaaccuuaucuaaggaccaacuaucaggaaucaauaacauugccuucucaaacuaaggacuaguggaagcauuuuccuggcugauuaaaagaaauuacucagcuauggucaucuguuccuguuagaaggcuaugcagcauauuauauacuaugcgcauguuaugaaaugcauaauaaaaaauuuuaaaaaaucuaaaagaucuaaaaaaaaaaaaaaaaaaaaaaaaaaaaaaaaaaaaaaaaaaaaaaaaaaaaaaaaaaaaaaaaugcaucccccccccccccccccccccccccccccccaaaggcucuuuucagagccaccagaauu

SEQ ID NO: 13522 - RNA, 1982 nt, Artificial Sequence
  mRNA product Design h-3 comprising derived and/or modified sequence from HRSV(Memphis-37)__AIY60640.1__F_DSCav1_mut0 (opt11)
gggagacccgugacccggaaguuguacggcuacgcgacuuucccucccacaaacccucgcgcccuuccuuuccuacuugggcccggcagaaagcuuaccauggaacuaccuauccuuaaaaccaacgcaaucaccaccauccuugccgcagucacacucugcuucgcauccucacagaacaucaccgaagaguucuaucaaucaaccugcuccgccguauccaaaggauaccucucagcccuccgcaccggcugguauaccucagucauaacaaucgaauuaucaaauaucaaggagaacaaaugcaacggcaccgacgccaaagucaaacucauaaaacaagaacuagacaaauacaaaaacgccgugacagaacuccaacuccucaugcaguccacccccgcagccggauccggcucagcaaucgccucgggcauugcaguaugcaaaguccuccaccucgaaggcgaagucaacaaaaucaaaaacgcccuccucuccaccaacaaagccgucgucucccucuccaacggcguaucuguccucacuuucaagguccucgaccucaaaaacuacaucgacaagcaacuacuuccaauccucaacaagcaauccugcucaaucucaaacaucgaaaccguaauagaguuccaacaaaagaacaaccgccuccucgaaaucacccgcgaguucuccguuaacgccggugucacuaccccagucagcaccuacaugcucaccaacuccgaacuccuuucucugaucaacgacaugccaaucaccaacgaucaaaagaaauuaauguccaacaacguccagaucguccgccaacaaagcuacagcaucaugugcaucauaaaagaagaaguacuugcguacguaguucaacuaccccuuuacggcguaaucgacaccccaugcuggaaacuccacaccuccccacuaugcaccaccaacaccaaagaaggauccaacaucugccuaacccgcaccgaccgcggcugguacugcgacaacgcugggagcgucucauucuucccacaagcagaaaccugcaaaguccaaucgaaccgcguauucugcgacaccaugaacuccagaacccuaccaagcgaagucaaucuuugcaacaucgacauauuuaaccccaaauacgacugcaaaaucaugacaucaaagaccgacgucucaucuucagucauuaccucacucggcgcaauugucagcugcuacggaaagaccaaauguaccgccuccaauaaaaaccguggaaucauaaaaaccuuuagcaacggcugcgacuacgucuccaacaaaggagucgacaccgucuccgucggcaacacccucuacuacgucaacaaacaagaaggaaaaucccucuacgugaaaggcgaacccauaauaaacuucuacgacccccuagucuuccccucugacgaguucgacgccuccaucucccaagucaacgaaaagauaaaucaaucacuagccuucauacgcaaaucugacgaacuucuccacaacgucaacgucggcaaauccaccaccaacauaaugaucacaacgauaauaaucgugaucauaguaauccuacuucuccucaucgcaguaggucuauuccuauacugcaaagcccgcagcacccccgucacccuaucaaaagaccaacucuccggcaucaacaacaucgccuucucaaacuaaggacuaguggaagcauuuuccuggcugauuaaaagaaauuacucagcuauggucaucuguuccuguuagaaggcuaugcagcauauuauauacuaugcgcauguuaugaaaugcauaauaaaaaauuuuaaaaaaucuaaaagaucuaaaaaaaaaaaaaaaaaaaaaaaaaaaaaaaaaaaaaaaaaaaaaaaaaaaaaaaaaaaaaaaaugcaucccccccccccccccccccccccccccccccaaaggcucuuuucagagccaccagaauu

SEQ ID NO: 13523 - RNA, 2045 nt, Artificial Sequence
  mRNA product Design h-4 comprising derived and/or modified sequence from HRSV(Memphis-37)__AIY60640.1__F_DSCav1_mut0 (opt1)
gggagagggcgcuuggcuugcaaggacccugagcugcggcauugaagcacacccaacccaacucgacugaagucagccucacugaaccggaucugagaaucuucucucucugggcuugccagggcucuccgaaccuagcuagcauccucuucaauuccaacuagaaagcuuaccauggagcugcccauccucaagaccaacgccaucaccacgauccuggccgcggugacccugugcuucgccagcucccagaacaucaccgaggaguucuaccagagcacgugcuccgccgucagcaagggcuaccucuccgcccugcgcaccgggugguacaccagcgugaucaccaucgagcuguccaacaucaaggagaacaagugcaacggcaccgacgccaaggugaagcucaucaagcaggagcuggacaaguacaagaacgcggucacggagcugcagcuccugaugcagagcaccccggccgccggcuccgggagcgcgaucgccuccggcaucgccgucugcaaggugcugcaccucgagggcgaggugaacaagaucaagaacgcccugcuguccaccaacaaggccgucgugagccucuccaacggggugagcguccugaccuucaaggugcuggaccucaagaacuacaucgacaagcagcugcugcccauccugaacaagcagagcugcuccaucagcaacaucgagaccgucaucgaguuccagcagaagaacaaccgccuccuggagaucacgcgggaguucagcgugaacgcgggcgugaccacccccgucuccaccuacaugcugacgaacagcgagcuccugucccugaucaacgacaugccgaucaccaacgaccagaagaagcucaugagcaacaacgugcagaucgugcgccagcaguccuacagcaucaugugcaucaucaaggaggagguccuggccuacguggugcagcugccccucuacggggucaucgacacccccugcuggaagcugcacaccagcccccugugcacgaccaacaccaaggagggcuccaacaucugccucacccggacggaccgcgggugguacugcgacaacgccggcagcguguccuucuucccgcaggccgagaccugcaagguccagagcaaccggguguucugcgacaccaugaacucccggacccugcccagcgaggugaaccucugcaacaucgacaucuucaaccccaaguacgacugcaagaucaugacguccaagaccgacgucagcuccagcgugaucaccucccugggcgccaucgugagcugcuacgggaagaccaagugcacggcgagcaacaagaaccgcggcaucaucaagaccuucuccaacgggugcgacuacgucagcaacaagggcguggacaccguguccgucggcaacacccuguacuacgugaacaagcaggagggcaagagccucuacgugaagggggagcccaucaucaacuucuacgacccgcuggucuuccccuccgacgaguucgacgccagcaucucccaggugaacgagaagaucaaccagagccuggccuucauccggaaguccgacgagcuccugcacaacgugaacgucggcaagagcaccacgaacaucaugaucaccaccaucaucaucgugaucaucgugauccugcugcuccugaucgccgucgggcuguuccucuacugcaaggcccgcuccacccccgugacgcugagcaaggaccagcuguccgggaucaacaacaucgcguucagcaacugaggacuaguaauaaggaaacuguaugaaugucugugggcaggaagugaagagauccuucuguaaagguuuuuggaauuaugucugcugaauaauaaacuuuuuugaaauaauaaaucugguagaaaaaugagaucuaaaaaaaaaaaaaaaaaaaaaaaaaaaaaaaaaaaaaaaaaaaaaaaaaaaaaaaaaaaaaaaaugcaucccccccccccccccccccccccccccccccaaaggcucuuuucagagccaccagaauu

SEQ ID NO: 13524 - RNA, 2045 nt, Artificial Sequence
  mRNA product Design h-4 comprising derived and/or modified sequence from HRSV(Memphis-37)__AIY60640.1__F_DSCav1_mut0 (opt1)
gggagagggcgcuuggcuugcaaggacccugagcugcggcauugaagcacacccaacccaacucgacugaagucagccucacugaaccggaucugagaaucuucucucucugggcuugccagggcucuccgaaccuagcuagcauccucuucaauuccaacuagaaagcuuaccauggagcugcccauccucaagaccaacgccaucaccacgauccuggccgcggugacccugugcuucgccagcucccagaacaucaccgaggaguucuaccagagcacgugcuccgccgucagcaagggcuaccucuccgcccugcgcaccgggugguacaccagcgugaucaccaucgagcuguccaacaucaaggagaacaagugcaacggcaccgacgccaaggugaagcucaucaagcaggagcuggacaaguacaagaacgcggucacggagcugcagcuccugaugcagagcaccccggccgccggguccggcagcgccaucgcguccgggaucgccgugugcaaggugcugcaccucgagggcgaggucaacaagaucaagaacgcccugcugagcaccaacaaggccguggugucccucagcaacggcgucuccgugcugaccuucaaggugcuggaccucaagaacuacaucgacaagcagcugcugcccauccucaacaagcagagcugcuccaucagcaacaucgagacggucaucgaguuccagcagaagaacaaccggcugcuggagaucacccgcgaguucuccgugaacgccggggugaccacccccgucagcacguacaugcucaccaacagcgagcugcugucccucaucaacgacaugcccaucaccaacgaccagaagaagcugaugagcaacaacgugcagaucgugcggcagcaguccuacagcaucaugugcaucaucaaggaggagguccuggcguacguggugcagcucccgcuguacggcgucaucgacacccccugcuggaagcugcacacgagcccccucugcaccaccaacaccaaggagggguccaacaucugccugacgcgcaccgaccggggcugguacugcgacaacgccggguccgugagcuucuucccccaggccgagaccugcaaggugcaguccaaccgcgucuucugcgacaccaugaacagccggacgcucccguccgaggugaaccugugcaacaucgacaucuucaaccccaaguacgacugcaagaucaugaccagcaagaccgacgucuccagcuccgugaucaccagccugggcgccaucguguccugcuacggcaagacgaagugcaccgccagcaacaagaaccgggggaucaucaagaccuucuccaacggcugcgacuacgucagcaacaaggggguggacaccgugagcgucggcaacacgcucuacuacgugaacaagcaggagggcaagucccuguacgugaagggggagcccaucaucaacuucuacgacccccuggucuucccgagcgacgaguucgacgcguccaucagccaggugaacgagaagaucaaccagucccucgccuucauccgcaagagcgacgagcugcugcacaacgugaacgucggcaaguccaccaccaacaucaugaucaccaccaucaucaucgugaucaucgugauccuccugcugcucaucgccgucgggcuguuccuguacugcaaggcccggagcacgcccgugacccuguccaaggaccagcucagcggcaucaacaacaucgccuucuccaacugaggacuaguaauaaggaaacuguaugaaugucugugggcaggaagugaagagauccuucuguaaagguuuuuggaauuaugucugcugaauaauaaacuuuuuugaaauaauaaaucugguagaaaaaugagaucuaaaaaaaaaaaaaaaaaaaaaaaaaaaaaaaaaaaaaaaaaaaaaaaaaaaaaaaaaaaaaaaaugcaucccccccccccccccccccccccccccccccaaaggcucuuuucagagccaccagaauu

SEQ ID NO: 13525 - RNA, 2045 nt, Artificial Sequence
  mRNA product Design h-4 comprising derived and/or modified sequence from HRSV(Memphis-37)__AIY60640.1__F_DSCav1_mut0 (opt2)
gggagagggcgcuuggcuugcaaggacccugagcugcggcauugaagcacacccaacccaacucgacugaagucagccucacugaaccggaucugagaaucuucucucucugggcuugccagggcucuccgaaccuagcuagcauccucuucaauuccaacuagaaagcuuaccauggagcuccccauccucaagaccaacgccaucaccaccauccucgccgccgucacccucugcuucgccuccucccagaacaucaccgaggaguucuaccaguccaccugcuccgccgucuccaagggcuaccucuccgcccuccgcaccggcugguacaccuccgucaucaccaucgagcucuccaacaucaaggagaacaagugcaacggcaccgacgccaaggucaagcucaucaagcaggagcucgacaaguacaagaacgccgucaccgagcuccagcuccucaugcaguccacccccgccgccggcuccggcuccgccaucgccuccggcaucgccgucugcaagguccuccaccucgagggcgaggucaacaagaucaagaacgcccuccucuccaccaacaaggccgucgucucccucuccaacggcgucuccguccucaccuucaagguccucgaccucaagaacuacaucgacaagcagcuccuccccauccucaacaagcaguccugcuccaucuccaacaucgagaccgucaucgaguuccagcagaagaacaaccgccuccucgagaucacccgcgaguucuccgucaacgccggcgucaccacccccgucuccaccuacaugcucaccaacuccgagcuccucucccucaucaacgacaugcccaucaccaacgaccagaagaagcucauguccaacaacguccagaucguccgccagcaguccuacuccaucaugugcaucaucaaggaggagguccucgccuacgucguccagcucccccucuacggcgucaucgacacccccugcuggaagcuccacaccuccccccucugcaccaccaacaccaaggagggcuccaacaucugccucacccgcaccgaccgcggcugguacugcgacaacgccggcuccgucuccuucuucccccaggccgagaccugcaagguccaguccaaccgcgucuucugcgacaccaugaacucccgcacccuccccuccgaggucaaccucugcaacaucgacaucuucaaccccaaguacgacugcaagaucaugaccuccaagaccgacgucuccuccuccgucaucaccucccucggcgccaucgucuccugcuacggcaagaccaagugcaccgccuccaacaagaaccgcggcaucaucaagaccuucuccaacggcugcgacuacgucuccaacaagggcgucgacaccgucuccgucggcaacacccucuacuacgucaacaagcaggagggcaagucccucuacgucaagggcgagcccaucaucaacuucuacgacccccucgucuuccccuccgacgaguucgacgccuccaucucccaggucaacgagaagaucaaccagucccucgccuucauccgcaaguccgacgagcuccuccacaacgucaacgucggcaaguccaccaccaacaucaugaucaccaccaucaucaucgucaucaucgucauccuccuccuccucaucgccgucggccucuuccucuacugcaaggcccgcuccacccccgucacccucuccaaggaccagcucuccggcaucaacaacaucgccuucuccaacugaggacuaguaauaaggaaacuguaugaaugucugugggcaggaagugaagagauccuucuguaaagguuuuuggaauuaugucugcugaauaauaaacuuuuuugaaauaauaaaucugguagaaaaaugagaucuaaaaaaaaaaaaaaaaaaaaaaaaaaaaaaaaaaaaaaaaaaaaaaaaaaaaaaaaaaaaaaaaugcaucccccccccccccccccccccccccccccccaaaggcucuuuucagagccaccagaauu

SEQ ID NO: 13526 - RNA, 2045 nt, Artificial Sequence
  mRNA product Design h-4 comprising derived and/or modified sequence from HRSV(Memphis-37)__AIY60640.1__F_DSCav1_mut0 (opt3)
gggagagggcgcuuggcuugcaaggacccugagcugcggcauugaagcacacccaacccaacucgacugaagucagccucacugaaccggaucugagaaucuucucucucugggcuugccagggcucuccgaaccuagcuagcauccucuucaauuccaacuagaaagcuuaccauggagcugcccauccucaagaccaacgccauuacaacuauacuugcugcagugacgcugugcuucgccagcucccagaauaucaccgaagaguuuuaccaaucuacauguucagcggucaguaaaggcuauuugagcgcuuuaagaacugggugguacaccuccguuauuacaaucgaacugucuaacauuaaggagaauaaaugcaacggaaccgacgccaaggugaaacuaaucaagcaggaacucgauaaguauaaaaaugcaguaacugagcugcagcuucugaugcagucgaccccugccgcugguucaggcagcgcaauagccagugggaucgcuguguguaaggucuugcaccucgagggagaagugaacaaaauuaagaaugcccugcuguccacaaacaaagcgguugugucucucagcaauggcgucuccguguuaacguucaagguacuggaccuuaagaacuacaucgauaaacaauugcugccaauucuaaauaagcagucaugcaguaucagcaacauagagacuguuauugaauuucagcagaaaaauaacaggcuccuggagaucacccgggaguucucugugaaugccggugucacaacuccgguguccaccuauaugcuuacaaacucagaacuguugagccucauuaacgacaugcccaucaccaaugaucaaaagaaacugaugaguaacaaugugcagaucguccgccagcagucuuacuccauuauguguauaaucaaggaggaaguuuuagcauaugugguacaacugccucucuacggggugauugacacgccaugcuggaaacuucauacuagcccccuguguacaaccaacacuaaggagggaucgaauaucugcuugacacgaaccgaucguggcugguacugugacaacgcuggcucugucuccuuuuucccucaggccgaaacgugcaaggugcagucaaauagaguguuuugugauaccaugaacaguagaacacugccaagcgaggugaaucucugcaacauagacauuuucaaucccaaauaugauugcaagaucaugacuuccaaaaccgacgucucuagcucagugaucacaagucugggggcaauuguauccuguuacggaaagacuaaaugcaccgcuagcaacaagaauagggguaucauuaagacauuuucuaacggcugugauuauguuucaaauaaagggguggacaccgucagugugggaaacacucuuuacuaugucaacaagcaagagggcaaaagccuguacgugaagggugaaccuauaaucaauuucuaugacccauugguuuuuccguccgaugaguucgacgccucuauuucgcagguuaacgagaaaaucaaucagagccucgcguuuauccggaaguccgaugaacuguuacacaacguaaaugucgggaagucaacgacaaacauuaugauaaccacuaucauuaucgugauuaucguuauacugcuacuccugaucgccgugggacuuuucuuguacugcaaagcacgcaguacccccgucacacugucuaaggaccagcucagcggcauuaauaacaucgcuuucuccaauugaggacuaguaauaaggaaacuguaugaaugucugugggcaggaagugaagagauccuucuguaaagguuuuuggaauuaugucugcugaauaauaaacuuuuuugaaauaauaaaucugguagaaaaaugagaucuaaaaaaaaaaaaaaaaaaaaaaaaaaaaaaaaaaaaaaaaaaaaaaaaaaaaaaaaaaaaaaaaugcaucccccccccccccccccccccccccccccccaaaggcucuuuucagagccaccagaauu

SEQ ID NO: 13527 - RNA, 2045 nt, Artificial Sequence
  mRNA product Design h-4 comprising derived and/or modified sequence from HRSV(Memphis-37)__AIY60640.1__F_DSCav1_mut0 (opt4)
gggagagggcgcuuggcuugcaaggacccugagcugcggcauugaagcacacccaacccaacucgacugaagucagccucacugaaccggaucugagaaucuucucucucugggcuugccagggcucuccgaaccuagcuagcauccucuucaauuccaacuagaaagcuuaccauggagcugcccauccugaagaccaacgccaucaccaccauccuggccgccgugacccugugcuucgccagcagccagaacaucaccgaggaguucuaccagagcaccugcagcgccgugagcaagggcuaccugagcgcccugagaaccggcugguacaccagcgugaucaccaucgagcugagcaacaucaaggagaacaagugcaacggcaccgacgccaaggugaagcugaucaagcaggagcuggacaaguacaagaacgccgugaccgagcugcagcugcugaugcagagcacccccgccgccggcagcggcagcgccaucgccagcggcaucgccgugugcaaggugcugcaccuggagggcgaggugaacaagaucaagaacgcccugcugagcaccaacaaggccguggugagccugagcaacggcgugagcgugcugaccuucaaggugcuggaccugaagaacuacaucgacaagcagcugcugcccauccugaacaagcagagcugcagcaucagcaacaucgagaccgugaucgaguuccagcagaagaacaacagacugcuggagaucaccagagaguucagcgugaacgccggcgugaccacccccgugagcaccuacaugcugaccaacagcgagcugcugagccugaucaacgacaugcccaucaccaacgaccagaagaagcugaugagcaacaacgugcagaucgugagacagcagagcuacagcaucaugugcaucaucaaggaggaggugcuggccuacguggugcagcugccccuguacggcgugaucgacacccccugcuggaagcugcacaccagcccccugugcaccaccaacaccaaggagggcagcaacaucugccugaccagaaccgacagaggcugguacugcgacaacgccggcagcgugagcuucuucccccaggccgagaccugcaaggugcagagcaacagaguguucugcgacaccaugaacagcagaacccugcccagcgaggugaaccugugcaacaucgacaucuucaaccccaaguacgacugcaagaucaugaccagcaagaccgacgugagcagcagcgugaucaccagccugggcgccaucgugagcugcuacggcaagaccaagugcaccgccagcaacaagaacagaggcaucaucaagaccuucagcaacggcugcgacuacgugagcaacaagggcguggacaccgugagcgugggcaacacccuguacuacgugaacaagcaggagggcaagagccuguacgugaagggcgagcccaucaucaacuucuacgacccccugguguuccccagcgacgaguucgacgccagcaucagccaggugaacgagaagaucaaccagagccuggccuucaucagaaagagcgacgagcugcugcacaacgugaacgugggcaagagcaccaccaacaucaugaucaccaccaucaucaucgugaucaucgugauccugcugcugcugaucgccgugggccuguuccuguacugcaaggccagaagcacccccgugacccugagcaaggaccagcugagcggcaucaacaacaucgccuucagcaacugaggacuaguaauaaggaaacuguaugaaugucugugggcaggaagugaagagauccuucuguaaagguuuuuggaauuaugucugcugaauaauaaacuuuuuugaaauaauaaaucugguagaaaaaugagaucuaaaaaaaaaaaaaaaaaaaaaaaaaaaaaaaaaaaaaaaaaaaaaaaaaaaaaaaaaaaaaaaaugcaucccccccccccccccccccccccccccccccaaaggcucuuuucagagccaccagaauu

SEQ ID NO: 13528 - RNA, 2045 nt, Artificial Sequence
  mRNA product Design h-4 comprising derived and/or modified sequence from HRSV(Memphis-37)__AIY60640.1__F_DSCav1_mut0 (opt5)
gggagagggcgcuuggcuugcaaggacccugagcugcggcauugaagcacacccaacccaacucgacugaagucagccucacugaaccggaucugagaaucuucucucucugggcuugccagggcucuccgaaccuagcuagcauccucuucaauuccaacuagaaagcuuaccauggagcugcccauccucaagaccaacgccauuacaacgauccuggcugccgugacccuuugcuucgcgagcucccagaauauuacagaagaguuuuaccaaucuaccuguagcgcugucuccaaaggcuaucugucugcccucagaacagggugguacaccagcguuaucacaauugaacuguccaacaucaaggagaauaaaugcaacggaaccgacgccaaggugaaacuuaucaagcaggaacuggauaaguauaaaaaugcugugacggagcuccagcugcugaugcagucuaccccugccgcuggcagcggguccgccauugcgagcggaaucgccgucuguaaggugcuccaccuggagggcgaaguuaacaaaauuaagaaugcccuucugucuacaaacaaagcuguggucucccucagcaauggggugucuguucugaccuucaaggugcuugaccugaagaacuacaucgauaaacaacuccugccgauucugaauaagcaguccugcagcaucucuaacauugagacagucaucgaauuucagcagaaaaauaaccggcuccuggagaucacccgcgaguucuccgugaaugcuggagugacgacacccgucagcaccuauaugcuuacaaacuccgaacugcucucucugauuaacgacaugccuaucaccaaugaucaaaagaaacuuaugagcaacaauguucagauugugagacagcaguccuacagcaucauguguauuaucaaggaggaagugcuggccuaugucgugcaacucccccuguacggcguuaucgacaccccuugcuggaaacugcauacaucuccccucuguacgaccaacacaaaggagggcuccaauauuugccugacccggacagaucgcgggugguacugugacaacgcgggaagcgugagcuuuuucccucaggccgaaaccugcaagguccagucuaauagaguguuuugugauacgaugaacuccagaacacugccgucugagguuaaucucugcaacaucgacauuuucaaucccaaauaugauugcaagaucaugaccagcaaaaccgacguguccagcucugucauuacaucccugggcgcuaucgugagcuguuacgggaagaccaaaugcacagccucuaacaagaaucggggaaucauuaagacguuuuccaacggcugugauuaugucagcaauaaagggguggacaccguuuccgugggaaacacacuuuacuaugucaacaagcaagagggcaaaucucuguacgugaagggcgaaccuaucauuaauuucuaugacccccucguuuuuccuagcgaugaguucgacgcuuccaucucucaggugaacgaaaagauuaaucagagccuggccuuuauccgcaaguccgaugagcugcuccacaacgucaauguggggaaaagcaccacaaacauuaugaucaccacgaucauuaucgugauuaucguuauucugcuucugcucaucgccgucggacuguuccuguacugcaaagcuagaucuacccccgugacacuuuccaaggaccagcucagcggcaucaauaacauugcguucucuaauugaggacuaguaauaaggaaacuguaugaaugucugugggcaggaagugaagagauccuucuguaaagguuuuuggaauuaugucugcugaauaauaaacuuuuuugaaauaauaaaucugguagaaaaaugagaucuaaaaaaaaaaaaaaaaaaaaaaaaaaaaaaaaaaaaaaaaaaaaaaaaaaaaaaaaaaaaaaaaugcaucccccccccccccccccccccccccccccccaaaggcucuuuucagagccaccagaauu

SEQ ID NO: 13529 - RNA, 2045 nt, Artificial Sequence
  mRNA product Design h-4 comprising derived and/or modified sequence from HRSV(Memphis-37)__AIY60640.1__F_DSCav1_mut0 (opt6)
gggagagggcgcuuggcuugcaaggacccugagcugcggcauugaagcacacccaacccaacucgacugaagucagccucacugaaccggaucugagaaucuucucucucugggcuugccagggcucuccgaaccuagcuagcauccucuucaauuccaacuagaaagcuuaccauggaauuaccaaucuuaaaaacaaacgccauaacaaccauccucgcagcaguaacccuaugcuuugcauccucacaaaacauaacugaagaauuuuaccaaucaacaugcucagcaguaucaaaaggauaucuaucagcccucagaacaggaugguacacaucagucauuacaaucgaacuuucaaacauaaaagaaaauaaauguaacggcacagaugccaaaguaaaauuaauuaaacaagaacuugacaaauacaaaaaugccguaacagaacuacaacuacuaaugcaaaguacuccugcugcaggaagcggaucugcaauagcaucagguauagcaguauguaaaguucuacaccuagaaggcgaaguaaacaaaauuaaaaacgcacuacucucaacaaauaaagcaguugucucccuaucaaacggaguaucaguauuaacuuucaaaguacuagaccucaaaaacuauauagacaaacaacuauuaccaauacuaaacaaacaaagcugcucuaucuccaacaucgaaacaguaauagaauuucaacaaaaaaauaauagacuacuugaaauaaccagagaauuuucaguaaacgccggaguaacaacaccaguaucaacuuacaugcuaacaaacuccgaacuacuaucauuaauaaacgacaugcccauaacaaacgaccaaaaaaaauuaaugucaaacaacguccaaaucguacgacaacaauccuauuccauaauguguauaauaaaagaagaaguacuagcauacguaguacaauuaccauuauauggaguaauagauaccccuugcuggaaacuacacacaucaccccuaugcacuacaaauacgaaagaagguucaaauauaugcuuaacuagaaccgauagagguugguauugugacaacgcuggaucaguaucauuuuucccacaagcagaaacaugcaaaguacaaucaaacagaguauuuugcgacacuaugaacucaagaacuuuaccauccgaaguuaaucuauguaacauagauauauuuaacccaaaauacgacugcaaaauaaugacaucaaaaacagauguaucaucaucaguuauaaccucccucggagcaauaguaucaugcuauggaaaaacaaaaugcacagcaucaaacaaaaaucguggaauuauaaaaacauucucaaacggcugugacuacgucagcaauaaaggaguagacacagucucaguaggaaacacuuuauacuauguuaacaaacaagaaggaaaaucacucuacgucaaaggcgaaccaauaauaaauuucuaugacccacucguauucccauccgacgaauuugacgcaucaauaucacaaguaaaugaaaaaauaaaccaaagccuagcauuuauacgaaaaucagacgaacuacuacacaacguaaacguagguaaaagcacaaccaauauaaugauaacaacaauaaucauaguaauaaucguaauauuacuauuacuaauagcuguaggauuguuccuauacugcaaagcaagaucaacaccaguaaccuuaucuaaggaccaacuaucaggaaucaauaacauugccuucucaaacuaaggacuaguaauaaggaaacuguaugaaugucugugggcaggaagugaagagauccuucuguaaagguuuuuggaauuaugucugcugaauaauaaacuuuuuugaaauaauaaaucugguagaaaaaugagaucuaaaaaaaaaaaaaaaaaaaaaaaaaaaaaaaaaaaaaaaaaaaaaaaaaaaaaaaaaaaaaaaaugcaucccccccccccccccccccccccccccccccaaaggcucuuuucagagccaccagaauu

SEQ ID NO: 13530 - RNA, 2045 nt, Artificial Sequence
  mRNA product Design h-4 comprising derived and/or modified sequence from HRSV(Memphis-37)__AIY60640.1__F_DSCav1_mut0 (opt11)
gggagagggcgcuuggcuugcaaggacccugagcugcggcauugaagcacacccaacccaacucgacugaagucagccucacugaaccggaucugagaaucuucucucucugggcuugccagggcucuccgaaccuagcuagcauccucuucaauuccaacuagaaagcuuaccauggaacuaccuauccuuaaaaccaacgcaaucaccaccauccuugccgcagucacacucugcuucgcauccucacagaacaucaccgaagaguucuaucaaucaaccugcuccgccguauccaaaggauaccucucagcccuccgcaccggcugguauaccucagucauaacaaucgaauuaucaaauaucaaggagaacaaaugcaacggcaccgacgccaaagucaaacucauaaaacaagaacuagacaaauacaaaaacgccgugacagaacuccaacuccucaugcaguccacccccgcagccggauccggcucagcaaucgccucgggcauugcaguaugcaaaguccuccaccucgaaggcgaagucaacaaaaucaaaaacgcccuccucuccaccaacaaagccgucgucucccucuccaacggcguaucuguccucacuuucaagguccucgaccucaaaaacuacaucgacaagcaacuacuuccaauccucaacaagcaauccugcucaaucucaaacaucgaaaccguaauagaguuccaacaaaagaacaaccgccuccucgaaaucacccgcgaguucuccguuaacgccggugucacuaccccagucagcaccuacaugcucaccaacuccgaacuccuuucucugaucaacgacaugccaaucaccaacgaucaaaagaaauuaauguccaacaacguccagaucguccgccaacaaagcuacagcaucaugugcaucauaaaagaagaaguacuugcguacguaguucaacuaccccuuuacggcguaaucgacaccccaugcuggaaacuccacaccuccccacuaugcaccaccaacaccaaagaaggauccaacaucugccuaacccgcaccgaccgcggcugguacugcgacaacgcugggagcgucucauucuucccacaagcagaaaccugcaaaguccaaucgaaccgcguauucugcgacaccaugaacuccagaacccuaccaagcgaagucaaucuuugcaacaucgacauauuuaaccccaaauacgacugcaaaaucaugacaucaaagaccgacgucucaucuucagucauuaccucacucggcgcaauugucagcugcuacggaaagaccaaauguaccgccuccaauaaaaaccguggaaucauaaaaaccuuuagcaacggcugcgacuacgucuccaacaaaggagucgacaccgucuccgucggcaacacccucuacuacgucaacaaacaagaaggaaaaucccucuacgugaaaggcgaacccauaauaaacuucuacgacccccuagucuuccccucugacgaguucgacgccuccaucucccaagucaacgaaaagauaaaucaaucacuagccuucauacgcaaaucugacgaacuucuccacaacgucaacgucggcaaauccaccaccaacauaaugaucacaacgauaauaaucgugaucauaguaauccuacuucuccucaucgcaguaggucuauuccuauacugcaaagcccgcagcacccccgucacccuaucaaaagaccaacucuccggcaucaacaacaucgccuucucaaacuaaggacuaguaauaaggaaacuguaugaaugucugugggcaggaagugaagagauccuucuguaaagguuuuuggaauuaugucugcugaauaauaaacuuuuuugaaauaauaaaucugguagaaaaaugagaucuaaaaaaaaaaaaaaaaaaaaaaaaaaaaaaaaaaaaaaaaaaaaaaaaaaaaaaaaaaaaaaaaugcaucccccccccccccccccccccccccccccccaaaggcucuuuucagagccaccagaauu

SEQ ID NO: 13531 - RNA, 2061 nt, Artificial Sequence
  mRNA product Design h-5 comprising derived and/or modified sequence from HRSV(Memphis-37)__AIY60640.1__F_DSCav1_mut0 (opt1)
gggagagggcgcuuggcuugcaaggacccugagcugcggcauugaagcacacccaacccaacucgacugaagucagccucacugaaccggaucugagaaucuucucucucugggcuugccagggcucuccgaaccuagcuagcauccucuucaauuccaacuagaaagcuuaccauggagcugcccauccucaagaccaacgccaucaccacgauccuggccgcggugacccugugcuucgccagcucccagaacaucaccgaggaguucuaccagagcacgugcuccgccgucagcaagggcuaccucuccgcccugcgcaccgggugguacaccagcgugaucaccaucgagcuguccaacaucaaggagaacaagugcaacggcaccgacgccaaggugaagcucaucaagcaggagcuggacaaguacaagaacgcggucacggagcugcagcuccugaugcagagcaccccggccgccggcuccgggagcgcgaucgccuccggcaucgccgucugcaaggugcugcaccucgagggcgaggugaacaagaucaagaacgcccugcuguccaccaacaaggccgucgugagccucuccaacggggugagcguccugaccuucaaggugcuggaccucaagaacuacaucgacaagcagcugcugcccauccugaacaagcagagcugcuccaucagcaacaucgagaccgucaucgaguuccagcagaagaacaaccgccuccuggagaucacgcgggaguucagcgugaacgcgggcgugaccacccccgucuccaccuacaugcugacgaacagcgagcuccugucccugaucaacgacaugccgaucaccaacgaccagaagaagcucaugagcaacaacgugcagaucgugcgccagcaguccuacagcaucaugugcaucaucaaggaggagguccuggccuacguggugcagcugccccucuacggggucaucgacacccccugcuggaagcugcacaccagcccccugugcacgaccaacaccaaggagggcuccaacaucugccucacccggacggaccgcgggugguacugcgacaacgccggcagcguguccuucuucccgcaggccgagaccugcaagguccagagcaaccggguguucugcgacaccaugaacucccggacccugcccagcgaggugaaccucugcaacaucgacaucuucaaccccaaguacgacugcaagaucaugacguccaagaccgacgucagcuccagcgugaucaccucccugggcgccaucgugagcugcuacgggaagaccaagugcacggcgagcaacaagaaccgcggcaucaucaagaccuucuccaacgggugcgacuacgucagcaacaagggcguggacaccguguccgucggcaacacccuguacuacgugaacaagcaggagggcaagagccucuacgugaagggggagcccaucaucaacuucuacgacccgcuggucuuccccuccgacgaguucgacgccagcaucucccaggugaacgagaagaucaaccagagccuggccuucauccggaaguccgacgagcuccugcacaacgugaacgucggcaagagcaccacgaacaucaugaucaccaccaucaucaucgugaucaucgugauccugcugcuccugaucgccgucgggcuguuccucuacugcaaggcccgcuccacccccgugacgcugagcaaggaccagcuguccgggaucaacaacaucgcguucagcaacugaggacuaguacuggcugcaucucccuuuccucuguccuccauccuucucccaggauggugaagggggaccugguacccagugauccccaccccaggauccuaaaucaugacuuaccugcuaauaaaaacucauuggaaaagugagaagaucuaaaaaaaaaaaaaaaaaaaaaaaaaaaaaaaaaaaaaaaaaaaaaaaaaaaaaaaaaaaaaaaaugcaucccccccccccccccccccccccccccccccaaaggcucuuuucagagccaccagaauu

SEQ ID NO: 13532 - RNA, 2061 nt, Artificial Sequence
  mRNA product Design h-5 comprising derived and/or modified sequence from HRSV(Memphis-37)__AIY60640.1__F_DSCav1_mut0 (opt1)
gggagagggcgcuuggcuugcaaggacccugagcugcggcauugaagcacacccaacccaacucgacugaagucagccucacugaaccggaucugagaaucuucucucucugggcuugccagggcucuccgaaccuagcuagcauccucuucaauuccaacuagaaagcuuaccauggagcugcccauccucaagaccaacgccaucaccacgauccuggccgcggugacccugugcuucgccagcucccagaacaucaccgaggaguucuaccagagcacgugcuccgccgucagcaagggcuaccucuccgcccugcgcaccgggugguacaccagcgugaucaccaucgagcuguccaacaucaaggagaacaagugcaacggcaccgacgccaaggugaagcucaucaagcaggagcuggacaaguacaagaacgcggucacggagcugcagcuccugaugcagagcaccccggccgccggguccggcagcgccaucgcguccgggaucgccgugugcaaggugcugcaccucgagggcgaggucaacaagaucaagaacgcccugcugagcaccaacaaggccguggugucccucagcaacggcgucuccgugcugaccuucaaggugcuggaccucaagaacuacaucgacaagcagcugcugcccauccucaacaagcagagcugcuccaucagcaacaucgagacggucaucgaguuccagcagaagaacaaccggcugcuggagaucacccgcgaguucuccgugaacgccggggugaccacccccgucagcacguacaugcucaccaacagcgagcugcugucccucaucaacgacaugcccaucaccaacgaccagaagaagcugaugagcaacaacgugcagaucgugcggcagcaguccuacagcaucaugugcaucaucaaggaggagguccuggcguacguggugcagcucccgcuguacggcgucaucgacacccccugcuggaagcugcacacgagcccccucugcaccaccaacaccaaggagggguccaacaucugccugacgcgcaccgaccggggcugguacugcgacaacgccggguccgugagcuucuucccccaggccgagaccugcaaggugcaguccaaccgcgucuucugcgacaccaugaacagccggacgcucccguccgaggugaaccugugcaacaucgacaucuucaaccccaaguacgacugcaagaucaugaccagcaagaccgacgucuccagcuccgugaucaccagccugggcgccaucguguccugcuacggcaagacgaagugcaccgccagcaacaagaaccgggggaucaucaagaccuucuccaacggcugcgacuacgucagcaacaaggggguggacaccgugagcgucggcaacacgcucuacuacgugaacaagcaggagggcaagucccuguacgugaagggggagcccaucaucaacuucuacgacccccuggucuucccgagcgacgaguucgacgcguccaucagccaggugaacgagaagaucaaccagucccucgccuucauccgcaagagcgacgagcugcugcacaacgugaacgucggcaaguccaccaccaacaucaugaucaccaccaucaucaucgugaucaucgugauccuccugcugcucaucgccgucgggcuguuccuguacugcaaggcccggagcacgcccgugacccuguccaaggaccagcucagcggcaucaacaacaucgccuucuccaacugaggacuaguacuggcugcaucucccuuuccucuguccuccauccuucucccaggauggugaagggggaccugguacccagugauccccaccccaggauccuaaaucaugacuuaccugcuaauaaaaacucauuggaaaagugagaagaucuaaaaaaaaaaaaaaaaaaaaaaaaaaaaaaaaaaaaaaaaaaaaaaaaaaaaaaaaaaaaaaaaugcaucccccccccccccccccccccccccccccccaaaggcucuuuucagagccaccagaauu

SEQ ID NO: 13533 - RNA, 2061 nt, Artificial Sequence
  mRNA product Design h-5 comprising derived and/or modified sequence from HRSV(Memphis-37)__AIY60640.1__F_DSCav1_mut0 (opt2)
gggagagggcgcuuggcuugcaaggacccugagcugcggcauugaagcacacccaacccaacucgacugaagucagccucacugaaccggaucugagaaucuucucucucugggcuugccagggcucuccgaaccuagcuagcauccucuucaauuccaacuagaaagcuuaccauggagcuccccauccucaagaccaacgccaucaccaccauccucgccgccgucacccucugcuucgccuccucccagaacaucaccgaggaguucuaccaguccaccugcuccgccgucuccaagggcuaccucuccgcccuccgcaccggcugguacaccuccgucaucaccaucgagcucuccaacaucaaggagaacaagugcaacggcaccgacgccaaggucaagcucaucaagcaggagcucgacaaguacaagaacgccgucaccgagcuccagcuccucaugcaguccacccccgccgccggcuccggcuccgccaucgccuccggcaucgccgucugcaagguccuccaccucgagggcgaggucaacaagaucaagaacgcccuccucuccaccaacaaggccgucgucucccucuccaacggcgucuccguccucaccuucaagguccucgaccucaagaacuacaucgacaagcagcuccuccccauccucaacaagcaguccugcuccaucuccaacaucgagaccgucaucgaguuccagcagaagaacaaccgccuccucgagaucacccgcgaguucuccgucaacgccggcgucaccacccccgucuccaccuacaugcucaccaacuccgagcuccucucccucaucaacgacaugcccaucaccaacgaccagaagaagcucauguccaacaacguccagaucguccgccagcaguccuacuccaucaugugcaucaucaaggaggagguccucgccuacgucguccagcucccccucuacggcgucaucgacacccccugcuggaagcuccacaccuccccccucugcaccaccaacaccaaggagggcuccaacaucugccucacccgcaccgaccgcggcugguacugcgacaacgccggcuccgucuccuucuucccccaggccgagaccugcaagguccaguccaaccgcgucuucugcgacaccaugaacucccgcacccuccccuccgaggucaaccucugcaacaucgacaucuucaaccccaaguacgacugcaagaucaugaccuccaagaccgacgucuccuccuccgucaucaccucccucggcgccaucgucuccugcuacggcaagaccaagugcaccgccuccaacaagaaccgcggcaucaucaagaccuucuccaacggcugcgacuacgucuccaacaagggcgucgacaccgucuccgucggcaacacccucuacuacgucaacaagcaggagggcaagucccucuacgucaagggcgagcccaucaucaacuucuacgacccccucgucuuccccuccgacgaguucgacgccuccaucucccaggucaacgagaagaucaaccagucccucgccuucauccgcaaguccgacgagcuccuccacaacgucaacgucggcaaguccaccaccaacaucaugaucaccaccaucaucaucgucaucaucgucauccuccuccuccucaucgccgucggccucuuccucuacugcaaggcccgcuccacccccgucacccucuccaaggaccagcucuccggcaucaacaacaucgccuucuccaacugaggacuaguacuggcugcaucucccuuuccucuguccuccauccuucucccaggauggugaagggggaccugguacccagugauccccaccccaggauccuaaaucaugacuuaccugcuaauaaaaacucauuggaaaagugagaagaucuaaaaaaaaaaaaaaaaaaaaaaaaaaaaaaaaaaaaaaaaaaaaaaaaaaaaaaaaaaaaaaaaugcaucccccccccccccccccccccccccccccccaaaggcucuuuucagagccaccagaauu

SEQ ID NO: 13534 - RNA, 2061 nt, Artificial Sequence
  mRNA product Design h-5 comprising derived and/or modified sequence from HRSV(Memphis-37)__AIY60640.1__F_DSCav1_mut0 (opt3)
gggagagggcgcuuggcuugcaaggacccugagcugcggcauugaagcacacccaacccaacucgacugaagucagccucacugaaccggaucugagaaucuucucucucugggcuugccagggcucuccgaaccuagcuagcauccucuucaauuccaacuagaaagcuuaccauggagcugcccauccucaagaccaacgccauuacaacuauacuugcugcagugacgcugugcuucgccagcucccagaauaucaccgaagaguuuuaccaaucuacauguucagcggucaguaaaggcuauuugagcgcuuuaagaacugggugguacaccuccguuauuacaaucgaacugucuaacauuaaggagaauaaaugcaacggaaccgacgccaaggugaaacuaaucaagcaggaacucgauaaguauaaaaaugcaguaacugagcugcagcuucugaugcagucgaccccugccgcugguucaggcagcgcaauagccagugggaucgcuguguguaaggucuugcaccucgagggagaagugaacaaaauuaagaaugcccugcuguccacaaacaaagcgguugugucucucagcaauggcgucuccguguuaacguucaagguacuggaccuuaagaacuacaucgauaaacaauugcugccaauucuaaauaagcagucaugcaguaucagcaacauagagacuguuauugaauuucagcagaaaaauaacaggcuccuggagaucacccgggaguucucugugaaugccggugucacaacuccgguguccaccuauaugcuuacaaacucagaacuguugagccucauuaacgacaugcccaucaccaaugaucaaaagaaacugaugaguaacaaugugcagaucguccgccagcagucuuacuccauuauguguauaaucaaggaggaaguuuuagcauaugugguacaacugccucucuacggggugauugacacgccaugcuggaaacuucauacuagcccccuguguacaaccaacacuaaggagggaucgaauaucugcuugacacgaaccgaucguggcugguacugugacaacgcuggcucugucuccuuuuucccucaggccgaaacgugcaaggugcagucaaauagaguguuuugugauaccaugaacaguagaacacugccaagcgaggugaaucucugcaacauagacauuuucaaucccaaauaugauugcaagaucaugacuuccaaaaccgacgucucuagcucagugaucacaagucugggggcaauuguauccuguuacggaaagacuaaaugcaccgcuagcaacaagaauagggguaucauuaagacauuuucuaacggcugugauuauguuucaaauaaagggguggacaccgucagugugggaaacacucuuuacuaugucaacaagcaagagggcaaaagccuguacgugaagggugaaccuauaaucaauuucuaugacccauugguuuuuccguccgaugaguucgacgccucuauuucgcagguuaacgagaaaaucaaucagagccucgcguuuauccggaaguccgaugaacuguuacacaacguaaaugucgggaagucaacgacaaacauuaugauaaccacuaucauuaucgugauuaucguuauacugcuacuccugaucgccgugggacuuuucuuguacugcaaagcacgcaguacccccgucacacugucuaaggaccagcucagcggcauuaauaacaucgcuuucuccaauugaggacuaguacuggcugcaucucccuuuccucuguccuccauccuucucccaggauggugaagggggaccugguacccagugauccccaccccaggauccuaaaucaugacuuaccugcuaauaaaaacucauuggaaaagugagaagaucuaaaaaaaaaaaaaaaaaaaaaaaaaaaaaaaaaaaaaaaaaaaaaaaaaaaaaaaaaaaaaaaaugcaucccccccccccccccccccccccccccccccaaaggcucuuuucagagccaccagaauu

SEQ ID NO: 13535 - RNA, 2061 nt, Artificial Sequence
  mRNA product Design h-5 comprising derived and/or modified sequence from HRSV(Memphis-37)__AIY60640.1__F_DSCav1_mut0 (opt4)
gggagagggcgcuuggcuugcaaggacccugagcugcggcauugaagcacacccaacccaacucgacugaagucagccucacugaaccggaucugagaaucuucucucucugggcuugccagggcucuccgaaccuagcuagcauccucuucaauuccaacuagaaagcuuaccauggagcugcccauccugaagaccaacgccaucaccaccauccuggccgccgugacccugugcuucgccagcagccagaacaucaccgaggaguucuaccagagcaccugcagcgccgugagcaagggcuaccugagcgcccugagaaccggcugguacaccagcgugaucaccaucgagcugagcaacaucaaggagaacaagugcaacggcaccgacgccaaggugaagcugaucaagcaggagcuggacaaguacaagaacgccgugaccgagcugcagcugcugaugcagagcacccccgccgccggcagcggcagcgccaucgccagcggcaucgccgugugcaaggugcugcaccuggagggcgaggugaacaagaucaagaacgcccugcugagcaccaacaaggccguggugagccugagcaacggcgugagcgugcugaccuucaaggugcuggaccugaagaacuacaucgacaagcagcugcugcccauccugaacaagcagagcugcagcaucagcaacaucgagaccgugaucgaguuccagcagaagaacaacagacugcuggagaucaccagagaguucagcgugaacgccggcgugaccacccccgugagcaccuacaugcugaccaacagcgagcugcugagccugaucaacgacaugcccaucaccaacgaccagaagaagcugaugagcaacaacgugcagaucgugagacagcagagcuacagcaucaugugcaucaucaaggaggaggugcuggccuacguggugcagcugccccuguacggcgugaucgacacccccugcuggaagcugcacaccagcccccugugcaccaccaacaccaaggagggcagcaacaucugccugaccagaaccgacagaggcugguacugcgacaacgccggcagcgugagcuucuucccccaggccgagaccugcaaggugcagagcaacagaguguucugcgacaccaugaacagcagaacccugcccagcgaggugaaccugugcaacaucgacaucuucaaccccaaguacgacugcaagaucaugaccagcaagaccgacgugagcagcagcgugaucaccagccugggcgccaucgugagcugcuacggcaagaccaagugcaccgccagcaacaagaacagaggcaucaucaagaccuucagcaacggcugcgacuacgugagcaacaagggcguggacaccgugagcgugggcaacacccuguacuacgugaacaagcaggagggcaagagccuguacgugaagggcgagcccaucaucaacuucuacgacccccugguguuccccagcgacgaguucgacgccagcaucagccaggugaacgagaagaucaaccagagccuggccuucaucagaaagagcgacgagcugcugcacaacgugaacgugggcaagagcaccaccaacaucaugaucaccaccaucaucaucgugaucaucgugauccugcugcugcugaucgccgugggccuguuccuguacugcaaggccagaagcacccccgugacccugagcaaggaccagcugagcggcaucaacaacaucgccuucagcaacugaggacuaguacuggcugcaucucccuuuccucuguccuccauccuucucccaggauggugaagggggaccugguacccagugauccccaccccaggauccuaaaucaugacuuaccugcuaauaaaaacucauuggaaaagugagaagaucuaaaaaaaaaaaaaaaaaaaaaaaaaaaaaaaaaaaaaaaaaaaaaaaaaaaaaaaaaaaaaaaaugcaucccccccccccccccccccccccccccccccaaaggcucuuuucagagccaccagaauu

SEQ ID NO: 13536 - RNA, 2061 nt, Artificial Sequence
  mRNA product Design h-5 comprising derived and/or modified sequence from HRSV(Memphis-37)__AIY60640.1__F_DSCav1_mut0 (opt5)
gggagagggcgcuuggcuugcaaggacccugagcugcggcauugaagcacacccaacccaacucgacugaagucagccucacugaaccggaucugagaaucuucucucucugggcuugccagggcucuccgaaccuagcuagcauccucuucaauuccaacuagaaagcuuaccauggagcugcccauccucaagaccaacgccauuacaacgauccuggcugccgugacccuuugcuucgcgagcucccagaauauuacagaagaguuuuaccaaucuaccuguagcgcugucuccaaaggcuaucugucugcccucagaacagggugguacaccagcguuaucacaauugaacuguccaacaucaaggagaauaaaugcaacggaaccgacgccaaggugaaacuuaucaagcaggaacuggauaaguauaaaaaugcugugacggagcuccagcugcugaugcagucuaccccugccgcuggcagcggguccgccauugcgagcggaaucgccgucuguaaggugcuccaccuggagggcgaaguuaacaaaauuaagaaugcccuucugucuacaaacaaagcuguggucucccucagcaauggggugucuguucugaccuucaaggugcuugaccugaagaacuacaucgauaaacaacuccugccgauucugaauaagcaguccugcagcaucucuaacauugagacagucaucgaauuucagcagaaaaauaaccggcuccuggagaucacccgcgaguucuccgugaaugcuggagugacgacacccgucagcaccuauaugcuuacaaacuccgaacugcucucucugauuaacgacaugccuaucaccaaugaucaaaagaaacuuaugagcaacaauguucagauugugagacagcaguccuacagcaucauguguauuaucaaggaggaagugcuggccuaugucgugcaacucccccuguacggcguuaucgacaccccuugcuggaaacugcauacaucuccccucuguacgaccaacacaaaggagggcuccaauauuugccugacccggacagaucgcgggugguacugugacaacgcgggaagcgugagcuuuuucccucaggccgaaaccugcaagguccagucuaauagaguguuuugugauacgaugaacuccagaacacugccgucugagguuaaucucugcaacaucgacauuuucaaucccaaauaugauugcaagaucaugaccagcaaaaccgacguguccagcucugucauuacaucccugggcgcuaucgugagcuguuacgggaagaccaaaugcacagccucuaacaagaaucggggaaucauuaagacguuuuccaacggcugugauuaugucagcaauaaagggguggacaccguuuccgugggaaacacacuuuacuaugucaacaagcaagagggcaaaucucuguacgugaagggcgaaccuaucauuaauuucuaugacccccucguuuuuccuagcgaugaguucgacgcuuccaucucucaggugaacgaaaagauuaaucagagccuggccuuuauccgcaaguccgaugagcugcuccacaacgucaauguggggaaaagcaccacaaacauuaugaucaccacgaucauuaucgugauuaucguuauucugcuucugcucaucgccgucggacuguuccuguacugcaaagcuagaucuacccccgugacacuuuccaaggaccagcucagcggcaucaauaacauugcguucucuaauugaggacuaguacuggcugcaucucccuuuccucuguccuccauccuucucccaggauggugaagggggaccugguacccagugauccccaccccaggauccuaaaucaugacuuaccugcuaauaaaaacucauuggaaaagugagaagaucuaaaaaaaaaaaaaaaaaaaaaaaaaaaaaaaaaaaaaaaaaaaaaaaaaaaaaaaaaaaaaaaaugcaucccccccccccccccccccccccccccccccaaaggcucuuuucagagccaccagaauu

SEQ ID NO: 13537 - RNA, 2061 nt, Artificial Sequence
  mRNA product Design h-5 comprising derived and/or modified sequence from HRSV(Memphis-37)__AIY60640.1__F_DSCav1_mut0 (opt6)
gggagagggcgcuuggcuugcaaggacccugagcugcggcauugaagcacacccaacccaacucgacugaagucagccucacugaaccggaucugagaaucuucucucucugggcuugccagggcucuccgaaccuagcuagcauccucuucaauuccaacuagaaagcuuaccauggaauuaccaaucuuaaaaacaaacgccauaacaaccauccucgcagcaguaacccuaugcuuugcauccucacaaaacauaacugaagaauuuuaccaaucaacaugcucagcaguaucaaaaggauaucuaucagcccucagaacaggaugguacacaucagucauuacaaucgaacuuucaaacauaaaagaaaauaaauguaacggcacagaugccaaaguaaaauuaauuaaacaagaacuugacaaauacaaaaaugccguaacagaacuacaacuacuaaugcaaaguacuccugcugcaggaagcggaucugcaauagcaucagguauagcaguauguaaaguucuacaccuagaaggcgaaguaaacaaaauuaaaaacgcacuacucucaacaaauaaagcaguugucucccuaucaaacggaguaucaguauuaacuuucaaaguacuagaccucaaaaacuauauagacaaacaacuauuaccaauacuaaacaaacaaagcugcucuaucuccaacaucgaaacaguaauagaauuucaacaaaaaaauaauagacuacuugaaauaaccagagaauuuucaguaaacgccggaguaacaacaccaguaucaacuuacaugcuaacaaacuccgaacuacuaucauuaauaaacgacaugcccauaacaaacgaccaaaaaaaauuaaugucaaacaacguccaaaucguacgacaacaauccuauuccauaauguguauaauaaaagaagaaguacuagcauacguaguacaauuaccauuauauggaguaauagauaccccuugcuggaaacuacacacaucaccccuaugcacuacaaauacgaaagaagguucaaauauaugcuuaacuagaaccgauagagguugguauugugacaacgcuggaucaguaucauuuuucccacaagcagaaacaugcaaaguacaaucaaacagaguauuuugcgacacuaugaacucaagaacuuuaccauccgaaguuaaucuauguaacauagauauauuuaacccaaaauacgacugcaaaauaaugacaucaaaaacagauguaucaucaucaguuauaaccucccucggagcaauaguaucaugcuauggaaaaacaaaaugcacagcaucaaacaaaaaucguggaauuauaaaaacauucucaaacggcugugacuacgucagcaauaaaggaguagacacagucucaguaggaaacacuuuauacuauguuaacaaacaagaaggaaaaucacucuacgucaaaggcgaaccaauaauaaauuucuaugacccacucguauucccauccgacgaauuugacgcaucaauaucacaaguaaaugaaaaaauaaaccaaagccuagcauuuauacgaaaaucagacgaacuacuacacaacguaaacguagguaaaagcacaaccaauauaaugauaacaacaauaaucauaguaauaaucguaauauuacuauuacuaauagcuguaggauuguuccuauacugcaaagcaagaucaacaccaguaaccuuaucuaaggaccaacuaucaggaaucaauaacauugccuucucaaacuaaggacuaguacuggcugcaucucccuuuccucuguccuccauccuucucccaggauggugaagggggaccugguacccagugauccccaccccaggauccuaaaucaugacuuaccugcuaauaaaaacucauuggaaaagugagaagaucuaaaaaaaaaaaaaaaaaaaaaaaaaaaaaaaaaaaaaaaaaaaaaaaaaaaaaaaaaaaaaaaaugcaucccccccccccccccccccccccccccccccaaaggcucuuuucagagccaccagaauu

SEQ ID NO: 13538 - RNA, 2061 nt, Artificial Sequence
  mRNA product Design h-5 comprising derived and/or modified sequence from HRSV(Memphis-37)__AIY60640.1__F_DSCav1_mut0 (opt11)
gggagagggcgcuuggcuugcaaggacccugagcugcggcauugaagcacacccaacccaacucgacugaagucagccucacugaaccggaucugagaaucuucucucucugggcuugccagggcucuccgaaccuagcuagcauccucuucaauuccaacuagaaagcuuaccauggaacuaccuauccuuaaaaccaacgcaaucaccaccauccuugccgcagucacacucugcuucgcauccucacagaacaucaccgaagaguucuaucaaucaaccugcuccgccguauccaaaggauaccucucagcccuccgcaccggcugguauaccucagucauaacaaucgaauuaucaaauaucaaggagaacaaaugcaacggcaccgacgccaaagucaaacucauaaaacaagaacuagacaaauacaaaaacgccgugacagaacuccaacuccucaugcaguccacccccgcagccggauccggcucagcaaucgccucgggcauugcaguaugcaaaguccuccaccucgaaggcgaagucaacaaaaucaaaaacgcccuccucuccaccaacaaagccgucgucucccucuccaacggcguaucuguccucacuuucaagguccucgaccucaaaaacuacaucgacaagcaacuacuuccaauccucaacaagcaauccugcucaaucucaaacaucgaaaccguaauagaguuccaacaaaagaacaaccgccuccucgaaaucacccgcgaguucuccguuaacgccggugucacuaccccagucagcaccuacaugcucaccaacuccgaacuccuuucucugaucaacgacaugccaaucaccaacgaucaaaagaaauuaauguccaacaacguccagaucguccgccaacaaagcuacagcaucaugugcaucauaaaagaagaaguacuugcguacguaguucaacuaccccuuuacggcguaaucgacaccccaugcuggaaacuccacaccuccccacuaugcaccaccaacaccaaagaaggauccaacaucugccuaacccgcaccgaccgcggcugguacugcgacaacgcugggagcgucucauucuucccacaagcagaaaccugcaaaguccaaucgaaccgcguauucugcgacaccaugaacuccagaacccuaccaagcgaagucaaucuuugcaacaucgacauauuuaaccccaaauacgacugcaaaaucaugacaucaaagaccgacgucucaucuucagucauuaccucacucggcgcaauugucagcugcuacggaaagaccaaauguaccgccuccaauaaaaaccguggaaucauaaaaaccuuuagcaacggcugcgacuacgucuccaacaaaggagucgacaccgucuccgucggcaacacccucuacuacgucaacaaacaagaaggaaaaucccucuacgugaaaggcgaacccauaauaaacuucuacgacccccuagucuuccccucugacgaguucgacgccuccaucucccaagucaacgaaaagauaaaucaaucacuagccuucauacgcaaaucugacgaacuucuccacaacgucaacgucggcaaauccaccaccaacauaaugaucacaacgauaauaaucgugaucauaguaauccuacuucuccucaucgcaguaggucuauuccuauacugcaaagcccgcagcacccccgucacccuaucaaaagaccaacucuccggcaucaacaacaucgccuucucaaacuaaggacuaguacuggcugcaucucccuuuccucuguccuccauccuucucccaggauggugaagggggaccugguacccagugauccccaccccaggauccuaaaucaugacuuaccugcuaauaaaaacucauuggaaaagugagaagaucuaaaaaaaaaaaaaaaaaaaaaaaaaaaaaaaaaaaaaaaaaaaaaaaaaaaaaaaaaaaaaaaaugcaucccccccccccccccccccccccccccccccaaaggcucuuuucagagccaccagaauu

SEQ ID NO: 13539 - RNA, 1994 nt, Artificial Sequence
  mRNA product Design i-1 comprising derived and/or modified sequence from HRSV(Memphis-37)__AIY60640.1__F_DSCav1_mut0 (opt1)
gggagagggcgcuuggcuugcaaggacccugagcugcggcauugaagcacacccaacccaacucgacugaagucagccucacugaaccggaucugagaaucuucucucucugggcuugccagggcucuccgaaccuagcuagcauccucuucaauuccaacuagaaagcuuaccauggagcugcccauccucaagaccaacgccaucaccacgauccuggccgcggugacccugugcuucgccagcucccagaacaucaccgaggaguucuaccagagcacgugcuccgccgucagcaagggcuaccucuccgcccugcgcaccgggugguacaccagcgugaucaccaucgagcuguccaacaucaaggagaacaagugcaacggcaccgacgccaaggugaagcucaucaagcaggagcuggacaaguacaagaacgcggucacggagcugcagcuccugaugcagagcaccccggccgccggcuccgggagcgcgaucgccuccggcaucgccgucugcaaggugcugcaccucgagggcgaggugaacaagaucaagaacgcccugcuguccaccaacaaggccgucgugagccucuccaacggggugagcguccugaccuucaaggugcuggaccucaagaacuacaucgacaagcagcugcugcccauccugaacaagcagagcugcuccaucagcaacaucgagaccgucaucgaguuccagcagaagaacaaccgccuccuggagaucacgcgggaguucagcgugaacgcgggcgugaccacccccgucuccaccuacaugcugacgaacagcgagcuccugucccugaucaacgacaugccgaucaccaacgaccagaagaagcucaugagcaacaacgugcagaucgugcgccagcaguccuacagcaucaugugcaucaucaaggaggagguccuggccuacguggugcagcugccccucuacggggucaucgacacccccugcuggaagcugcacaccagcccccugugcacgaccaacaccaaggagggcuccaacaucugccucacccggacggaccgcgggugguacugcgacaacgccggcagcguguccuucuucccgcaggccgagaccugcaagguccagagcaaccggguguucugcgacaccaugaacucccggacccugcccagcgaggugaaccucugcaacaucgacaucuucaaccccaaguacgacugcaagaucaugacguccaagaccgacgucagcuccagcgugaucaccucccugggcgccaucgugagcugcuacgggaagaccaagugcacggcgagcaacaagaaccgcggcaucaucaagaccuucuccaacgggugcgacuacgucagcaacaagggcguggacaccguguccgucggcaacacccuguacuacgugaacaagcaggagggcaagagccucuacgugaagggggagcccaucaucaacuucuacgacccgcuggucuuccccuccgacgaguucgacgccagcaucucccaggugaacgagaagaucaaccagagccuggccuucauccggaaguccgacgagcuccugcacaacgugaacgucggcaagagcaccacgaacaucaugaucaccaccaucaucaucgugaucaucgugauccugcugcuccugaucgccgucgggcuguuccucuacugcaaggcccgcuccacccccgugacgcugagcaaggaccagcuguccgggaucaacaacaucgcguucagcaacugaggacuaguguccaccugucccuccugggcugcuggauugucucguuuuccugccaaauaaacaggaucagcgcuuuacagaucuaaaaaaaaaaaaaaaaaaaaaaaaaaaaaaaaaaaaaaaaaaaaaaaaaaaaaaaaaaaaaaaaugcaucccccccccccccccccccccccccccccccaaaggcucuuuucagagccaccagaauu

SEQ ID NO: 13540 - RNA, 1994 nt, Artificial Sequence
  mRNA product Design i-1 comprising derived and/or modified sequence from HRSV(Memphis-37)__AIY60640.1__F_DSCav1_mut0 (opt1)
gggagagggcgcuuggcuugcaaggacccugagcugcggcauugaagcacacccaacccaacucgacugaagucagccucacugaaccggaucugagaaucuucucucucugggcuugccagggcucuccgaaccuagcuagcauccucuucaauuccaacuagaaagcuuaccauggagcugcccauccucaagaccaacgccaucaccacgauccuggccgcggugacccugugcuucgccagcucccagaacaucaccgaggaguucuaccagagcacgugcuccgccgucagcaagggcuaccucuccgcccugcgcaccgggugguacaccagcgugaucaccaucgagcuguccaacaucaaggagaacaagugcaacggcaccgacgccaaggugaagcucaucaagcaggagcuggacaaguacaagaacgcggucacggagcugcagcuccugaugcagagcaccccggccgccggguccggcagcgccaucgcguccgggaucgccgugugcaaggugcugcaccucgagggcgaggucaacaagaucaagaacgcccugcugagcaccaacaaggccguggugucccucagcaacggcgucuccgugcugaccuucaaggugcuggaccucaagaacuacaucgacaagcagcugcugcccauccucaacaagcagagcugcuccaucagcaacaucgagacggucaucgaguuccagcagaagaacaaccggcugcuggagaucacccgcgaguucuccgugaacgccggggugaccacccccgucagcacguacaugcucaccaacagcgagcugcugucccucaucaacgacaugcccaucaccaacgaccagaagaagcugaugagcaacaacgugcagaucgugcggcagcaguccuacagcaucaugugcaucaucaaggaggagguccuggcguacguggugcagcucccgcuguacggcgucaucgacacccccugcuggaagcugcacacgagcccccucugcaccaccaacaccaaggagggguccaacaucugccugacgcgcaccgaccggggcugguacugcgacaacgccggguccgugagcuucuucccccaggccgagaccugcaaggugcaguccaaccgcgucuucugcgacaccaugaacagccggacgcucccguccgaggugaaccugugcaacaucgacaucuucaaccccaaguacgacugcaagaucaugaccagcaagaccgacgucuccagcuccgugaucaccagccugggcgccaucguguccugcuacggcaagacgaagugcaccgccagcaacaagaaccgggggaucaucaagaccuucuccaacggcugcgacuacgucagcaacaaggggguggacaccgugagcgucggcaacacgcucuacuacgugaacaagcaggagggcaagucccuguacgugaagggggagcccaucaucaacuucuacgacccccuggucuucccgagcgacgaguucgacgcguccaucagccaggugaacgagaagaucaaccagucccucgccuucauccgcaagagcgacgagcugcugcacaacgugaacgucggcaaguccaccaccaacaucaugaucaccaccaucaucaucgugaucaucgugauccuccugcugcucaucgccgucgggcuguuccuguacugcaaggcccggagcacgcccgugacccuguccaaggaccagcucagcggcaucaacaacaucgccuucuccaacugaggacuaguguccaccugucccuccugggcugcuggauugucucguuuuccugccaaauaaacaggaucagcgcuuuacagaucuaaaaaaaaaaaaaaaaaaaaaaaaaaaaaaaaaaaaaaaaaaaaaaaaaaaaaaaaaaaaaaaaugcaucccccccccccccccccccccccccccccccaaaggcucuuuucagagccaccagaauu

SEQ ID NO: 13541 - RNA, 1994 nt, Artificial Sequence
  mRNA product Design i-1 comprising derived and/or modified sequence from HRSV(Memphis-37)__AIY60640.1__F_DSCav1_mut0 (opt2)
gggagagggcgcuuggcuugcaaggacccugagcugcggcauugaagcacacccaacccaacucgacugaagucagccucacugaaccggaucugagaaucuucucucucugggcuugccagggcucuccgaaccuagcuagcauccucuucaauuccaacuagaaagcuuaccauggagcuccccauccucaagaccaacgccaucaccaccauccucgccgccgucacccucugcuucgccuccucccagaacaucaccgaggaguucuaccaguccaccugcuccgccgucuccaagggcuaccucuccgcccuccgcaccggcugguacaccuccgucaucaccaucgagcucuccaacaucaaggagaacaagugcaacggcaccgacgccaaggucaagcucaucaagcaggagcucgacaaguacaagaacgccgucaccgagcuccagcuccucaugcaguccacccccgccgccggcuccggcuccgccaucgccuccggcaucgccgucugcaagguccuccaccucgagggcgaggucaacaagaucaagaacgcccuccucuccaccaacaaggccgucgucucccucuccaacggcgucuccguccucaccuucaagguccucgaccucaagaacuacaucgacaagcagcuccuccccauccucaacaagcaguccugcuccaucuccaacaucgagaccgucaucgaguuccagcagaagaacaaccgccuccucgagaucacccgcgaguucuccgucaacgccggcgucaccacccccgucuccaccuacaugcucaccaacuccgagcuccucucccucaucaacgacaugcccaucaccaacgaccagaagaagcucauguccaacaacguccagaucguccgccagcaguccuacuccaucaugugcaucaucaaggaggagguccucgccuacgucguccagcucccccucuacggcgucaucgacacccccugcuggaagcuccacaccuccccccucugcaccaccaacaccaaggagggcuccaacaucugccucacccgcaccgaccgcggcugguacugcgacaacgccggcuccgucuccuucuucccccaggccgagaccugcaagguccaguccaaccgcgucuucugcgacaccaugaacucccgcacccuccccuccgaggucaaccucugcaacaucgacaucuucaaccccaaguacgacugcaagaucaugaccuccaagaccgacgucuccuccuccgucaucaccucccucggcgccaucgucuccugcuacggcaagaccaagugcaccgccuccaacaagaaccgcggcaucaucaagaccuucuccaacggcugcgacuacgucuccaacaagggcgucgacaccgucuccgucggcaacacccucuacuacgucaacaagcaggagggcaagucccucuacgucaagggcgagcccaucaucaacuucuacgacccccucgucuuccccuccgacgaguucgacgccuccaucucccaggucaacgagaagaucaaccagucccucgccuucauccgcaaguccgacgagcuccuccacaacgucaacgucggcaaguccaccaccaacaucaugaucaccaccaucaucaucgucaucaucgucauccuccuccuccucaucgccgucggccucuuccucuacugcaaggcccgcuccacccccgucacccucuccaaggaccagcucuccggcaucaacaacaucgccuucuccaacugaggacuaguguccaccugucccuccugggcugcuggauugucucguuuuccugccaaauaaacaggaucagcgcuuuacagaucuaaaaaaaaaaaaaaaaaaaaaaaaaaaaaaaaaaaaaaaaaaaaaaaaaaaaaaaaaaaaaaaaugcaucccccccccccccccccccccccccccccccaaaggcucuuuucagagccaccagaauu

SEQ ID NO: 13542 - RNA, 1994 nt, Artificial Sequence
  mRNA product Design i-1 comprising derived and/or modified sequence from HRSV(Memphis-37)__AIY60640.1__F_DSCav1_mut0 (opt3)
gggagagggcgcuuggcuugcaaggacccugagcugcggcauugaagcacacccaacccaacucgacugaagucagccucacugaaccggaucugagaaucuucucucucugggcuugccagggcucuccgaaccuagcuagcauccucuucaauuccaacuagaaagcuuaccauggagcugcccauccucaagaccaacgccauuacaacuauacuugcugcagugacgcugugcuucgccagcucccagaauaucaccgaagaguuuuaccaaucuacauguucagcggucaguaaaggcuauuugagcgcuuuaagaacugggugguacaccuccguuauuacaaucgaacugucuaacauuaaggagaauaaaugcaacggaaccgacgccaaggugaaacuaaucaagcaggaacucgauaaguauaaaaaugcaguaacugagcugcagcuucugaugcagucgaccccugccgcugguucaggcagcgcaauagccagugggaucgcuguguguaaggucuugcaccucgagggagaagugaacaaaauuaagaaugcccugcuguccacaaacaaagcgguugugucucucagcaauggcgucuccguguuaacguucaagguacuggaccuuaagaacuacaucgauaaacaauugcugccaauucuaaauaagcagucaugcaguaucagcaacauagagacuguuauugaauuucagcagaaaaauaacaggcuccuggagaucacccgggaguucucugugaaugccggugucacaacuccgguguccaccuauaugcuuacaaacucagaacuguugagccucauuaacgacaugcccaucaccaaugaucaaaagaaacugaugaguaacaaugugcagaucguccgccagcagucuuacuccauuauguguauaaucaaggaggaaguuuuagcauaugugguacaacugccucucuacggggugauugacacgccaugcuggaaacuucauacuagcccccuguguacaaccaacacuaaggagggaucgaauaucugcuugacacgaaccgaucguggcugguacugugacaacgcuggcucugucuccuuuuucccucaggccgaaacgugcaaggugcagucaaauagaguguuuugugauaccaugaacaguagaacacugccaagcgaggugaaucucugcaacauagacauuuucaaucccaaauaugauugcaagaucaugacuuccaaaaccgacgucucuagcucagugaucacaagucugggggcaauuguauccuguuacggaaagacuaaaugcaccgcuagcaacaagaauagggguaucauuaagacauuuucuaacggcugugauuauguuucaaauaaagggguggacaccgucagugugggaaacacucuuuacuaugucaacaagcaagagggcaaaagccuguacgugaagggugaaccuauaaucaauuucuaugacccauugguuuuuccguccgaugaguucgacgccucuauuucgcagguuaacgagaaaaucaaucagagccucgcguuuauccggaaguccgaugaacuguuacacaacguaaaugucgggaagucaacgacaaacauuaugauaaccacuaucauuaucgugauuaucguuauacugcuacuccugaucgccgugggacuuuucuuguacugcaaagcacgcaguacccccgucacacugucuaaggaccagcucagcggcauuaauaacaucgcuuucuccaauugaggacuaguguccaccugucccuccugggcugcuggauugucucguuuuccugccaaauaaacaggaucagcgcuuuacagaucuaaaaaaaaaaaaaaaaaaaaaaaaaaaaaaaaaaaaaaaaaaaaaaaaaaaaaaaaaaaaaaaaugcaucccccccccccccccccccccccccccccccaaaggcucuuuucagagccaccagaauu

SEQ ID NO: 13543 - RNA, 1994 nt, Artificial Sequence
  mRNA product Design i-1 comprising derived and/or modified sequence from HRSV(Memphis-37)__AIY60640.1__F_DSCav1_mut0 (opt4)
gggagagggcgcuuggcuugcaaggacccugagcugcggcauugaagcacacccaacccaacucgacugaagucagccucacugaaccggaucugagaaucuucucucucugggcuugccagggcucuccgaaccuagcuagcauccucuucaauuccaacuagaaagcuuaccauggagcugcccauccugaagaccaacgccaucaccaccauccuggccgccgugacccugugcuucgccagcagccagaacaucaccgaggaguucuaccagagcaccugcagcgccgugagcaagggcuaccugagcgcccugagaaccggcugguacaccagcgugaucaccaucgagcugagcaacaucaaggagaacaagugcaacggcaccgacgccaaggugaagcugaucaagcaggagcuggacaaguacaagaacgccgugaccgagcugcagcugcugaugcagagcacccccgccgccggcagcggcagcgccaucgccagcggcaucgccgugugcaaggugcugcaccuggagggcgaggugaacaagaucaagaacgcccugcugagcaccaacaaggccguggugagccugagcaacggcgugagcgugcugaccuucaaggugcuggaccugaagaacuacaucgacaagcagcugcugcccauccugaacaagcagagcugcagcaucagcaacaucgagaccgugaucgaguuccagcagaagaacaacagacugcuggagaucaccagagaguucagcgugaacgccggcgugaccacccccgugagcaccuacaugcugaccaacagcgagcugcugagccugaucaacgacaugcccaucaccaacgaccagaagaagcugaugagcaacaacgugcagaucgugagacagcagagcuacagcaucaugugcaucaucaaggaggaggugcuggccuacguggugcagcugccccuguacggcgugaucgacacccccugcuggaagcugcacaccagcccccugugcaccaccaacaccaaggagggcagcaacaucugccugaccagaaccgacagaggcugguacugcgacaacgccggcagcgugagcuucuucccccaggccgagaccugcaaggugcagagcaacagaguguucugcgacaccaugaacagcagaacccugcccagcgaggugaaccugugcaacaucgacaucuucaaccccaaguacgacugcaagaucaugaccagcaagaccgacgugagcagcagcgugaucaccagccugggcgccaucgugagcugcuacggcaagaccaagugcaccgccagcaacaagaacagaggcaucaucaagaccuucagcaacggcugcgacuacgugagcaacaagggcguggacaccgugagcgugggcaacacccuguacuacgugaacaagcaggagggcaagagccuguacgugaagggcgagcccaucaucaacuucuacgacccccugguguuccccagcgacgaguucgacgccagcaucagccaggugaacgagaagaucaaccagagccuggccuucaucagaaagagcgacgagcugcugcacaacgugaacgugggcaagagcaccaccaacaucaugaucaccaccaucaucaucgugaucaucgugauccugcugcugcugaucgccgugggccuguuccuguacugcaaggccagaagcacccccgugacccugagcaaggaccagcugagcggcaucaacaacaucgccuucagcaacugaggacuaguguccaccugucccuccugggcugcuggauugucucguuuuccugccaaauaaacaggaucagcgcuuuacagaucuaaaaaaaaaaaaaaaaaaaaaaaaaaaaaaaaaaaaaaaaaaaaaaaaaaaaaaaaaaaaaaaaugcaucccccccccccccccccccccccccccccccaaaggcucuuuucagagccaccagaauu

SEQ ID NO: 13544 - RNA, 1994 nt, Artificial Sequence
  mRNA product Design i-1 comprising derived and/or modified sequence from HRSV(Memphis-37)__AIY60640.1__F_DSCav1_mut0 (opt5)
gggagagggcgcuuggcuugcaaggacccugagcugcggcauugaagcacacccaacccaacucgacugaagucagccucacugaaccggaucugagaaucuucucucucugggcuugccagggcucuccgaaccuagcuagcauccucuucaauuccaacuagaaagcuuaccauggagcugcccauccucaagaccaacgccauuacaacgauccuggcugccgugacccuuugcuucgcgagcucccagaauauuacagaagaguuuuaccaaucuaccuguagcgcugucuccaaaggcuaucugucugcccucagaacagggugguacaccagcguuaucacaauugaacuguccaacaucaaggagaauaaaugcaacggaaccgacgccaaggugaaacuuaucaagcaggaacuggauaaguauaaaaaugcugugacggagcuccagcugcugaugcagucuaccccugccgcuggcagcggguccgccauugcgagcggaaucgccgucuguaaggugcuccaccuggagggcgaaguuaacaaaauuaagaaugcccuucugucuacaaacaaagcuguggucucccucagcaauggggugucuguucugaccuucaaggugcuugaccugaagaacuacaucgauaaacaacuccugccgauucugaauaagcaguccugcagcaucucuaacauugagacagucaucgaauuucagcagaaaaauaaccggcuccuggagaucacccgcgaguucuccgugaaugcuggagugacgacacccgucagcaccuauaugcuuacaaacuccgaacugcucucucugauuaacgacaugccuaucaccaaugaucaaaagaaacuuaugagcaacaauguucagauugugagacagcaguccuacagcaucauguguauuaucaaggaggaagugcuggccuaugucgugcaacucccccuguacggcguuaucgacaccccuugcuggaaacugcauacaucuccccucuguacgaccaacacaaaggagggcuccaauauuugccugacccggacagaucgcgggugguacugugacaacgcgggaagcgugagcuuuuucccucaggccgaaaccugcaagguccagucuaauagaguguuuugugauacgaugaacuccagaacacugccgucugagguuaaucucugcaacaucgacauuuucaaucccaaauaugauugcaagaucaugaccagcaaaaccgacguguccagcucugucauuacaucccugggcgcuaucgugagcuguuacgggaagaccaaaugcacagccucuaacaagaaucggggaaucauuaagacguuuuccaacggcugugauuaugucagcaauaaagggguggacaccguuuccgugggaaacacacuuuacuaugucaacaagcaagagggcaaaucucuguacgugaagggcgaaccuaucauuaauuucuaugacccccucguuuuuccuagcgaugaguucgacgcuuccaucucucaggugaacgaaaagauuaaucagagccuggccuuuauccgcaaguccgaugagcugcuccacaacgucaauguggggaaaagcaccacaaacauuaugaucaccacgaucauuaucgugauuaucguuauucugcuucugcucaucgccgucggacuguuccuguacugcaaagcuagaucuacccccgugacacuuuccaaggaccagcucagcggcaucaauaacauugcguucucuaauugaggacuaguguccaccugucccuccugggcugcuggauugucucguuuuccugccaaauaaacaggaucagcgcuuuacagaucuaaaaaaaaaaaaaaaaaaaaaaaaaaaaaaaaaaaaaaaaaaaaaaaaaaaaaaaaaaaaaaaaugcaucccccccccccccccccccccccccccccccaaaggcucuuuucagagccaccagaauu

SEQ ID NO: 13545 - RNA, 1994 nt, Artificial Sequence
  mRNA product Design i-1 comprising derived and/or modified sequence from HRSV(Memphis-37)__AIY60640.1__F_DSCav1_mut0 (opt6)
gggagagggcgcuuggcuugcaaggacccugagcugcggcauugaagcacacccaacccaacucgacugaagucagccucacugaaccggaucugagaaucuucucucucugggcuugccagggcucuccgaaccuagcuagcauccucuucaauuccaacuagaaagcuuaccauggaauuaccaaucuuaaaaacaaacgccauaacaaccauccucgcagcaguaacccuaugcuuugcauccucacaaaacauaacugaagaauuuuaccaaucaacaugcucagcaguaucaaaaggauaucuaucagcccucagaacaggaugguacacaucagucauuacaaucgaacuuucaaacauaaaagaaaauaaauguaacggcacagaugccaaaguaaaauuaauuaaacaagaacuugacaaauacaaaaaugccguaacagaacuacaacuacuaaugcaaaguacuccugcugcaggaagcggaucugcaauagcaucagguauagcaguauguaaaguucuacaccuagaaggcgaaguaaacaaaauuaaaaacgcacuacucucaacaaauaaagcaguugucucccuaucaaacggaguaucaguauuaacuuucaaaguacuagaccucaaaaacuauauagacaaacaacuauuaccaauacuaaacaaacaaagcugcucuaucuccaacaucgaaacaguaauagaauuucaacaaaaaaauaauagacuacuugaaauaaccagagaauuuucaguaaacgccggaguaacaacaccaguaucaacuuacaugcuaacaaacuccgaacuacuaucauuaauaaacgacaugcccauaacaaacgaccaaaaaaaauuaaugucaaacaacguccaaaucguacgacaacaauccuauuccauaauguguauaauaaaagaagaaguacuagcauacguaguacaauuaccauuauauggaguaauagauaccccuugcuggaaacuacacacaucaccccuaugcacuacaaauacgaaagaagguucaaauauaugcuuaacuagaaccgauagagguugguauugugacaacgcuggaucaguaucauuuuucccacaagcagaaacaugcaaaguacaaucaaacagaguauuuugcgacacuaugaacucaagaacuuuaccauccgaaguuaaucuauguaacauagauauauuuaacccaaaauacgacugcaaaauaaugacaucaaaaacagauguaucaucaucaguuauaaccucccucggagcaauaguaucaugcuauggaaaaacaaaaugcacagcaucaaacaaaaaucguggaauuauaaaaacauucucaaacggcugugacuacgucagcaauaaaggaguagacacagucucaguaggaaacacuuuauacuauguuaacaaacaagaaggaaaaucacucuacgucaaaggcgaaccaauaauaaauuucuaugacccacucguauucccauccgacgaauuugacgcaucaauaucacaaguaaaugaaaaaauaaaccaaagccuagcauuuauacgaaaaucagacgaacuacuacacaacguaaacguagguaaaagcacaaccaauauaaugauaacaacaauaaucauaguaauaaucguaauauuacuauuacuaauagcuguaggauuguuccuauacugcaaagcaagaucaacaccaguaaccuuaucuaaggaccaacuaucaggaaucaauaacauugccuucucaaacuaaggacuaguguccaccugucccuccugggcugcuggauugucucguuuuccugccaaauaaacaggaucagcgcuuuacagaucuaaaaaaaaaaaaaaaaaaaaaaaaaaaaaaaaaaaaaaaaaaaaaaaaaaaaaaaaaaaaaaaaugcaucccccccccccccccccccccccccccccccaaaggcucuuuucagagccaccagaauu

SEQ ID NO: 13546 - RNA, 1994 nt, Artificial Sequence
  mRNA product Design i-1 comprising derived and/or modified sequence from HRSV(Memphis-37)__AIY60640.1__F_DSCav1_mut0 (opt11)
gggagagggcgcuuggcuugcaaggacccugagcugcggcauugaagcacacccaacccaacucgacugaagucagccucacugaaccggaucugagaaucuucucucucugggcuugccagggcucuccgaaccuagcuagcauccucuucaauuccaacuagaaagcuuaccauggaacuaccuauccuuaaaaccaacgcaaucaccaccauccuugccgcagucacacucugcuucgcauccucacagaacaucaccgaagaguucuaucaaucaaccugcuccgccguauccaaaggauaccucucagcccuccgcaccggcugguauaccucagucauaacaaucgaauuaucaaauaucaaggagaacaaaugcaacggcaccgacgccaaagucaaacucauaaaacaagaacuagacaaauacaaaaacgccgugacagaacuccaacuccucaugcaguccacccccgcagccggauccggcucagcaaucgccucgggcauugcaguaugcaaaguccuccaccucgaaggcgaagucaacaaaaucaaaaacgcccuccucuccaccaacaaagccgucgucucccucuccaacggcguaucuguccucacuuucaagguccucgaccucaaaaacuacaucgacaagcaacuacuuccaauccucaacaagcaauccugcucaaucucaaacaucgaaaccguaauagaguuccaacaaaagaacaaccgccuccucgaaaucacccgcgaguucuccguuaacgccggugucacuaccccagucagcaccuacaugcucaccaacuccgaacuccuuucucugaucaacgacaugccaaucaccaacgaucaaaagaaauuaauguccaacaacguccagaucguccgccaacaaagcuacagcaucaugugcaucauaaaagaagaaguacuugcguacguaguucaacuaccccuuuacggcguaaucgacaccccaugcuggaaacuccacaccuccccacuaugcaccaccaacaccaaagaaggauccaacaucugccuaacccgcaccgaccgcggcugguacugcgacaacgcugggagcgucucauucuucccacaagcagaaaccugcaaaguccaaucgaaccgcguauucugcgacaccaugaacuccagaacccuaccaagcgaagucaaucuuugcaacaucgacauauuuaaccccaaauacgacugcaaaaucaugacaucaaagaccgacgucucaucuucagucauuaccucacucggcgcaauugucagcugcuacggaaagaccaaauguaccgccuccaauaaaaaccguggaaucauaaaaaccuuuagcaacggcugcgacuacgucuccaacaaaggagucgacaccgucuccgucggcaacacccucuacuacgucaacaaacaagaaggaaaaucccucuacgugaaaggcgaacccauaauaaacuucuacgacccccuagucuuccccucugacgaguucgacgccuccaucucccaagucaacgaaaagauaaaucaaucacuagccuucauacgcaaaucugacgaacuucuccacaacgucaacgucggcaaauccaccaccaacauaaugaucacaacgauaauaaucgugaucauaguaauccuacuucuccucaucgcaguaggucuauuccuauacugcaaagcccgcagcacccccgucacccuaucaaaagaccaacucuccggcaucaacaacaucgccuucucaaacuaaggacuaguguccaccugucccuccugggcugcuggauugucucguuuuccugccaaauaaacaggaucagcgcuuuacagaucuaaaaaaaaaaaaaaaaaaaaaaaaaaaaaaaaaaaaaaaaaaaaaaaaaaaaaaaaaaaaaaaaugcaucccccccccccccccccccccccccccccccaaaggcucuuuucagagccaccagaauu

SEQ ID NO: 13547 - RNA, 1994 nt, Artificial Sequence
  mRNA product Design i-2 comprising derived and/or modified sequence from HRSV(Memphis-37)__AIY60640.1__F_DSCav1_mut0 (opt1)
gggagaggcgcugccuacggagguggcagccaucuccuucucggcaucaagcuuaccauggagcugcccauccucaagaccaacgccaucaccacgauccuggccgcggugacccugugcuucgccagcucccagaacaucaccgaggaguucuaccagagcacgugcuccgccgucagcaagggcuaccucuccgcccugcgcaccgggugguacaccagcgugaucaccaucgagcuguccaacaucaaggagaacaagugcaacggcaccgacgccaaggugaagcucaucaagcaggagcuggacaaguacaagaacgcggucacggagcugcagcuccugaugcagagcaccccggccgccggcuccgggagcgcgaucgccuccggcaucgccgucugcaaggugcugcaccucgagggcgaggugaacaagaucaagaacgcccugcuguccaccaacaaggccgucgugagccucuccaacggggugagcguccugaccuucaaggugcuggaccucaagaacuacaucgacaagcagcugcugcccauccugaacaagcagagcugcuccaucagcaacaucgagaccgucaucgaguuccagcagaagaacaaccgccuccuggagaucacgcgggaguucagcgugaacgcgggcgugaccacccccgucuccaccuacaugcugacgaacagcgagcuccugucccugaucaacgacaugccgaucaccaacgaccagaagaagcucaugagcaacaacgugcagaucgugcgccagcaguccuacagcaucaugugcaucaucaaggaggagguccuggccuacguggugcagcugccccucuacggggucaucgacacccccugcuggaagcugcacaccagcccccugugcacgaccaacaccaaggagggcuccaacaucugccucacccggacggaccgcgggugguacugcgacaacgccggcagcguguccuucuucccgcaggccgagaccugcaagguccagagcaaccggguguucugcgacaccaugaacucccggacccugcccagcgaggugaaccucugcaacaucgacaucuucaaccccaaguacgacugcaagaucaugacguccaagaccgacgucagcuccagcgugaucaccucccugggcgccaucgugagcugcuacgggaagaccaagugcacggcgagcaacaagaaccgcggcaucaucaagaccuucuccaacgggugcgacuacgucagcaacaagggcguggacaccguguccgucggcaacacccuguacuacgugaacaagcaggagggcaagagccucuacgugaagggggagcccaucaucaacuucuacgacccgcuggucuuccccuccgacgaguucgacgccagcaucucccaggugaacgagaagaucaaccagagccuggccuucauccggaaguccgacgagcuccugcacaacgugaacgucggcaagagcaccacgaacaucaugaucaccaccaucaucaucgugaucaucgugauccugcugcuccugaucgccgucgggcuguuccucuacugcaaggcccgcuccacccccgugacgcugagcaaggaccagcuguccgggaucaacaacaucgcguucagcaacugaggacuagugcaucacauuuaaaagcaucucagccuaccaugagaauaagagaaagaaaaugaagaucaauagcuuauucaucucuuuuucuuuuucguugguguaaagccaacacccugucuaaaaaacauaaauuucuuuaaucauuuugccucuuuucucugugcuucaauuaauaaaaaauggaaagaaccuagaucuaaaaaaaaaaaaaaaaaaaaaaaaaaaaaaaaaaaaaaaaaaaaaaaaaaaaaaaaaaaaaaaaugcaucccccccccccccccccccccccccccccccaaaggcucuuuucagagccaccagaauu

SEQ ID NO: 13548 - RNA, 1994 nt, Artificial Sequence
  mRNA product Design i-2 comprising derived and/or modified sequence from HRSV(Memphis-37)__AIY60640.1__F_DSCav1_mut0 (opt1)
gggagaggcgcugccuacggagguggcagccaucuccuucucggcaucaagcuuaccauggagcugcccauccucaagaccaacgccaucaccacgauccuggccgcggugacccugugcuucgccagcucccagaacaucaccgaggaguucuaccagagcacgugcuccgccgucagcaagggcuaccucuccgcccugcgcaccgggugguacaccagcgugaucaccaucgagcuguccaacaucaaggagaacaagugcaacggcaccgacgccaaggugaagcucaucaagcaggagcuggacaaguacaagaacgcggucacggagcugcagcuccugaugcagagcaccccggccgccggguccggcagcgccaucgcguccgggaucgccgugugcaaggugcugcaccucgagggcgaggucaacaagaucaagaacgcccugcugagcaccaacaaggccguggugucccucagcaacggcgucuccgugcugaccuucaaggugcuggaccucaagaacuacaucgacaagcagcugcugcccauccucaacaagcagagcugcuccaucagcaacaucgagacggucaucgaguuccagcagaagaacaaccggcugcuggagaucacccgcgaguucuccgugaacgccggggugaccacccccgucagcacguacaugcucaccaacagcgagcugcugucccucaucaacgacaugcccaucaccaacgaccagaagaagcugaugagcaacaacgugcagaucgugcggcagcaguccuacagcaucaugugcaucaucaaggaggagguccuggcguacguggugcagcucccgcuguacggcgucaucgacacccccugcuggaagcugcacacgagcccccucugcaccaccaacaccaaggagggguccaacaucugccugacgcgcaccgaccggggcugguacugcgacaacgccggguccgugagcuucuucccccaggccgagaccugcaaggugcaguccaaccgcgucuucugcgacaccaugaacagccggacgcucccguccgaggugaaccugugcaacaucgacaucuucaaccccaaguacgacugcaagaucaugaccagcaagaccgacgucuccagcuccgugaucaccagccugggcgccaucguguccugcuacggcaagacgaagugcaccgccagcaacaagaaccgggggaucaucaagaccuucuccaacggcugcgacuacgucagcaacaaggggguggacaccgugagcgucggcaacacgcucuacuacgugaacaagcaggagggcaagucccuguacgugaagggggagcccaucaucaacuucuacgacccccuggucuucccgagcgacgaguucgacgcguccaucagccaggugaacgagaagaucaaccagucccucgccuucauccgcaagagcgacgagcugcugcacaacgugaacgucggcaaguccaccaccaacaucaugaucaccaccaucaucaucgugaucaucgugauccuccugcugcucaucgccgucgggcuguuccuguacugcaaggcccggagcacgcccgugacccuguccaaggaccagcucagcggcaucaacaacaucgccuucuccaacugaggacuagugcaucacauuuaaaagcaucucagccuaccaugagaauaagagaaagaaaaugaagaucaauagcuuauucaucucuuuuucuuuuucguugguguaaagccaacacccugucuaaaaaacauaaauuucuuuaaucauuuugccucuuuucucugugcuucaauuaauaaaaaauggaaagaaccuagaucuaaaaaaaaaaaaaaaaaaaaaaaaaaaaaaaaaaaaaaaaaaaaaaaaaaaaaaaaaaaaaaaaugcaucccccccccccccccccccccccccccccccaaaggcucuuuucagagccaccagaauu

SEQ ID NO: 13549 - RNA, 1994 nt, Artificial Sequence
  mRNA product Design i-2 comprising derived and/or modified sequence from HRSV(Memphis-37)__AIY60640.1__F_DSCav1_mut0 (opt2)
gggagaggcgcugccuacggagguggcagccaucuccuucucggcaucaagcuuaccauggagcuccccauccucaagaccaacgccaucaccaccauccucgccgccgucacccucugcuucgccuccucccagaacaucaccgaggaguucuaccaguccaccugcuccgccgucuccaagggcuaccucuccgcccuccgcaccggcugguacaccuccgucaucaccaucgagcucuccaacaucaaggagaacaagugcaacggcaccgacgccaaggucaagcucaucaagcaggagcucgacaaguacaagaacgccgucaccgagcuccagcuccucaugcaguccacccccgccgccggcuccggcuccgccaucgccuccggcaucgccgucugcaagguccuccaccucgagggcgaggucaacaagaucaagaacgcccuccucuccaccaacaaggccgucgucucccucuccaacggcgucuccguccucaccuucaagguccucgaccucaagaacuacaucgacaagcagcuccuccccauccucaacaagcaguccugcuccaucuccaacaucgagaccgucaucgaguuccagcagaagaacaaccgccuccucgagaucacccgcgaguucuccgucaacgccggcgucaccacccccgucuccaccuacaugcucaccaacuccgagcuccucucccucaucaacgacaugcccaucaccaacgaccagaagaagcucauguccaacaacguccagaucguccgccagcaguccuacuccaucaugugcaucaucaaggaggagguccucgccuacgucguccagcucccccucuacggcgucaucgacacccccugcuggaagcuccacaccuccccccucugcaccaccaacaccaaggagggcuccaacaucugccucacccgcaccgaccgcggcugguacugcgacaacgccggcuccgucuccuucuucccccaggccgagaccugcaagguccaguccaaccgcgucuucugcgacaccaugaacucccgcacccuccccuccgaggucaaccucugcaacaucgacaucuucaaccccaaguacgacugcaagaucaugaccuccaagaccgacgucuccuccuccgucaucaccucccucggcgccaucgucuccugcuacggcaagaccaagugcaccgccuccaacaagaaccgcggcaucaucaagaccuucuccaacggcugcgacuacgucuccaacaagggcgucgacaccgucuccgucggcaacacccucuacuacgucaacaagcaggagggcaagucccucuacgucaagggcgagcccaucaucaacuucuacgacccccucgucuuccccuccgacgaguucgacgccuccaucucccaggucaacgagaagaucaaccagucccucgccuucauccgcaaguccgacgagcuccuccacaacgucaacgucggcaaguccaccaccaacaucaugaucaccaccaucaucaucgucaucaucgucauccuccuccuccucaucgccgucggccucuuccucuacugcaaggcccgcuccacccccgucacccucuccaaggaccagcucuccggcaucaacaacaucgccuucuccaacugaggacuagugcaucacauuuaaaagcaucucagccuaccaugagaauaagagaaagaaaaugaagaucaauagcuuauucaucucuuuuucuuuuucguugguguaaagccaacacccugucuaaaaaacauaaauuucuuuaaucauuuugccucuuuucucugugcuucaauuaauaaaaaauggaaagaaccuagaucuaaaaaaaaaaaaaaaaaaaaaaaaaaaaaaaaaaaaaaaaaaaaaaaaaaaaaaaaaaaaaaaaugcaucccccccccccccccccccccccccccccccaaaggcucuuuucagagccaccagaauu

SEQ ID NO: 13550 - RNA, 1994 nt, Artificial Sequence
  mRNA product Design i-2 comprising derived and/or modified sequence from HRSV(Memphis-37)__AIY60640.1__F_DSCav1_mut0 (opt3)
gggagaggcgcugccuacggagguggcagccaucuccuucucggcaucaagcuuaccauggagcugcccauccucaagaccaacgccauuacaacuauacuugcugcagugacgcugugcuucgccagcucccagaauaucaccgaagaguuuuaccaaucuacauguucagcggucaguaaaggcuauuugagcgcuuuaagaacugggugguacaccuccguuauuacaaucgaacugucuaacauuaaggagaauaaaugcaacggaaccgacgccaaggugaaacuaaucaagcaggaacucgauaaguauaaaaaugcaguaacugagcugcagcuucugaugcagucgaccccugccgcugguucaggcagcgcaauagccagugggaucgcuguguguaaggucuugcaccucgagggagaagugaacaaaauuaagaaugcccugcuguccacaaacaaagcgguugugucucucagcaauggcgucuccguguuaacguucaagguacuggaccuuaagaacuacaucgauaaacaauugcugccaauucuaaauaagcagucaugcaguaucagcaacauagagacuguuauugaauuucagcagaaaaauaacaggcuccuggagaucacccgggaguucucugugaaugccggugucacaacuccgguguccaccuauaugcuuacaaacucagaacuguugagccucauuaacgacaugcccaucaccaaugaucaaaagaaacugaugaguaacaaugugcagaucguccgccagcagucuuacuccauuauguguauaaucaaggaggaaguuuuagcauaugugguacaacugccucucuacggggugauugacacgccaugcuggaaacuucauacuagcccccuguguacaaccaacacuaaggagggaucgaauaucugcuugacacgaaccgaucguggcugguacugugacaacgcuggcucugucuccuuuuucccucaggccgaaacgugcaaggugcagucaaauagaguguuuugugauaccaugaacaguagaacacugccaagcgaggugaaucucugcaacauagacauuuucaaucccaaauaugauugcaagaucaugacuuccaaaaccgacgucucuagcucagugaucacaagucugggggcaauuguauccuguuacggaaagacuaaaugcaccgcuagcaacaagaauagggguaucauuaagacauuuucuaacggcugugauuauguuucaaauaaagggguggacaccgucagugugggaaacacucuuuacuaugucaacaagcaagagggcaaaagccuguacgugaagggugaaccuauaaucaauuucuaugacccauugguuuuuccguccgaugaguucgacgccucuauuucgcagguuaacgagaaaaucaaucagagccucgcguuuauccggaaguccgaugaacuguuacacaacguaaaugucgggaagucaacgacaaacauuaugauaaccacuaucauuaucgugauuaucguuauacugcuacuccugaucgccgugggacuuuucuuguacugcaaagcacgcaguacccccgucacacugucuaaggaccagcucagcggcauuaauaacaucgcuuucuccaauugaggacuagugcaucacauuuaaaagcaucucagccuaccaugagaauaagagaaagaaaaugaagaucaauagcuuauucaucucuuuuucuuuuucguugguguaaagccaacacccugucuaaaaaacauaaauuucuuuaaucauuuugccucuuuucucugugcuucaauuaauaaaaaauggaaagaaccuagaucuaaaaaaaaaaaaaaaaaaaaaaaaaaaaaaaaaaaaaaaaaaaaaaaaaaaaaaaaaaaaaaaaugcaucccccccccccccccccccccccccccccccaaaggcucuuuucagagccaccagaauu

SEQ ID NO: 13551 - RNA, 1994 nt, Artificial Sequence
  mRNA product Design i-2 comprising derived and/or modified sequence from HRSV(Memphis-37)__AIY60640.1__F_DSCav1_mut0 (opt4)
gggagaggcgcugccuacggagguggcagccaucuccuucucggcaucaagcuuaccauggagcugcccauccugaagaccaacgccaucaccaccauccuggccgccgugacccugugcuucgccagcagccagaacaucaccgaggaguucuaccagagcaccugcagcgccgugagcaagggcuaccugagcgcccugagaaccggcugguacaccagcgugaucaccaucgagcugagcaacaucaaggagaacaagugcaacggcaccgacgccaaggugaagcugaucaagcaggagcuggacaaguacaagaacgccgugaccgagcugcagcugcugaugcagagcacccccgccgccggcagcggcagcgccaucgccagcggcaucgccgugugcaaggugcugcaccuggagggcgaggugaacaagaucaagaacgcccugcugagcaccaacaaggccguggugagccugagcaacggcgugagcgugcugaccuucaaggugcuggaccugaagaacuacaucgacaagcagcugcugcccauccugaacaagcagagcugcagcaucagcaacaucgagaccgugaucgaguuccagcagaagaacaacagacugcuggagaucaccagagaguucagcgugaacgccggcgugaccacccccgugagcaccuacaugcugaccaacagcgagcugcugagccugaucaacgacaugcccaucaccaacgaccagaagaagcugaugagcaacaacgugcagaucgugagacagcagagcuacagcaucaugugcaucaucaaggaggaggugcuggccuacguggugcagcugccccuguacggcgugaucgacacccccugcuggaagcugcacaccagcccccugugcaccaccaacaccaaggagggcagcaacaucugccugaccagaaccgacagaggcugguacugcgacaacgccggcagcgugagcuucuucccccaggccgagaccugcaaggugcagagcaacagaguguucugcgacaccaugaacagcagaacccugcccagcgaggugaaccugugcaacaucgacaucuucaaccccaaguacgacugcaagaucaugaccagcaagaccgacgugagcagcagcgugaucaccagccugggcgccaucgugagcugcuacggcaagaccaagugcaccgccagcaacaagaacagaggcaucaucaagaccuucagcaacggcugcgacuacgugagcaacaagggcguggacaccgugagcgugggcaacacccuguacuacgugaacaagcaggagggcaagagccuguacgugaagggcgagcccaucaucaacuucuacgacccccugguguuccccagcgacgaguucgacgccagcaucagccaggugaacgagaagaucaaccagagccuggccuucaucagaaagagcgacgagcugcugcacaacgugaacgugggcaagagcaccaccaacaucaugaucaccaccaucaucaucgugaucaucgugauccugcugcugcugaucgccgugggccuguuccuguacugcaaggccagaagcacccccgugacccugagcaaggaccagcugagcggcaucaacaacaucgccuucagcaacugaggacuagugcaucacauuuaaaagcaucucagccuaccaugagaauaagagaaagaaaaugaagaucaauagcuuauucaucucuuuuucuuuuucguugguguaaagccaacacccugucuaaaaaacauaaauuucuuuaaucauuuugccucuuuucucugugcuucaauuaauaaaaaauggaaagaaccuagaucuaaaaaaaaaaaaaaaaaaaaaaaaaaaaaaaaaaaaaaaaaaaaaaaaaaaaaaaaaaaaaaaaugcaucccccccccccccccccccccccccccccccaaaggcucuuuucagagccaccagaauu

SEQ ID NO: 13552 - RNA, 1994 nt, Artificial Sequence
  mRNA product Design i-2 comprising derived and/or modified sequence from HRSV(Memphis-37)__AIY60640.1__F_DSCav1_mut0 (opt5)
gggagaggcgcugccuacggagguggcagccaucuccuucucggcaucaagcuuaccauggagcugcccauccucaagaccaacgccauuacaacgauccuggcugccgugacccuuugcuucgcgagcucccagaauauuacagaagaguuuuaccaaucuaccuguagcgcugucuccaaaggcuaucugucugcccucagaacagggugguacaccagcguuaucacaauugaacuguccaacaucaaggagaauaaaugcaacggaaccgacgccaaggugaaacuuaucaagcaggaacuggauaaguauaaaaaugcugugacggagcuccagcugcugaugcagucuaccccugccgcuggcagcggguccgccauugcgagcggaaucgccgucuguaaggugcuccaccuggagggcgaaguuaacaaaauuaagaaugcccuucugucuacaaacaaagcuguggucucccucagcaauggggugucuguucugaccuucaaggugcuugaccugaagaacuacaucgauaaacaacuccugccgauucugaauaagcaguccugcagcaucucuaacauugagacagucaucgaauuucagcagaaaaauaaccggcuccuggagaucacccgcgaguucuccgugaaugcuggagugacgacacccgucagcaccuauaugcuuacaaacuccgaacugcucucucugauuaacgacaugccuaucaccaaugaucaaaagaaacuuaugagcaacaauguucagauugugagacagcaguccuacagcaucauguguauuaucaaggaggaagugcuggccuaugucgugcaacucccccuguacggcguuaucgacaccccuugcuggaaacugcauacaucuccccucuguacgaccaacacaaaggagggcuccaauauuugccugacccggacagaucgcgggugguacugugacaacgcgggaagcgugagcuuuuucccucaggccgaaaccugcaagguccagucuaauagaguguuuugugauacgaugaacuccagaacacugccgucugagguuaaucucugcaacaucgacauuuucaaucccaaauaugauugcaagaucaugaccagcaaaaccgacguguccagcucugucauuacaucccugggcgcuaucgugagcuguuacgggaagaccaaaugcacagccucuaacaagaaucggggaaucauuaagacguuuuccaacggcugugauuaugucagcaauaaagggguggacaccguuuccgugggaaacacacuuuacuaugucaacaagcaagagggcaaaucucuguacgugaagggcgaaccuaucauuaauuucuaugacccccucguuuuuccuagcgaugaguucgacgcuuccaucucucaggugaacgaaaagauuaaucagagccuggccuuuauccgcaaguccgaugagcugcuccacaacgucaauguggggaaaagcaccacaaacauuaugaucaccacgaucauuaucgugauuaucguuauucugcuucugcucaucgccgucggacuguuccuguacugcaaagcuagaucuacccccgugacacuuuccaaggaccagcucagcggcaucaauaacauugcguucucuaauugaggacuagugcaucacauuuaaaagcaucucagccuaccaugagaauaagagaaagaaaaugaagaucaauagcuuauucaucucuuuuucuuuuucguugguguaaagccaacacccugucuaaaaaacauaaauuucuuuaaucauuuugccucuuuucucugugcuucaauuaauaaaaaauggaaagaaccuagaucuaaaaaaaaaaaaaaaaaaaaaaaaaaaaaaaaaaaaaaaaaaaaaaaaaaaaaaaaaaaaaaaaugcaucccccccccccccccccccccccccccccccaaaggcucuuuucagagccaccagaauu

SEQ ID NO: 13553 - RNA, 1994 nt, Artificial Sequence
  mRNA product Design i-2 comprising derived and/or modified sequence from HRSV(Memphis-37)__AIY60640.1__F_DSCav1_mut0 (opt6)
gggagaggcgcugccuacggagguggcagccaucuccuucucggcaucaagcuuaccauggaauuaccaaucuuaaaaacaaacgccauaacaaccauccucgcagcaguaacccuaugcuuugcauccucacaaaacauaacugaagaauuuuaccaaucaacaugcucagcaguaucaaaaggauaucuaucagcccucagaacaggaugguacacaucagucauuacaaucgaacuuucaaacauaaaagaaaauaaauguaacggcacagaugccaaaguaaaauuaauuaaacaagaacuugacaaauacaaaaaugccguaacagaacuacaacuacuaaugcaaaguacuccugcugcaggaagcggaucugcaauagcaucagguauagcaguauguaaaguucuacaccuagaaggcgaaguaaacaaaauuaaaaacgcacuacucucaacaaauaaagcaguugucucccuaucaaacggaguaucaguauuaacuuucaaaguacuagaccucaaaaacuauauagacaaacaacuauuaccaauacuaaacaaacaaagcugcucuaucuccaacaucgaaacaguaauagaauuucaacaaaaaaauaauagacuacuugaaauaaccagagaauuuucaguaaacgccggaguaacaacaccaguaucaacuuacaugcuaacaaacuccgaacuacuaucauuaauaaacgacaugcccauaacaaacgaccaaaaaaaauuaaugucaaacaacguccaaaucguacgacaacaauccuauuccauaauguguauaauaaaagaagaaguacuagcauacguaguacaauuaccauuauauggaguaauagauaccccuugcuggaaacuacacacaucaccccuaugcacuacaaauacgaaagaagguucaaauauaugcuuaacuagaaccgauagagguugguauugugacaacgcuggaucaguaucauuuuucccacaagcagaaacaugcaaaguacaaucaaacagaguauuuugcgacacuaugaacucaagaacuuuaccauccgaaguuaaucuauguaacauagauauauuuaacccaaaauacgacugcaaaauaaugacaucaaaaacagauguaucaucaucaguuauaaccucccucggagcaauaguaucaugcuauggaaaaacaaaaugcacagcaucaaacaaaaaucguggaauuauaaaaacauucucaaacggcugugacuacgucagcaauaaaggaguagacacagucucaguaggaaacacuuuauacuauguuaacaaacaagaaggaaaaucacucuacgucaaaggcgaaccaauaauaaauuucuaugacccacucguauucccauccgacgaauuugacgcaucaauaucacaaguaaaugaaaaaauaaaccaaagccuagcauuuauacgaaaaucagacgaacuacuacacaacguaaacguagguaaaagcacaaccaauauaaugauaacaacaauaaucauaguaauaaucguaauauuacuauuacuaauagcuguaggauuguuccuauacugcaaagcaagaucaacaccaguaaccuuaucuaaggaccaacuaucaggaaucaauaacauugccuucucaaacuaaggacuagugcaucacauuuaaaagcaucucagccuaccaugagaauaagagaaagaaaaugaagaucaauagcuuauucaucucuuuuucuuuuucguugguguaaagccaacacccugucuaaaaaacauaaauuucuuuaaucauuuugccucuuuucucugugcuucaauuaauaaaaaauggaaagaaccuagaucuaaaaaaaaaaaaaaaaaaaaaaaaaaaaaaaaaaaaaaaaaaaaaaaaaaaaaaaaaaaaaaaaugcaucccccccccccccccccccccccccccccccaaaggcucuuuucagagccaccagaauu

SEQ ID NO: 13554 - RNA, 1994 nt, Artificial Sequence
  mRNA product Design i-2 comprising derived and/or modified sequence from HRSV(Memphis-37)__AIY60640.1__F_DSCav1_mut0 (opt11)
gggagaggcgcugccuacggagguggcagccaucuccuucucggcaucaagcuuaccauggaacuaccuauccuuaaaaccaacgcaaucaccaccauccuugccgcagucacacucugcuucgcauccucacagaacaucaccgaagaguucuaucaaucaaccugcuccgccguauccaaaggauaccucucagcccuccgcaccggcugguauaccucagucauaacaaucgaauuaucaaauaucaaggagaacaaaugcaacggcaccgacgccaaagucaaacucauaaaacaagaacuagacaaauacaaaaacgccgugacagaacuccaacuccucaugcaguccacccccgcagccggauccggcucagcaaucgccucgggcauugcaguaugcaaaguccuccaccucgaaggcgaagucaacaaaaucaaaaacgcccuccucuccaccaacaaagccgucgucucccucuccaacggcguaucuguccucacuuucaagguccucgaccucaaaaacuacaucgacaagcaacuacuuccaauccucaacaagcaauccugcucaaucucaaacaucgaaaccguaauagaguuccaacaaaagaacaaccgccuccucgaaaucacccgcgaguucuccguuaacgccggugucacuaccccagucagcaccuacaugcucaccaacuccgaacuccuuucucugaucaacgacaugccaaucaccaacgaucaaaagaaauuaauguccaacaacguccagaucguccgccaacaaagcuacagcaucaugugcaucauaaaagaagaaguacuugcguacguaguucaacuaccccuuuacggcguaaucgacaccccaugcuggaaacuccacaccuccccacuaugcaccaccaacaccaaagaaggauccaacaucugccuaacccgcaccgaccgcggcugguacugcgacaacgcugggagcgucucauucuucccacaagcagaaaccugcaaaguccaaucgaaccgcguauucugcgacaccaugaacuccagaacccuaccaagcgaagucaaucuuugcaacaucgacauauuuaaccccaaauacgacugcaaaaucaugacaucaaagaccgacgucucaucuucagucauuaccucacucggcgcaauugucagcugcuacggaaagaccaaauguaccgccuccaauaaaaaccguggaaucauaaaaaccuuuagcaacggcugcgacuacgucuccaacaaaggagucgacaccgucuccgucggcaacacccucuacuacgucaacaaacaagaaggaaaaucccucuacgugaaaggcgaacccauaauaaacuucuacgacccccuagucuuccccucugacgaguucgacgccuccaucucccaagucaacgaaaagauaaaucaaucacuagccuucauacgcaaaucugacgaacuucuccacaacgucaacgucggcaaauccaccaccaacauaaugaucacaacgauaauaaucgugaucauaguaauccuacuucuccucaucgcaguaggucuauuccuauacugcaaagcccgcagcacccccgucacccuaucaaaagaccaacucuccggcaucaacaacaucgccuucucaaacuaaggacuagugcaucacauuuaaaagcaucucagccuaccaugagaauaagagaaagaaaaugaagaucaauagcuuauucaucucuuuuucuuuuucguugguguaaagccaacacccugucuaaaaaacauaaauuucuuuaaucauuuugccucuuuucucugugcuucaauuaauaaaaaauggaaagaaccuagaucuaaaaaaaaaaaaaaaaaaaaaaaaaaaaaaaaaaaaaaaaaaaaaaaaaaaaaaaaaaaaaaaaugcaucccccccccccccccccccccccccccccccaaaggcucuuuucagagccaccagaauu

SEQ ID NO: 13555 - RNA, 1990 nt, Artificial Sequence
  mRNA product Design i-2 comprising derived and/or modified sequence from HRSV(Memphis-37)__AIY60640.1__F_DSCav1_mut0 (opt1)
ggggcgcugccuacggagguggcagccaucuccuucucggcaucaagcuuaccauggagcugcccauccucaagaccaacgccaucaccacgauccuggccgcggugacccugugcuucgccagcucccagaacaucaccgaggaguucuaccagagcacgugcuccgccgucagcaagggcuaccucuccgcccugcgcaccgggugguacaccagcgugaucaccaucgagcuguccaacaucaaggagaacaagugcaacggcaccgacgccaaggugaagcucaucaagcaggagcuggacaaguacaagaacgcggucacggagcugcagcuccugaugcagagcaccccggccgccggcuccgggagcgcgaucgccuccggcaucgccgucugcaaggugcugcaccucgagggcgaggugaacaagaucaagaacgcccugcuguccaccaacaaggccgucgugagccucuccaacggggugagcguccugaccuucaaggugcuggaccucaagaacuacaucgacaagcagcugcugcccauccugaacaagcagagcugcuccaucagcaacaucgagaccgucaucgaguuccagcagaagaacaaccgccuccuggagaucacgcgggaguucagcgugaacgcgggcgugaccacccccgucuccaccuacaugcugacgaacagcgagcuccugucccugaucaacgacaugccgaucaccaacgaccagaagaagcucaugagcaacaacgugcagaucgugcgccagcaguccuacagcaucaugugcaucaucaaggaggagguccuggccuacguggugcagcugccccucuacggggucaucgacacccccugcuggaagcugcacaccagcccccugugcacgaccaacaccaaggagggcuccaacaucugccucacccggacggaccgcgggugguacugcgacaacgccggcagcguguccuucuucccgcaggccgagaccugcaagguccagagcaaccggguguucugcgacaccaugaacucccggacccugcccagcgaggugaaccucugcaacaucgacaucuucaaccccaaguacgacugcaagaucaugacguccaagaccgacgucagcuccagcgugaucaccucccugggcgccaucgugagcugcuacgggaagaccaagugcacggcgagcaacaagaaccgcggcaucaucaagaccuucuccaacgggugcgacuacgucagcaacaagggcguggacaccguguccgucggcaacacccuguacuacgugaacaagcaggagggcaagagccucuacgugaagggggagcccaucaucaacuucuacgacccgcuggucuuccccuccgacgaguucgacgccagcaucucccaggugaacgagaagaucaaccagagccuggccuucauccggaaguccgacgagcuccugcacaacgugaacgucggcaagagcaccacgaacaucaugaucaccaccaucaucaucgugaucaucgugauccugcugcuccugaucgccgucgggcuguuccucuacugcaaggcccgcuccacccccgugacgcugagcaaggaccagcuguccgggaucaacaacaucgcguucagcaacugaggacuagugcaucacauuuaaaagcaucucagccuaccaugagaauaagagaaagaaaaugaagaucaauagcuuauucaucucuuuuucuuuuucguugguguaaagccaacacccugucuaaaaaacauaaauuucuuuaaucauuuugccucuuuucucugugcuucaauuaauaaaaaauggaaagaaccuagaucuaaaaaaaaaaaaaaaaaaaaaaaaaaaaaaaaaaaaaaaaaaaaaaaaaaaaaaaaaaaaaaaaugcaucccccccccccccccccccccccccccccccaaaggcucuuuucagagccaccagaauu

SEQ ID NO: 13556 - RNA, 1990 nt, Artificial Sequence
  mRNA product Design i-2 comprising derived and/or modified sequence from HRSV(Memphis-37)__AIY60640.1__F_DSCav1_mut0 (opt1)
ggggcgcugccuacggagguggcagccaucuccuucucggcaucaagcuuaccauggagcugcccauccucaagaccaacgccaucaccacgauccuggccgcggugacccugugcuucgccagcucccagaacaucaccgaggaguucuaccagagcacgugcuccgccgucagcaagggcuaccucuccgcccugcgcaccgggugguacaccagcgugaucaccaucgagcuguccaacaucaaggagaacaagugcaacggcaccgacgccaaggugaagcucaucaagcaggagcuggacaaguacaagaacgcggucacggagcugcagcuccugaugcagagcaccccggccgccggguccggcagcgccaucgcguccgggaucgccgugugcaaggugcugcaccucgagggcgaggucaacaagaucaagaacgcccugcugagcaccaacaaggccguggugucccucagcaacggcgucuccgugcugaccuucaaggugcuggaccucaagaacuacaucgacaagcagcugcugcccauccucaacaagcagagcugcuccaucagcaacaucgagacggucaucgaguuccagcagaagaacaaccggcugcuggagaucacccgcgaguucuccgugaacgccggggugaccacccccgucagcacguacaugcucaccaacagcgagcugcugucccucaucaacgacaugcccaucaccaacgaccagaagaagcugaugagcaacaacgugcagaucgugcggcagcaguccuacagcaucaugugcaucaucaaggaggagguccuggcguacguggugcagcucccgcuguacggcgucaucgacacccccugcuggaagcugcacacgagcccccucugcaccaccaacaccaaggagggguccaacaucugccugacgcgcaccgaccggggcugguacugcgacaacgccggguccgugagcuucuucccccaggccgagaccugcaaggugcaguccaaccgcgucuucugcgacaccaugaacagccggacgcucccguccgaggugaaccugugcaacaucgacaucuucaaccccaaguacgacugcaagaucaugaccagcaagaccgacgucuccagcuccgugaucaccagccugggcgccaucguguccugcuacggcaagacgaagugcaccgccagcaacaagaaccgggggaucaucaagaccuucuccaacggcugcgacuacgucagcaacaaggggguggacaccgugagcgucggcaacacgcucuacuacgugaacaagcaggagggcaagucccuguacgugaagggggagcccaucaucaacuucuacgacccccuggucuucccgagcgacgaguucgacgcguccaucagccaggugaacgagaagaucaaccagucccucgccuucauccgcaagagcgacgagcugcugcacaacgugaacgucggcaaguccaccaccaacaucaugaucaccaccaucaucaucgugaucaucgugauccuccugcugcucaucgccgucgggcuguuccuguacugcaaggcccggagcacgcccgugacccuguccaaggaccagcucagcggcaucaacaacaucgccuucuccaacugaggacuagugcaucacauuuaaaagcaucucagccuaccaugagaauaagagaaagaaaaugaagaucaauagcuuauucaucucuuuuucuuuuucguugguguaaagccaacacccugucuaaaaaacauaaauuucuuuaaucauuuugccucuuuucucugugcuucaauuaauaaaaaauggaaagaaccuagaucuaaaaaaaaaaaaaaaaaaaaaaaaaaaaaaaaaaaaaaaaaaaaaaaaaaaaaaaaaaaaaaaaugcaucccccccccccccccccccccccccccccccaaaggcucuuuucagagccaccagaauu

SEQ ID NO: 13557 - RNA, 1990 nt, Artificial Sequence
  mRNA product Design i-2 comprising derived and/or modified sequence from HRSV(Memphis-37)__AIY60640.1__F_DSCav1_mut0 (opt2)
ggggcgcugccuacggagguggcagccaucuccuucucggcaucaagcuuaccauggagcuccccauccucaagaccaacgccaucaccaccauccucgccgccgucacccucugcuucgccuccucccagaacaucaccgaggaguucuaccaguccaccugcuccgccgucuccaagggcuaccucuccgcccuccgcaccggcugguacaccuccgucaucaccaucgagcucuccaacaucaaggagaacaagugcaacggcaccgacgccaaggucaagcucaucaagcaggagcucgacaaguacaagaacgccgucaccgagcuccagcuccucaugcaguccacccccgccgccggcuccggcuccgccaucgccuccggcaucgccgucugcaagguccuccaccucgagggcgaggucaacaagaucaagaacgcccuccucuccaccaacaaggccgucgucucccucuccaacggcgucuccguccucaccuucaagguccucgaccucaagaacuacaucgacaagcagcuccuccccauccucaacaagcaguccugcuccaucuccaacaucgagaccgucaucgaguuccagcagaagaacaaccgccuccucgagaucacccgcgaguucuccgucaacgccggcgucaccacccccgucuccaccuacaugcucaccaacuccgagcuccucucccucaucaacgacaugcccaucaccaacgaccagaagaagcucauguccaacaacguccagaucguccgccagcaguccuacuccaucaugugcaucaucaaggaggagguccucgccuacgucguccagcucccccucuacggcgucaucgacacccccugcuggaagcuccacaccuccccccucugcaccaccaacaccaaggagggcuccaacaucugccucacccgcaccgaccgcggcugguacugcgacaacgccggcuccgucuccuucuucccccaggccgagaccugcaagguccaguccaaccgcgucuucugcgacaccaugaacucccgcacccuccccuccgaggucaaccucugcaacaucgacaucuucaaccccaaguacgacugcaagaucaugaccuccaagaccgacgucuccuccuccgucaucaccucccucggcgccaucgucuccugcuacggcaagaccaagugcaccgccuccaacaagaaccgcggcaucaucaagaccuucuccaacggcugcgacuacgucuccaacaagggcgucgacaccgucuccgucggcaacacccucuacuacgucaacaagcaggagggcaagucccucuacgucaagggcgagcccaucaucaacuucuacgacccccucgucuuccccuccgacgaguucgacgccuccaucucccaggucaacgagaagaucaaccagucccucgccuucauccgcaaguccgacgagcuccuccacaacgucaacgucggcaaguccaccaccaacaucaugaucaccaccaucaucaucgucaucaucgucauccuccuccuccucaucgccgucggccucuuccucuacugcaaggcccgcuccacccccgucacccucuccaaggaccagcucuccggcaucaacaacaucgccuucuccaacugaggacuagugcaucacauuuaaaagcaucucagccuaccaugagaauaagagaaagaaaaugaagaucaauagcuuauucaucucuuuuucuuuuucguugguguaaagccaacacccugucuaaaaaacauaaauuucuuuaaucauuuugccucuuuucucugugcuucaauuaauaaaaaauggaaagaaccuagaucuaaaaaaaaaaaaaaaaaaaaaaaaaaaaaaaaaaaaaaaaaaaaaaaaaaaaaaaaaaaaaaaaugcaucccccccccccccccccccccccccccccccaaaggcucuuuucagagccaccagaauu

SEQ ID NO: 13558 - RNA, 1990 nt, Artificial Sequence
  mRNA product Design i-2 comprising derived and/or modified sequence from HRSV(Memphis-37)__AIY60640.1__F_DSCav1_mut0 (opt3)
ggggcgcugccuacggagguggcagccaucuccuucucggcaucaagcuuaccauggagcugcccauccucaagaccaacgccauuacaacuauacuugcugcagugacgcugugcuucgccagcucccagaauaucaccgaagaguuuuaccaaucuacauguucagcggucaguaaaggcuauuugagcgcuuuaagaacugggugguacaccuccguuauuacaaucgaacugucuaacauuaaggagaauaaaugcaacggaaccgacgccaaggugaaacuaaucaagcaggaacucgauaaguauaaaaaugcaguaacugagcugcagcuucugaugcagucgaccccugccgcugguucaggcagcgcaauagccagugggaucgcuguguguaaggucuugcaccucgagggagaagugaacaaaauuaagaaugcccugcuguccacaaacaaagcgguugugucucucagcaauggcgucuccguguuaacguucaagguacuggaccuuaagaacuacaucgauaaacaauugcugccaauucuaaauaagcagucaugcaguaucagcaacauagagacuguuauugaauuucagcagaaaaauaacaggcuccuggagaucacccgggaguucucugugaaugccggugucacaacuccgguguccaccuauaugcuuacaaacucagaacuguugagccucauuaacgacaugcccaucaccaaugaucaaaagaaacugaugaguaacaaugugcagaucguccgccagcagucuuacuccauuauguguauaaucaaggaggaaguuuuagcauaugugguacaacugccucucuacggggugauugacacgccaugcuggaaacuucauacuagcccccuguguacaaccaacacuaaggagggaucgaauaucugcuugacacgaaccgaucguggcugguacugugacaacgcuggcucugucuccuuuuucccucaggccgaaacgugcaaggugcagucaaauagaguguuuugugauaccaugaacaguagaacacugccaagcgaggugaaucucugcaacauagacauuuucaaucccaaauaugauugcaagaucaugacuuccaaaaccgacgucucuagcucagugaucacaagucugggggcaauuguauccuguuacggaaagacuaaaugcaccgcuagcaacaagaauagggguaucauuaagacauuuucuaacggcugugauuauguuucaaauaaagggguggacaccgucagugugggaaacacucuuuacuaugucaacaagcaagagggcaaaagccuguacgugaagggugaaccuauaaucaauuucuaugacccauugguuuuuccguccgaugaguucgacgccucuauuucgcagguuaacgagaaaaucaaucagagccucgcguuuauccggaaguccgaugaacuguuacacaacguaaaugucgggaagucaacgacaaacauuaugauaaccacuaucauuaucgugauuaucguuauacugcuacuccugaucgccgugggacuuuucuuguacugcaaagcacgcaguacccccgucacacugucuaaggaccagcucagcggcauuaauaacaucgcuuucuccaauugaggacuagugcaucacauuuaaaagcaucucagccuaccaugagaauaagagaaagaaaaugaagaucaauagcuuauucaucucuuuuucuuuuucguugguguaaagccaacacccugucuaaaaaacauaaauuucuuuaaucauuuugccucuuuucucugugcuucaauuaauaaaaaauggaaagaaccuagaucuaaaaaaaaaaaaaaaaaaaaaaaaaaaaaaaaaaaaaaaaaaaaaaaaaaaaaaaaaaaaaaaaugcaucccccccccccccccccccccccccccccccaaaggcucuuuucagagccaccagaauu

SEQ ID NO: 13559 - RNA, 1990 nt, Artificial Sequence
  mRNA product Design i-2 comprising derived and/or modified sequence from HRSV(Memphis-37)__AIY60640.1__F_DSCav1_mut0 (opt4)
ggggcgcugccuacggagguggcagccaucuccuucucggcaucaagcuuaccauggagcugcccauccugaagaccaacgccaucaccaccauccuggccgccgugacccugugcuucgccagcagccagaacaucaccgaggaguucuaccagagcaccugcagcgccgugagcaagggcuaccugagcgcccugagaaccggcugguacaccagcgugaucaccaucgagcugagcaacaucaaggagaacaagugcaacggcaccgacgccaaggugaagcugaucaagcaggagcuggacaaguacaagaacgccgugaccgagcugcagcugcugaugcagagcacccccgccgccggcagcggcagcgccaucgccagcggcaucgccgugugcaaggugcugcaccuggagggcgaggugaacaagaucaagaacgcccugcugagcaccaacaaggccguggugagccugagcaacggcgugagcgugcugaccuucaaggugcuggaccugaagaacuacaucgacaagcagcugcugcccauccugaacaagcagagcugcagcaucagcaacaucgagaccgugaucgaguuccagcagaagaacaacagacugcuggagaucaccagagaguucagcgugaacgccggcgugaccacccccgugagcaccuacaugcugaccaacagcgagcugcugagccugaucaacgacaugcccaucaccaacgaccagaagaagcugaugagcaacaacgugcagaucgugagacagcagagcuacagcaucaugugcaucaucaaggaggaggugcuggccuacguggugcagcugccccuguacggcgugaucgacacccccugcuggaagcugcacaccagcccccugugcaccaccaacaccaaggagggcagcaacaucugccugaccagaaccgacagaggcugguacugcgacaacgccggcagcgugagcuucuucccccaggccgagaccugcaaggugcagagcaacagaguguucugcgacaccaugaacagcagaacccugcccagcgaggugaaccugugcaacaucgacaucuucaaccccaaguacgacugcaagaucaugaccagcaagaccgacgugagcagcagcgugaucaccagccugggcgccaucgugagcugcuacggcaagaccaagugcaccgccagcaacaagaacagaggcaucaucaagaccuucagcaacggcugcgacuacgugagcaacaagggcguggacaccgugagcgugggcaacacccuguacuacgugaacaagcaggagggcaagagccuguacgugaagggcgagcccaucaucaacuucuacgacccccugguguuccccagcgacgaguucgacgccagcaucagccaggugaacgagaagaucaaccagagccuggccuucaucagaaagagcgacgagcugcugcacaacgugaacgugggcaagagcaccaccaacaucaugaucaccaccaucaucaucgugaucaucgugauccugcugcugcugaucgccgugggccuguuccuguacugcaaggccagaagcacccccgugacccugagcaaggaccagcugagcggcaucaacaacaucgccuucagcaacugaggacuagugcaucacauuuaaaagcaucucagccuaccaugagaauaagagaaagaaaaugaagaucaauagcuuauucaucucuuuuucuuuuucguugguguaaagccaacacccugucuaaaaaacauaaauuucuuuaaucauuuugccucuuuucucugugcuucaauuaauaaaaaauggaaagaaccuagaucuaaaaaaaaaaaaaaaaaaaaaaaaaaaaaaaaaaaaaaaaaaaaaaaaaaaaaaaaaaaaaaaaugcaucccccccccccccccccccccccccccccccaaaggcucuuuucagagccaccagaauu

SEQ ID NO: 13560 - RNA, 1990 nt, Artificial Sequence
  mRNA product Design i-2 comprising derived and/or modified sequence from HRSV(Memphis-37)__AIY60640.1__F_DSCav1_mut0 (opt5)
ggggcgcugccuacggagguggcagccaucuccuucucggcaucaagcuuaccauggagcugcccauccucaagaccaacgccauuacaacgauccuggcugccgugacccuuugcuucgcgagcucccagaauauuacagaagaguuuuaccaaucuaccuguagcgcugucuccaaaggcuaucugucugcccucagaacagggugguacaccagcguuaucacaauugaacuguccaacaucaaggagaauaaaugcaacggaaccgacgccaaggugaaacuuaucaagcaggaacuggauaaguauaaaaaugcugugacggagcuccagcugcugaugcagucuaccccugccgcuggcagcggguccgccauugcgagcggaaucgccgucuguaaggugcuccaccuggagggcgaaguuaacaaaauuaagaaugcccuucugucuacaaacaaagcuguggucucccucagcaauggggugucuguucugaccuucaaggugcuugaccugaagaacuacaucgauaaacaacuccugccgauucugaauaagcaguccugcagcaucucuaacauugagacagucaucgaauuucagcagaaaaauaaccggcuccuggagaucacccgcgaguucuccgugaaugcuggagugacgacacccgucagcaccuauaugcuuacaaacuccgaacugcucucucugauuaacgacaugccuaucaccaaugaucaaaagaaacuuaugagcaacaauguucagauugugagacagcaguccuacagcaucauguguauuaucaaggaggaagugcuggccuaugucgugcaacucccccuguacggcguuaucgacaccccuugcuggaaacugcauacaucuccccucuguacgaccaacacaaaggagggcuccaauauuugccugacccggacagaucgcgggugguacugugacaacgcgggaagcgugagcuuuuucccucaggccgaaaccugcaagguccagucuaauagaguguuuugugauacgaugaacuccagaacacugccgucugagguuaaucucugcaacaucgacauuuucaaucccaaauaugauugcaagaucaugaccagcaaaaccgacguguccagcucugucauuacaucccugggcgcuaucgugagcuguuacgggaagaccaaaugcacagccucuaacaagaaucggggaaucauuaagacguuuuccaacggcugugauuaugucagcaauaaagggguggacaccguuuccgugggaaacacacuuuacuaugucaacaagcaagagggcaaaucucuguacgugaagggcgaaccuaucauuaauuucuaugacccccucguuuuuccuagcgaugaguucgacgcuuccaucucucaggugaacgaaaagauuaaucagagccuggccuuuauccgcaaguccgaugagcugcuccacaacgucaauguggggaaaagcaccacaaacauuaugaucaccacgaucauuaucgugauuaucguuauucugcuucugcucaucgccgucggacuguuccuguacugcaaagcuagaucuacccccgugacacuuuccaaggaccagcucagcggcaucaauaacauugcguucucuaauugaggacuagugcaucacauuuaaaagcaucucagccuaccaugagaauaagagaaagaaaaugaagaucaauagcuuauucaucucuuuuucuuuuucguugguguaaagccaacacccugucuaaaaaacauaaauuucuuuaaucauuuugccucuuuucucugugcuucaauuaauaaaaaauggaaagaaccuagaucuaaaaaaaaaaaaaaaaaaaaaaaaaaaaaaaaaaaaaaaaaaaaaaaaaaaaaaaaaaaaaaaaugcaucccccccccccccccccccccccccccccccaaaggcucuuuucagagccaccagaauu

SEQ ID NO: 13561 - RNA, 1990 nt, Artificial Sequence
  mRNA product Design i-2 comprising derived and/or modified sequence from HRSV(Memphis-37)__AIY60640.1__F_DSCav1_mut0 (opt6)
ggggcgcugccuacggagguggcagccaucuccuucucggcaucaagcuuaccauggaauuaccaaucuuaaaaacaaacgccauaacaaccauccucgcagcaguaacccuaugcuuugcauccucacaaaacauaacugaagaauuuuaccaaucaacaugcucagcaguaucaaaaggauaucuaucagcccucagaacaggaugguacacaucagucauuacaaucgaacuuucaaacauaaaagaaaauaaauguaacggcacagaugccaaaguaaaauuaauuaaacaagaacuugacaaauacaaaaaugccguaacagaacuacaacuacuaaugcaaaguacuccugcugcaggaagcggaucugcaauagcaucagguauagcaguauguaaaguucuacaccuagaaggcgaaguaaacaaaauuaaaaacgcacuacucucaacaaauaaagcaguugucucccuaucaaacggaguaucaguauuaacuuucaaaguacuagaccucaaaaacuauauagacaaacaacuauuaccaauacuaaacaaacaaagcugcucuaucuccaacaucgaaacaguaauagaauuucaacaaaaaaauaauagacuacuugaaauaaccagagaauuuucaguaaacgccggaguaacaacaccaguaucaacuuacaugcuaacaaacuccgaacuacuaucauuaauaaacgacaugcccauaacaaacgaccaaaaaaaauuaaugucaaacaacguccaaaucguacgacaacaauccuauuccauaauguguauaauaaaagaagaaguacuagcauacguaguacaauuaccauuauauggaguaauagauaccccuugcuggaaacuacacacaucaccccuaugcacuacaaauacgaaagaagguucaaauauaugcuuaacuagaaccgauagagguugguauugugacaacgcuggaucaguaucauuuuucccacaagcagaaacaugcaaaguacaaucaaacagaguauuuugcgacacuaugaacucaagaacuuuaccauccgaaguuaaucuauguaacauagauauauuuaacccaaaauacgacugcaaaauaaugacaucaaaaacagauguaucaucaucaguuauaaccucccucggagcaauaguaucaugcuauggaaaaacaaaaugcacagcaucaaacaaaaaucguggaauuauaaaaacauucucaaacggcugugacuacgucagcaauaaaggaguagacacagucucaguaggaaacacuuuauacuauguuaacaaacaagaaggaaaaucacucuacgucaaaggcgaaccaauaauaaauuucuaugacccacucguauucccauccgacgaauuugacgcaucaauaucacaaguaaaugaaaaaauaaaccaaagccuagcauuuauacgaaaaucagacgaacuacuacacaacguaaacguagguaaaagcacaaccaauauaaugauaacaacaauaaucauaguaauaaucguaauauuacuauuacuaauagcuguaggauuguuccuauacugcaaagcaagaucaacaccaguaaccuuaucuaaggaccaacuaucaggaaucaauaacauugccuucucaaacuaaggacuagugcaucacauuuaaaagcaucucagccuaccaugagaauaagagaaagaaaaugaagaucaauagcuuauucaucucuuuuucuuuuucguugguguaaagccaacacccugucuaaaaaacauaaauuucuuuaaucauuuugccucuuuucucugugcuucaauuaauaaaaaauggaaagaaccuagaucuaaaaaaaaaaaaaaaaaaaaaaaaaaaaaaaaaaaaaaaaaaaaaaaaaaaaaaaaaaaaaaaaugcaucccccccccccccccccccccccccccccccaaaggcucuuuucagagccaccagaauu

SEQ ID NO: 13562 - RNA, 1990 nt, Artificial Sequence
  mRNA product Design i-2 comprising derived and/or modified sequence from HRSV(Memphis-37)__AIY60640.1__F_DSCav1_mut0 (opt11)
ggggcgcugccuacggagguggcagccaucuccuucucggcaucaagcuuaccauggaacuaccuauccuuaaaaccaacgcaaucaccaccauccuugccgcagucacacucugcuucgcauccucacagaacaucaccgaagaguucuaucaaucaaccugcuccgccguauccaaaggauaccucucagcccuccgcaccggcugguauaccucagucauaacaaucgaauuaucaaauaucaaggagaacaaaugcaacggcaccgacgccaaagucaaacucauaaaacaagaacuagacaaauacaaaaacgccgugacagaacuccaacuccucaugcaguccacccccgcagccggauccggcucagcaaucgccucgggcauugcaguaugcaaaguccuccaccucgaaggcgaagucaacaaaaucaaaaacgcccuccucuccaccaacaaagccgucgucucccucuccaacggcguaucuguccucacuuucaagguccucgaccucaaaaacuacaucgacaagcaacuacuuccaauccucaacaagcaauccugcucaaucucaaacaucgaaaccguaauagaguuccaacaaaagaacaaccgccuccucgaaaucacccgcgaguucuccguuaacgccggugucacuaccccagucagcaccuacaugcucaccaacuccgaacuccuuucucugaucaacgacaugccaaucaccaacgaucaaaagaaauuaauguccaacaacguccagaucguccgccaacaaagcuacagcaucaugugcaucauaaaagaagaaguacuugcguacguaguucaacuaccccuuuacggcguaaucgacaccccaugcuggaaacuccacaccuccccacuaugcaccaccaacaccaaagaaggauccaacaucugccuaacccgcaccgaccgcggcugguacugcgacaacgcugggagcgucucauucuucccacaagcagaaaccugcaaaguccaaucgaaccgcguauucugcgacaccaugaacuccagaacccuaccaagcgaagucaaucuuugcaacaucgacauauuuaaccccaaauacgacugcaaaaucaugacaucaaagaccgacgucucaucuucagucauuaccucacucggcgcaauugucagcugcuacggaaagaccaaauguaccgccuccaauaaaaaccguggaaucauaaaaaccuuuagcaacggcugcgacuacgucuccaacaaaggagucgacaccgucuccgucggcaacacccucuacuacgucaacaaacaagaaggaaaaucccucuacgugaaaggcgaacccauaauaaacuucuacgacccccuagucuuccccucugacgaguucgacgccuccaucucccaagucaacgaaaagauaaaucaaucacuagccuucauacgcaaaucugacgaacuucuccacaacgucaacgucggcaaauccaccaccaacauaaugaucacaacgauaauaaucgugaucauaguaauccuacuucuccucaucgcaguaggucuauuccuauacugcaaagcccgcagcacccccgucacccuaucaaaagaccaacucuccggcaucaacaacaucgccuucucaaacuaaggacuagugcaucacauuuaaaagcaucucagccuaccaugagaauaagagaaagaaaaugaagaucaauagcuuauucaucucuuuuucuuuuucguugguguaaagccaacacccugucuaaaaaacauaaauuucuuuaaucauuuugccucuuuucucugugcuucaauuaauaaaaaauggaaagaaccuagaucuaaaaaaaaaaaaaaaaaaaaaaaaaaaaaaaaaaaaaaaaaaaaaaaaaaaaaaaaaaaaaaaaugcaucccccccccccccccccccccccccccccccaaaggcucuuuucagagccaccagaauu

SEQ ID NO: 13563 - RNA, 1825 nt, Artificial Sequence
  mRNA product Design i-3 comprising derived and/or modified sequence from HRSV(Memphis-37)__AIY60640.1__F_DSCav1_mut0 (opt1)
gggagaaagcuuaccauggagcugcccauccucaagaccaacgccaucaccacgauccuggccgcggugacccugugcuucgccagcucccagaacaucaccgaggaguucuaccagagcacgugcuccgccgucagcaagggcuaccucuccgcccugcgcaccgggugguacaccagcgugaucaccaucgagcuguccaacaucaaggagaacaagugcaacggcaccgacgccaaggugaagcucaucaagcaggagcuggacaaguacaagaacgcggucacggagcugcagcuccugaugcagagcaccccggccgccggcuccgggagcgcgaucgccuccggcaucgccgucugcaaggugcugcaccucgagggcgaggugaacaagaucaagaacgcccugcuguccaccaacaaggccgucgugagccucuccaacggggugagcguccugaccuucaaggugcuggaccucaagaacuacaucgacaagcagcugcugcccauccugaacaagcagagcugcuccaucagcaacaucgagaccgucaucgaguuccagcagaagaacaaccgccuccuggagaucacgcgggaguucagcgugaacgcgggcgugaccacccccgucuccaccuacaugcugacgaacagcgagcuccugucccugaucaacgacaugccgaucaccaacgaccagaagaagcucaugagcaacaacgugcagaucgugcgccagcaguccuacagcaucaugugcaucaucaaggaggagguccuggccuacguggugcagcugccccucuacggggucaucgacacccccugcuggaagcugcacaccagcccccugugcacgaccaacaccaaggagggcuccaacaucugccucacccggacggaccgcgggugguacugcgacaacgccggcagcguguccuucuucccgcaggccgagaccugcaagguccagagcaaccggguguucugcgacaccaugaacucccggacccugcccagcgaggugaaccucugcaacaucgacaucuucaaccccaaguacgacugcaagaucaugacguccaagaccgacgucagcuccagcgugaucaccucccugggcgccaucgugagcugcuacgggaagaccaagugcacggcgagcaacaagaaccgcggcaucaucaagaccuucuccaacgggugcgacuacgucagcaacaagggcguggacaccguguccgucggcaacacccuguacuacgugaacaagcaggagggcaagagccucuacgugaagggggagcccaucaucaacuucuacgacccgcuggucuuccccuccgacgaguucgacgccagcaucucccaggugaacgagaagaucaaccagagccuggccuucauccggaaguccgacgagcuccugcacaacgugaacgucggcaagagcaccacgaacaucaugaucaccaccaucaucaucgugaucaucgugauccugcugcuccugaucgccgucgggcuguuccucuacugcaaggcccgcuccacccccgugacgcugagcaaggaccagcuguccgggaucaacaacaucgcguucagcaacugaggacuaguuauaagacugacuagcccgaugggccucccaacgggcccuccuccccuccuugcaccgagauuaauaaaaaaaaaaaaaaaaaaaaaaaaaaaaaaaaaaaaaaaaaaaaaaaaaaaaaaaaaaaaaaaaugcaucccccccccccccccccccccccccccccccaaaggcucuuuucagagccaccagaauu

SEQ ID NO: 13564 - RNA, 1825 nt, Artificial Sequence
  mRNA product Design i-3 comprising derived and/or modified sequence from HRSV(Memphis-37)__AIY60640.1__F_DSCav1_mut0 (opt1)
gggagaaagcuuaccauggagcugcccauccucaagaccaacgccaucaccacgauccuggccgcggugacccugugcuucgccagcucccagaacaucaccgaggaguucuaccagagcacgugcuccgccgucagcaagggcuaccucuccgcccugcgcaccgggugguacaccagcgugaucaccaucgagcuguccaacaucaaggagaacaagugcaacggcaccgacgccaaggugaagcucaucaagcaggagcuggacaaguacaagaacgcggucacggagcugcagcuccugaugcagagcaccccggccgccggguccggcagcgccaucgcguccgggaucgccgugugcaaggugcugcaccucgagggcgaggucaacaagaucaagaacgcccugcugagcaccaacaaggccguggugucccucagcaacggcgucuccgugcugaccuucaaggugcuggaccucaagaacuacaucgacaagcagcugcugcccauccucaacaagcagagcugcuccaucagcaacaucgagacggucaucgaguuccagcagaagaacaaccggcugcuggagaucacccgcgaguucuccgugaacgccggggugaccacccccgucagcacguacaugcucaccaacagcgagcugcugucccucaucaacgacaugcccaucaccaacgaccagaagaagcugaugagcaacaacgugcagaucgugcggcagcaguccuacagcaucaugugcaucaucaaggaggagguccuggcguacguggugcagcucccgcuguacggcgucaucgacacccccugcuggaagcugcacacgagcccccucugcaccaccaacaccaaggagggguccaacaucugccugacgcgcaccgaccggggcugguacugcgacaacgccggguccgugagcuucuucccccaggccgagaccugcaaggugcaguccaaccgcgucuucugcgacaccaugaacagccggacgcucccguccgaggugaaccugugcaacaucgacaucuucaaccccaaguacgacugcaagaucaugaccagcaagaccgacgucuccagcuccgugaucaccagccugggcgccaucguguccugcuacggcaagacgaagugcaccgccagcaacaagaaccgggggaucaucaagaccuucuccaacggcugcgacuacgucagcaacaaggggguggacaccgugagcgucggcaacacgcucuacuacgugaacaagcaggagggcaagucccuguacgugaagggggagcccaucaucaacuucuacgacccccuggucuucccgagcgacgaguucgacgcguccaucagccaggugaacgagaagaucaaccagucccucgccuucauccgcaagagcgacgagcugcugcacaacgugaacgucggcaaguccaccaccaacaucaugaucaccaccaucaucaucgugaucaucgugauccuccugcugcucaucgccgucgggcuguuccuguacugcaaggcccggagcacgcccgugacccuguccaaggaccagcucagcggcaucaacaacaucgccuucuccaacugaggacuaguuauaagacugacuagcccgaugggccucccaacgggcccuccuccccuccuugcaccgagauuaauaaaaaaaaaaaaaaaaaaaaaaaaaaaaaaaaaaaaaaaaaaaaaaaaaaaaaaaaaaaaaaaaugcaucccccccccccccccccccccccccccccccaaaggcucuuuucagagccaccagaauu

SEQ ID NO: 13565 - RNA, 1825 nt, Artificial Sequence
  mRNA product Design i-3 comprising derived and/or modified sequence from HRSV(Memphis-37)__AIY60640.1__F_DSCav1_mut0 (opt2)
gggagaaagcuuaccauggagcuccccauccucaagaccaacgccaucaccaccauccucgccgccgucacccucugcuucgccuccucccagaacaucaccgaggaguucuaccaguccaccugcuccgccgucuccaagggcuaccucuccgcccuccgcaccggcugguacaccuccgucaucaccaucgagcucuccaacaucaaggagaacaagugcaacggcaccgacgccaaggucaagcucaucaagcaggagcucgacaaguacaagaacgccgucaccgagcuccagcuccucaugcaguccacccccgccgccggcuccggcuccgccaucgccuccggcaucgccgucugcaagguccuccaccucgagggcgaggucaacaagaucaagaacgcccuccucuccaccaacaaggccgucgucucccucuccaacggcgucuccguccucaccuucaagguccucgaccucaagaacuacaucgacaagcagcuccuccccauccucaacaagcaguccugcuccaucuccaacaucgagaccgucaucgaguuccagcagaagaacaaccgccuccucgagaucacccgcgaguucuccgucaacgccggcgucaccacccccgucuccaccuacaugcucaccaacuccgagcuccucucccucaucaacgacaugcccaucaccaacgaccagaagaagcucauguccaacaacguccagaucguccgccagcaguccuacuccaucaugugcaucaucaaggaggagguccucgccuacgucguccagcucccccucuacggcgucaucgacacccccugcuggaagcuccacaccuccccccucugcaccaccaacaccaaggagggcuccaacaucugccucacccgcaccgaccgcggcugguacugcgacaacgccggcuccgucuccuucuucccccaggccgagaccugcaagguccaguccaaccgcgucuucugcgacaccaugaacucccgcacccuccccuccgaggucaaccucugcaacaucgacaucuucaaccccaaguacgacugcaagaucaugaccuccaagaccgacgucuccuccuccgucaucaccucccucggcgccaucgucuccugcuacggcaagaccaagugcaccgccuccaacaagaaccgcggcaucaucaagaccuucuccaacggcugcgacuacgucuccaacaagggcgucgacaccgucuccgucggcaacacccucuacuacgucaacaagcaggagggcaagucccucuacgucaagggcgagcccaucaucaacuucuacgacccccucgucuuccccuccgacgaguucgacgccuccaucucccaggucaacgagaagaucaaccagucccucgccuucauccgcaaguccgacgagcuccuccacaacgucaacgucggcaaguccaccaccaacaucaugaucaccaccaucaucaucgucaucaucgucauccuccuccuccucaucgccgucggccucuuccucuacugcaaggcccgcuccacccccgucacccucuccaaggaccagcucuccggcaucaacaacaucgccuucuccaacugaggacuaguuauaagacugacuagcccgaugggccucccaacgggcccuccuccccuccuugcaccgagauuaauaaaaaaaaaaaaaaaaaaaaaaaaaaaaaaaaaaaaaaaaaaaaaaaaaaaaaaaaaaaaaaaaugcaucccccccccccccccccccccccccccccccaaaggcucuuuucagagccaccagaauu

SEQ ID NO: 13566 - RNA, 1825 nt, Artificial Sequence
  mRNA product Design i-3 comprising derived and/or modified sequence from HRSV(Memphis-37)__AIY60640.1__F_DSCav1_mut0 (opt3)
gggagaaagcuuaccauggagcugcccauccucaagaccaacgccauuacaacuauacuugcugcagugacgcugugcuucgccagcucccagaauaucaccgaagaguuuuaccaaucuacauguucagcggucaguaaaggcuauuugagcgcuuuaagaacugggugguacaccuccguuauuacaaucgaacugucuaacauuaaggagaauaaaugcaacggaaccgacgccaaggugaaacuaaucaagcaggaacucgauaaguauaaaaaugcaguaacugagcugcagcuucugaugcagucgaccccugccgcugguucaggcagcgcaauagccagugggaucgcuguguguaaggucuugcaccucgagggagaagugaacaaaauuaagaaugcccugcuguccacaaacaaagcgguugugucucucagcaauggcgucuccguguuaacguucaagguacuggaccuuaagaacuacaucgauaaacaauugcugccaauucuaaauaagcagucaugcaguaucagcaacauagagacuguuauugaauuucagcagaaaaauaacaggcuccuggagaucacccgggaguucucugugaaugccggugucacaacuccgguguccaccuauaugcuuacaaacucagaacuguugagccucauuaacgacaugcccaucaccaaugaucaaaagaaacugaugaguaacaaugugcagaucguccgccagcagucuuacuccauuauguguauaaucaaggaggaaguuuuagcauaugugguacaacugccucucuacggggugauugacacgccaugcuggaaacuucauacuagcccccuguguacaaccaacacuaaggagggaucgaauaucugcuugacacgaaccgaucguggcugguacugugacaacgcuggcucugucuccuuuuucccucaggccgaaacgugcaaggugcagucaaauagaguguuuugugauaccaugaacaguagaacacugccaagcgaggugaaucucugcaacauagacauuuucaaucccaaauaugauugcaagaucaugacuuccaaaaccgacgucucuagcucagugaucacaagucugggggcaauuguauccuguuacggaaagacuaaaugcaccgcuagcaacaagaauagggguaucauuaagacauuuucuaacggcugugauuauguuucaaauaaagggguggacaccgucagugugggaaacacucuuuacuaugucaacaagcaagagggcaaaagccuguacgugaagggugaaccuauaaucaauuucuaugacccauugguuuuuccguccgaugaguucgacgccucuauuucgcagguuaacgagaaaaucaaucagagccucgcguuuauccggaaguccgaugaacuguuacacaacguaaaugucgggaagucaacgacaaacauuaugauaaccacuaucauuaucgugauuaucguuauacugcuacuccugaucgccgugggacuuuucuuguacugcaaagcacgcaguacccccgucacacugucuaaggaccagcucagcggcauuaauaacaucgcuuucuccaauugaggacuaguuauaagacugacuagcccgaugggccucccaacgggcccuccuccccuccuugcaccgagauuaauaaaaaaaaaaaaaaaaaaaaaaaaaaaaaaaaaaaaaaaaaaaaaaaaaaaaaaaaaaaaaaaaugcaucccccccccccccccccccccccccccccccaaaggcucuuuucagagccaccagaauu

SEQ ID NO: 13567 - RNA, 1825 nt, Artificial Sequence
  mRNA product Design i-3 comprising derived and/or modified sequence from HRSV(Memphis-37)__AIY60640.1__F_DSCav1_mut0 (opt4)
gggagaaagcuuaccauggagcugcccauccugaagaccaacgccaucaccaccauccuggccgccgugacccugugcuucgccagcagccagaacaucaccgaggaguucuaccagagcaccugcagcgccgugagcaagggcuaccugagcgcccugagaaccggcugguacaccagcgugaucaccaucgagcugagcaacaucaaggagaacaagugcaacggcaccgacgccaaggugaagcugaucaagcaggagcuggacaaguacaagaacgccgugaccgagcugcagcugcugaugcagagcacccccgccgccggcagcggcagcgccaucgccagcggcaucgccgugugcaaggugcugcaccuggagggcgaggugaacaagaucaagaacgcccugcugagcaccaacaaggccguggugagccugagcaacggcgugagcgugcugaccuucaaggugcuggaccugaagaacuacaucgacaagcagcugcugcccauccugaacaagcagagcugcagcaucagcaacaucgagaccgugaucgaguuccagcagaagaacaacagacugcuggagaucaccagagaguucagcgugaacgccggcgugaccacccccgugagcaccuacaugcugaccaacagcgagcugcugagccugaucaacgacaugcccaucaccaacgaccagaagaagcugaugagcaacaacgugcagaucgugagacagcagagcuacagcaucaugugcaucaucaaggaggaggugcuggccuacguggugcagcugccccuguacggcgugaucgacacccccugcuggaagcugcacaccagcccccugugcaccaccaacaccaaggagggcagcaacaucugccugaccagaaccgacagaggcugguacugcgacaacgccggcagcgugagcuucuucccccaggccgagaccugcaaggugcagagcaacagaguguucugcgacaccaugaacagcagaacccugcccagcgaggugaaccugugcaacaucgacaucuucaaccccaaguacgacugcaagaucaugaccagcaagaccgacgugagcagcagcgugaucaccagccugggcgccaucgugagcugcuacggcaagaccaagugcaccgccagcaacaagaacagaggcaucaucaagaccuucagcaacggcugcgacuacgugagcaacaagggcguggacaccgugagcgugggcaacacccuguacuacgugaacaagcaggagggcaagagccuguacgugaagggcgagcccaucaucaacuucuacgacccccugguguuccccagcgacgaguucgacgccagcaucagccaggugaacgagaagaucaaccagagccuggccuucaucagaaagagcgacgagcugcugcacaacgugaacgugggcaagagcaccaccaacaucaugaucaccaccaucaucaucgugaucaucgugauccugcugcugcugaucgccgugggccuguuccuguacugcaaggccagaagcacccccgugacccugagcaaggaccagcugagcggcaucaacaacaucgccuucagcaacugaggacuaguuauaagacugacuagcccgaugggccucccaacgggcccuccuccccuccuugcaccgagauuaauaaaaaaaaaaaaaaaaaaaaaaaaaaaaaaaaaaaaaaaaaaaaaaaaaaaaaaaaaaaaaaaaugcaucccccccccccccccccccccccccccccccaaaggcucuuuucagagccaccagaauu

SEQ ID NO: 13568 - RNA, 1825 nt, Artificial Sequence
  mRNA product Design i-3 comprising derived and/or modified sequence from HRSV(Memphis-37)__AIY60640.1__F_DSCav1_mut0 (opt5)
gggagaaagcuuaccauggagcugcccauccucaagaccaacgccauuacaacgauccuggcugccgugacccuuugcuucgcgagcucccagaauauuacagaagaguuuuaccaaucuaccuguagcgcugucuccaaaggcuaucugucugcccucagaacagggugguacaccagcguuaucacaauugaacuguccaacaucaaggagaauaaaugcaacggaaccgacgccaaggugaaacuuaucaagcaggaacuggauaaguauaaaaaugcugugacggagcuccagcugcugaugcagucuaccccugccgcuggcagcggguccgccauugcgagcggaaucgccgucuguaaggugcuccaccuggagggcgaaguuaacaaaauuaagaaugcccuucugucuacaaacaaagcuguggucucccucagcaauggggugucuguucugaccuucaaggugcuugaccugaagaacuacaucgauaaacaacuccugccgauucugaauaagcaguccugcagcaucucuaacauugagacagucaucgaauuucagcagaaaaauaaccggcuccuggagaucacccgcgaguucuccgugaaugcuggagugacgacacccgucagcaccuauaugcuuacaaacuccgaacugcucucucugauuaacgacaugccuaucaccaaugaucaaaagaaacuuaugagcaacaauguucagauugugagacagcaguccuacagcaucauguguauuaucaaggaggaagugcuggccuaugucgugcaacucccccuguacggcguuaucgacaccccuugcuggaaacugcauacaucuccccucuguacgaccaacacaaaggagggcuccaauauuugccugacccggacagaucgcgggugguacugugacaacgcgggaagcgugagcuuuuucccucaggccgaaaccugcaagguccagucuaauagaguguuuugugauacgaugaacuccagaacacugccgucugagguuaaucucugcaacaucgacauuuucaaucccaaauaugauugcaagaucaugaccagcaaaaccgacguguccagcucugucauuacaucccugggcgcuaucgugagcuguuacgggaagaccaaaugcacagccucuaacaagaaucggggaaucauuaagacguuuuccaacggcugugauuaugucagcaauaaagggguggacaccguuuccgugggaaacacacuuuacuaugucaacaagcaagagggcaaaucucuguacgugaagggcgaaccuaucauuaauuucuaugacccccucguuuuuccuagcgaugaguucgacgcuuccaucucucaggugaacgaaaagauuaaucagagccuggccuuuauccgcaaguccgaugagcugcuccacaacgucaauguggggaaaagcaccacaaacauuaugaucaccacgaucauuaucgugauuaucguuauucugcuucugcucaucgccgucggacuguuccuguacugcaaagcuagaucuacccccgugacacuuuccaaggaccagcucagcggcaucaauaacauugcguucucuaauugaggacuaguuauaagacugacuagcccgaugggccucccaacgggcccuccuccccuccuugcaccgagauuaauaaaaaaaaaaaaaaaaaaaaaaaaaaaaaaaaaaaaaaaaaaaaaaaaaaaaaaaaaaaaaaaaugcaucccccccccccccccccccccccccccccccaaaggcucuuuucagagccaccagaauu

SEQ ID NO: 13569 - RNA, 1825 nt, Artificial Sequence
  mRNA product Design i-3 comprising derived and/or modified sequence from HRSV(Memphis-37)__AIY60640.1__F_DSCav1_mut0 (opt6)
gggagaaagcuuaccauggaauuaccaaucuuaaaaacaaacgccauaacaaccauccucgcagcaguaacccuaugcuuugcauccucacaaaacauaacugaagaauuuuaccaaucaacaugcucagcaguaucaaaaggauaucuaucagcccucagaacaggaugguacacaucagucauuacaaucgaacuuucaaacauaaaagaaaauaaauguaacggcacagaugccaaaguaaaauuaauuaaacaagaacuugacaaauacaaaaaugccguaacagaacuacaacuacuaaugcaaaguacuccugcugcaggaagcggaucugcaauagcaucagguauagcaguauguaaaguucuacaccuagaaggcgaaguaaacaaaauuaaaaacgcacuacucucaacaaauaaagcaguugucucccuaucaaacggaguaucaguauuaacuuucaaaguacuagaccucaaaaacuauauagacaaacaacuauuaccaauacuaaacaaacaaagcugcucuaucuccaacaucgaaacaguaauagaauuucaacaaaaaaauaauagacuacuugaaauaaccagagaauuuucaguaaacgccggaguaacaacaccaguaucaacuuacaugcuaacaaacuccgaacuacuaucauuaauaaacgacaugcccauaacaaacgaccaaaaaaaauuaaugucaaacaacguccaaaucguacgacaacaauccuauuccauaauguguauaauaaaagaagaaguacuagcauacguaguacaauuaccauuauauggaguaauagauaccccuugcuggaaacuacacacaucaccccuaugcacuacaaauacgaaagaagguucaaauauaugcuuaacuagaaccgauagagguugguauugugacaacgcuggaucaguaucauuuuucccacaagcagaaacaugcaaaguacaaucaaacagaguauuuugcgacacuaugaacucaagaacuuuaccauccgaaguuaaucuauguaacauagauauauuuaacccaaaauacgacugcaaaauaaugacaucaaaaacagauguaucaucaucaguuauaaccucccucggagcaauaguaucaugcuauggaaaaacaaaaugcacagcaucaaacaaaaaucguggaauuauaaaaacauucucaaacggcugugacuacgucagcaauaaaggaguagacacagucucaguaggaaacacuuuauacuauguuaacaaacaagaaggaaaaucacucuacgucaaaggcgaaccaauaauaaauuucuaugacccacucguauucccauccgacgaauuugacgcaucaauaucacaaguaaaugaaaaaauaaaccaaagccuagcauuuauacgaaaaucagacgaacuacuacacaacguaaacguagguaaaagcacaaccaauauaaugauaacaacaauaaucauaguaauaaucguaauauuacuauuacuaauagcuguaggauuguuccuauacugcaaagcaagaucaacaccaguaaccuuaucuaaggaccaacuaucaggaaucaauaacauugccuucucaaacuaaggacuaguuauaagacugacuagcccgaugggccucccaacgggcccuccuccccuccuugcaccgagauuaauaaaaaaaaaaaaaaaaaaaaaaaaaaaaaaaaaaaaaaaaaaaaaaaaaaaaaaaaaaaaaaaaugcaucccccccccccccccccccccccccccccccaaaggcucuuuucagagccaccagaauu

SEQ ID NO: 13570 - RNA, 1825 nt, Artificial Sequence
  mRNA product Design i-3 comprising derived and/or modified sequence from HRSV(Memphis-37)__AIY60640.1__F_DSCav1_mut0 (opt11)
gggagaaagcuuaccauggaacuaccuauccuuaaaaccaacgcaaucaccaccauccuugccgcagucacacucugcuucgcauccucacagaacaucaccgaagaguucuaucaaucaaccugcuccgccguauccaaaggauaccucucagcccuccgcaccggcugguauaccucagucauaacaaucgaauuaucaaauaucaaggagaacaaaugcaacggcaccgacgccaaagucaaacucauaaaacaagaacuagacaaauacaaaaacgccgugacagaacuccaacuccucaugcaguccacccccgcagccggauccggcucagcaaucgccucgggcauugcaguaugcaaaguccuccaccucgaaggcgaagucaacaaaaucaaaaacgcccuccucuccaccaacaaagccgucgucucccucuccaacggcguaucuguccucacuuucaagguccucgaccucaaaaacuacaucgacaagcaacuacuuccaauccucaacaagcaauccugcucaaucucaaacaucgaaaccguaauagaguuccaacaaaagaacaaccgccuccucgaaaucacccgcgaguucuccguuaacgccggugucacuaccccagucagcaccuacaugcucaccaacuccgaacuccuuucucugaucaacgacaugccaaucaccaacgaucaaaagaaauuaauguccaacaacguccagaucguccgccaacaaagcuacagcaucaugugcaucauaaaagaagaaguacuugcguacguaguucaacuaccccuuuacggcguaaucgacaccccaugcuggaaacuccacaccuccccacuaugcaccaccaacaccaaagaaggauccaacaucugccuaacccgcaccgaccgcggcugguacugcgacaacgcugggagcgucucauucuucccacaagcagaaaccugcaaaguccaaucgaaccgcguauucugcgacaccaugaacuccagaacccuaccaagcgaagucaaucuuugcaacaucgacauauuuaaccccaaauacgacugcaaaaucaugacaucaaagaccgacgucucaucuucagucauuaccucacucggcgcaauugucagcugcuacggaaagaccaaauguaccgccuccaauaaaaaccguggaaucauaaaaaccuuuagcaacggcugcgacuacgucuccaacaaaggagucgacaccgucuccgucggcaacacccucuacuacgucaacaaacaagaaggaaaaucccucuacgugaaaggcgaacccauaauaaacuucuacgacccccuagucuuccccucugacgaguucgacgccuccaucucccaagucaacgaaaagauaaaucaaucacuagccuucauacgcaaaucugacgaacuucuccacaacgucaacgucggcaaauccaccaccaacauaaugaucacaacgauaauaaucgugaucauaguaauccuacuucuccucaucgcaguaggucuauuccuauacugcaaagcccgcagcacccccgucacccuaucaaaagaccaacucuccggcaucaacaacaucgccuucucaaacuaaggacuaguuauaagacugacuagcccgaugggccucccaacgggcccuccuccccuccuugcaccgagauuaauaaaaaaaaaaaaaaaaaaaaaaaaaaaaaaaaaaaaaaaaaaaaaaaaaaaaaaaaaaaaaaaaugcaucccccccccccccccccccccccccccccccaaaggcucuuuucagagccaccagaauu

SEQ ID NO: 13571 - protein, 514 aa, Artificial Sequence
  derived and/or modified protein sequence (artificial) from HRSV(Memphis-37)__AIY60640.1__F-del_DSCav1_mut0
MELPILKTNAITTILAAVTLCFASSQNITEEFYQSTCSAVSKGYLSALRTGWYTSVITIELSNIKENKCNGTDAKVKLIKQELDKYKNAVTELQLLMQSTPAAGSGSAIASGIAVCKVLHLEGEVNKIKNALLSTNKAVVSLSNGVSVLTFKVLDLKNYIDKQLLPILNKQSCSISNIETVIEFQQKNNRLLEITREFSVNAGVTTPVSTYMLTNSELLSLINDMPITNDQKKLMSNNVQIVRQQSYSIMCIIKEEVLAYVVQLPLYGVIDTPCWKLHTSPLCTTNTKEGSNICLTRTDRGWYCDNAGSVSFFPQAETCKVQSNRVFCDTMNSRTLPSEVNLCNIDIFNPKYDCKIMTSKTDVSSSVITSLGAIVSCYGKTKCTASNKNRGIIKTFSNGCDYVSNKGVDTVSVGNTLYYVNKQEGKSLYVKGEPIINFYDPLVFPSDEFDASISQVNEKINQSLAFIRKSDELLHNVNVGKSTTNIMITTIIIVIIVILLLLIAVGLFLYCKAR

SEQ ID NO: 13572 - RNA, 1545 nt, Artificial Sequence
  derived and/or modified CDS sequence (opt1) from HRSV(Memphis-37)__AIY60640.1__F-del_DSCav1_mut0
auggagcugcccauccucaagaccaacgccaucaccacgauccuggccgcggugacccugugcuucgccagcucccagaacaucaccgaggaguucuaccagagcacgugcuccgccgucagcaagggcuaccucuccgcccugcgcaccgggugguacaccagcgugaucaccaucgagcuguccaacaucaaggagaacaagugcaacggcaccgacgccaaggugaagcucaucaagcaggagcuggacaaguacaagaacgcggucacggagcugcagcuccugaugcagagcaccccggccgccggcuccgggagcgcgaucgccuccggcaucgccgucugcaaggugcugcaccucgagggcgaggugaacaagaucaagaacgcccugcuguccaccaacaaggccgucgugagccucuccaacggggugagcguccugaccuucaaggugcuggaccucaagaacuacaucgacaagcagcugcugcccauccugaacaagcagagcugcuccaucagcaacaucgagaccgucaucgaguuccagcagaagaacaaccgccuccuggagaucacgcgggaguucagcgugaacgcgggcgugaccacccccgucuccaccuacaugcugacgaacagcgagcuccugucccugaucaacgacaugccgaucaccaacgaccagaagaagcucaugagcaacaacgugcagaucgugcgccagcaguccuacagcaucaugugcaucaucaaggaggagguccuggccuacguggugcagcugccccucuacggggucaucgacacccccugcuggaagcugcacaccagcccccugugcacgaccaacaccaaggagggcuccaacaucugccucacccggacggaccgcgggugguacugcgacaacgccggcagcguguccuucuucccgcaggccgagaccugcaagguccagagcaaccggguguucugcgacaccaugaacucccggacccugcccagcgaggugaaccucugcaacaucgacaucuucaaccccaaguacgacugcaagaucaugacguccaagaccgacgucagcuccagcgugaucaccucccugggcgccaucgugagcugcuacgggaagaccaagugcacggcgagcaacaagaaccgcggcaucaucaagaccuucuccaacgggugcgacuacgucagcaacaagggcguggacaccguguccgucggcaacacccuguacuacgugaacaagcaggagggcaagagccucuacgugaagggggagcccaucaucaacuucuacgacccgcuggucuuccccuccgacgaguucgacgccagcaucucccaggugaacgagaagaucaaccagagccuggccuucauccggaaguccgacgagcuccugcacaacgugaacgucggcaagagcaccacgaacaucaugaucaccaccaucaucaucgugaucaucgugauccugcugcuccugaucgccgucgggcuguuccucuacugcaaggcccgcuga

SEQ ID NO: 13573 - RNA, 1545 nt, Artificial Sequence
  derived and/or modified CDS sequence (opt1) from HRSV(Memphis-37)__AIY60640.1__F-del_DSCav1_mut0
auggagcugcccauccucaagaccaacgccaucaccacgauccuggccgcggugacccugugcuucgccagcucccagaacaucaccgaggaguucuaccagagcacgugcuccgccgucagcaagggcuaccucuccgcccugcgcaccgggugguacaccagcgugaucaccaucgagcuguccaacaucaaggagaacaagugcaacggcaccgacgccaaggugaagcucaucaagcaggagcuggacaaguacaagaacgcggucacggagcugcagcuccugaugcagagcaccccggccgccggguccggcagcgccaucgcguccgggaucgccgugugcaaggugcugcaccucgagggcgaggucaacaagaucaagaacgcccugcugagcaccaacaaggccguggugucccucagcaacggcgucuccgugcugaccuucaaggugcuggaccucaagaacuacaucgacaagcagcugcugcccauccucaacaagcagagcugcuccaucagcaacaucgagacggucaucgaguuccagcagaagaacaaccggcugcuggagaucacccgcgaguucuccgugaacgccggggugaccacccccgucagcacguacaugcucaccaacagcgagcugcugucccucaucaacgacaugcccaucaccaacgaccagaagaagcugaugagcaacaacgugcagaucgugcggcagcaguccuacagcaucaugugcaucaucaaggaggagguccuggcguacguggugcagcucccgcuguacggcgucaucgacacccccugcuggaagcugcacacgagcccccucugcaccaccaacaccaaggagggguccaacaucugccugacgcgcaccgaccggggcugguacugcgacaacgccggguccgugagcuucuucccccaggccgagaccugcaaggugcaguccaaccgcgucuucugcgacaccaugaacagccggacgcucccguccgaggugaaccugugcaacaucgacaucuucaaccccaaguacgacugcaagaucaugaccagcaagaccgacgucuccagcuccgugaucaccagccugggcgccaucguguccugcuacggcaagacgaagugcaccgccagcaacaagaaccgggggaucaucaagaccuucuccaacggcugcgacuacgucagcaacaaggggguggacaccgugagcgucggcaacacgcucuacuacgugaacaagcaggagggcaagucccuguacgugaagggggagcccaucaucaacuucuacgacccccuggucuucccgagcgacgaguucgacgcguccaucagccaggugaacgagaagaucaaccagucccucgccuucauccgcaagagcgacgagcugcugcacaacgugaacgucggcaaguccaccaccaacaucaugaucaccaccaucaucaucgugaucaucgugauccuccugcugcucaucgccgucgggcuguuccuguacugcaaggcccgguga

SEQ ID NO: 13574 - RNA, 1545 nt, Artificial Sequence
  derived and/or modified CDS sequence (opt2) from HRSV(Memphis-37)__AIY60640.1__F-del_DSCav1_mut0
auggagcuccccauccucaagaccaacgccaucaccaccauccucgccgccgucacccucugcuucgccuccucccagaacaucaccgaggaguucuaccaguccaccugcuccgccgucuccaagggcuaccucuccgcccuccgcaccggcugguacaccuccgucaucaccaucgagcucuccaacaucaaggagaacaagugcaacggcaccgacgccaaggucaagcucaucaagcaggagcucgacaaguacaagaacgccgucaccgagcuccagcuccucaugcaguccacccccgccgccggcuccggcuccgccaucgccuccggcaucgccgucugcaagguccuccaccucgagggcgaggucaacaagaucaagaacgcccuccucuccaccaacaaggccgucgucucccucuccaacggcgucuccguccucaccuucaagguccucgaccucaagaacuacaucgacaagcagcuccuccccauccucaacaagcaguccugcuccaucuccaacaucgagaccgucaucgaguuccagcagaagaacaaccgccuccucgagaucacccgcgaguucuccgucaacgccggcgucaccacccccgucuccaccuacaugcucaccaacuccgagcuccucucccucaucaacgacaugcccaucaccaacgaccagaagaagcucauguccaacaacguccagaucguccgccagcaguccuacuccaucaugugcaucaucaaggaggagguccucgccuacgucguccagcucccccucuacggcgucaucgacacccccugcuggaagcuccacaccuccccccucugcaccaccaacaccaaggagggcuccaacaucugccucacccgcaccgaccgcggcugguacugcgacaacgccggcuccgucuccuucuucccccaggccgagaccugcaagguccaguccaaccgcgucuucugcgacaccaugaacucccgcacccuccccuccgaggucaaccucugcaacaucgacaucuucaaccccaaguacgacugcaagaucaugaccuccaagaccgacgucuccuccuccgucaucaccucccucggcgccaucgucuccugcuacggcaagaccaagugcaccgccuccaacaagaaccgcggcaucaucaagaccuucuccaacggcugcgacuacgucuccaacaagggcgucgacaccgucuccgucggcaacacccucuacuacgucaacaagcaggagggcaagucccucuacgucaagggcgagcccaucaucaacuucuacgacccccucgucuuccccuccgacgaguucgacgccuccaucucccaggucaacgagaagaucaaccagucccucgccuucauccgcaaguccgacgagcuccuccacaacgucaacgucggcaaguccaccaccaacaucaugaucaccaccaucaucaucgucaucaucgucauccuccuccuccucaucgccgucggccucuuccucuacugcaaggcccgcuga

SEQ ID NO: 13575 - RNA, 1545 nt, Artificial Sequence
  derived and/or modified CDS sequence (opt3) from HRSV(Memphis-37)__AIY60640.1__F-del_DSCav1_mut0
auggagcugcccauccucaagaccaacgccauuacaacuauacuugcugcagugacgcugugcuucgccagcucccagaauaucaccgaagaguuuuaccaaucuacauguucagcggucaguaaaggcuauuugagcgcuuuaagaacugggugguacaccuccguuauuacaaucgaacugucuaacauuaaggagaauaaaugcaacggaaccgacgccaaggugaaacuaaucaagcaggaacucgauaaguauaaaaaugcaguaacugagcugcagcuucugaugcagucgaccccugccgcugguucaggcagcgcaauagccagugggaucgcuguguguaaggucuugcaccucgagggagaagugaacaaaauuaagaaugcccugcuguccacaaacaaagcgguugugucucucagcaauggcgucuccguguuaacguucaagguacuggaccuuaagaacuacaucgauaaacaauugcugccaauucuaaauaagcagucaugcaguaucagcaacauagagacuguuauugaauuucagcagaaaaauaacaggcuccuggagaucacccgggaguucucugugaaugccggugucacaacuccgguguccaccuauaugcuuacaaacucagaacuguugagccucauuaacgacaugcccaucaccaaugaucaaaagaaacugaugaguaacaaugugcagaucguccgccagcagucuuacuccauuauguguauaaucaaggaggaaguuuuagcauaugugguacaacugccucucuacggggugauugacacgccaugcuggaaacuucauacuagcccccuguguacaaccaacacuaaggagggaucgaauaucugcuugacacgaaccgaucguggcugguacugugacaacgcuggcucugucuccuuuuucccucaggccgaaacgugcaaggugcagucaaauagaguguuuugugauaccaugaacaguagaacacugccaagcgaggugaaucucugcaacauagacauuuucaaucccaaauaugauugcaagaucaugacuuccaaaaccgacgucucuagcucagugaucacaagucugggggcaauuguauccuguuacggaaagacuaaaugcaccgcuagcaacaagaauagggguaucauuaagacauuuucuaacggcugugauuauguuucaaauaaagggguggacaccgucagugugggaaacacucuuuacuaugucaacaagcaagagggcaaaagccuguacgugaagggugaaccuauaaucaauuucuaugacccauugguuuuuccguccgaugaguucgacgccucuauuucgcagguuaacgagaaaaucaaucagagccucgcguuuauccggaaguccgaugaacuguuacacaacguaaaugucgggaagucaacgacaaacauuaugauaaccacuaucauuaucgugauuaucguuauacugcuacuccugaucgccgugggacuuuucuuguacugcaaagcacgcuga

SEQ ID NO: 13576 - RNA, 1545 nt, Artificial Sequence
  derived and/or modified CDS sequence (opt4) from HRSV(Memphis-37)__AIY60640.1__F-del_DSCav1_mut0
auggagcugcccauccugaagaccaacgccaucaccaccauccuggccgccgugacccugugcuucgccagcagccagaacaucaccgaggaguucuaccagagcaccugcagcgccgugagcaagggcuaccugagcgcccugagaaccggcugguacaccagcgugaucaccaucgagcugagcaacaucaaggagaacaagugcaacggcaccgacgccaaggugaagcugaucaagcaggagcuggacaaguacaagaacgccgugaccgagcugcagcugcugaugcagagcacccccgccgccggcagcggcagcgccaucgccagcggcaucgccgugugcaaggugcugcaccuggagggcgaggugaacaagaucaagaacgcccugcugagcaccaacaaggccguggugagccugagcaacggcgugagcgugcugaccuucaaggugcuggaccugaagaacuacaucgacaagcagcugcugcccauccugaacaagcagagcugcagcaucagcaacaucgagaccgugaucgaguuccagcagaagaacaacagacugcuggagaucaccagagaguucagcgugaacgccggcgugaccacccccgugagcaccuacaugcugaccaacagcgagcugcugagccugaucaacgacaugcccaucaccaacgaccagaagaagcugaugagcaacaacgugcagaucgugagacagcagagcuacagcaucaugugcaucaucaaggaggaggugcuggccuacguggugcagcugccccuguacggcgugaucgacacccccugcuggaagcugcacaccagcccccugugcaccaccaacaccaaggagggcagcaacaucugccugaccagaaccgacagaggcugguacugcgacaacgccggcagcgugagcuucuucccccaggccgagaccugcaaggugcagagcaacagaguguucugcgacaccaugaacagcagaacccugcccagcgaggugaaccugugcaacaucgacaucuucaaccccaaguacgacugcaagaucaugaccagcaagaccgacgugagcagcagcgugaucaccagccugggcgccaucgugagcugcuacggcaagaccaagugcaccgccagcaacaagaacagaggcaucaucaagaccuucagcaacggcugcgacuacgugagcaacaagggcguggacaccgugagcgugggcaacacccuguacuacgugaacaagcaggagggcaagagccuguacgugaagggcgagcccaucaucaacuucuacgacccccugguguuccccagcgacgaguucgacgccagcaucagccaggugaacgagaagaucaaccagagccuggccuucaucagaaagagcgacgagcugcugcacaacgugaacgugggcaagagcaccaccaacaucaugaucaccaccaucaucaucgugaucaucgugauccugcugcugcugaucgccgugggccuguuccuguacugcaaggccagauga

SEQ ID NO: 13577 - RNA, 1545 nt, Artificial Sequence
  derived and/or modified CDS sequence (opt5) from HRSV(Memphis-37)__AIY60640.1__F-del_DSCav1_mut0
auggagcugcccauccucaagaccaacgccauuacaacgauccuggcugccgugacccuuugcuucgcgagcucccagaauauuacagaagaguuuuaccaaucuaccuguagcgcugucuccaaaggcuaucugucugcccucagaacagggugguacaccagcguuaucacaauugaacuguccaacaucaaggagaauaaaugcaacggaaccgacgccaaggugaaacuuaucaagcaggaacuggauaaguauaaaaaugcugugacggagcuccagcugcugaugcagucuaccccugccgcuggcagcggguccgccauugcgagcggaaucgccgucuguaaggugcuccaccuggagggcgaaguuaacaaaauuaagaaugcccuucugucuacaaacaaagcuguggucucccucagcaauggggugucuguucugaccuucaaggugcuugaccugaagaacuacaucgauaaacaacuccugccgauucugaauaagcaguccugcagcaucucuaacauugagacagucaucgaauuucagcagaaaaauaaccggcuccuggagaucacccgcgaguucuccgugaaugcuggagugacgacacccgucagcaccuauaugcuuacaaacuccgaacugcucucucugauuaacgacaugccuaucaccaaugaucaaaagaaacuuaugagcaacaauguucagauugugagacagcaguccuacagcaucauguguauuaucaaggaggaagugcuggccuaugucgugcaacucccccuguacggcguuaucgacaccccuugcuggaaacugcauacaucuccccucuguacgaccaacacaaaggagggcuccaauauuugccugacccggacagaucgcgggugguacugugacaacgcgggaagcgugagcuuuuucccucaggccgaaaccugcaagguccagucuaauagaguguuuugugauacgaugaacuccagaacacugccgucugagguuaaucucugcaacaucgacauuuucaaucccaaauaugauugcaagaucaugaccagcaaaaccgacguguccagcucugucauuacaucccugggcgcuaucgugagcuguuacgggaagaccaaaugcacagccucuaacaagaaucggggaaucauuaagacguuuuccaacggcugugauuaugucagcaauaaagggguggacaccguuuccgugggaaacacacuuuacuaugucaacaagcaagagggcaaaucucuguacgugaagggcgaaccuaucauuaauuucuaugacccccucguuuuuccuagcgaugaguucgacgcuuccaucucucaggugaacgaaaagauuaaucagagccuggccuuuauccgcaaguccgaugagcugcuccacaacgucaauguggggaaaagcaccacaaacauuaugaucaccacgaucauuaucgugauuaucguuauucugcuucugcucaucgccgucggacuguuccuguacugcaaagcuagauga

SEQ ID NO: 13578 - RNA, 1545 nt, Artificial Sequence
  derived and/or modified CDS sequence (opt6) from HRSV(Memphis-37)__AIY60640.1__F-del_DSCav1_mut0
auggaacucccaauacuuaaaacaaacgcaaucacaacaauacuagcugcagucacacuaugcuucgccucaucacaaaauauaacagaagaauuuuaucaaucaacaugcuccgcaguaucaaaaggauaucucucugcauuacgaacagguugguacaccucgguaauaacaauagaauuaucaaacauaaaagaaaauaaaugcaauggaaccgaugccaaaguaaaacuaaucaaacaagaacuugacaaauacaaaaacgcaguaacagaacuacaacuauuaaugcaaucaacaccagcagcagguucaggcuccgcaaucgcuucaggaauagccguuuguaaaguacuacacuuagaaggagaaguaaauaaaauaaaaaacgccuuacuaucaacaaacaaagcaguagucucccuuuccaacggaguaucagucuuaacuuuuaaaguacucgacuuaaaaaauuacaucgacaaacaacuacuacccauucuaaauaaacaaucaugcucaauaucaaacaucgaaacaguaaucgaauuucaacaaaaaaauaauagauuacuagaaauaacacgagaauuuuccguaaaugccggaguaacgaccccagucucaacauacauguuaacaaacucagaauuacuaucacucauuaacgauaugccaauaacaaaugaccaaaaaaaacuaaugucaaacaacguccaaauaguacgacaacaaucauacucuaucauguguauaauaaaagaagaaguuuuagcauacguaguacaacuaccacuuuacggagucauagacaccccaugcuggaaacuacacacaucacccuuauguacaacaaacaccaaagaagggucuaacauaugucucacuagaacagaucgaggcugguacugcgacaacgcaggaucaguuagcuuuuucccucaagccgaaaccuguaaaguacaauccaaucgaguauuuugcgacacuaugaacucuagaaccuuacccuccgaaguaaaccuauguaacauagacauauuuaaucccaaauaugauugcaaaaucaugacauccaaaacagauguaucaagcucuguaauaaccucacuaggagcaauaguuucaugcuaugguaaaacaaaaugcaccgccucaaacaaaaauagagggauaaucaaaaccuucucaaauggaugcgacuacguaucaaauaaaggaguagacaccgucuccguaggaaacacacuauacuacguaaacaaacaagaaggaaaaucacuauacguaaaaggagaaccaaucauaaacuucuacgacccacuuguuuucccaucagaugaauuugaugccuccauaucacaaguaaacgaaaaaauaaaccaaucucuagccuucaucagaaaauccgacgaacuuuuacacaacguaaacguagguaaaucaacaaccaacaucaugauaacaacaauaauaauaguaauaauuguaauacuuuuacuacuuaucgccguaggccuauucuuauauuguaaagcaagauga

SEQ ID NO: 13579 - RNA, 1545 nt, Artificial Sequence
  derived and/or modified CDS sequence (opt11) from HRSV(Memphis-37)__AIY60640.1__F-del_DSCav1_mut0
auggaacuaccaauccucaaaaccaacgccaucacuacaauccuagccgcgguaacccugugcuucgccuccucacaaaacaucacagaagaauuuuaccaaucaaccugcuccgccguauccaaaggauaccugagcgcccugagaaccggcugguacaccuccgucaucaccauagaacucuccaacaucaaagaaaacaaaugcaacgguacggacgccaaaguuaaacucaucaaacaagaacuugacaaauacaagaacgccgucacagaacugcaacuccucaugcaauccacccccgccgccggcuccggcuccgccauagccuccggcaucgccgucugcaaagucuuacaccuagaaggcgaagucaacaaaaucaaaaacgcacuacuuuccacaaacaaagccgucgucucacucuccaacggcguauccguccucaccuucaaaguacuugaccucaaaaacuacaucgacaaacaacuacuccccauccugaacaaacaauccugcucaaucuccaacaucgaaaccguaaucgaguuccaacagaaaaauaaucgccuccuggagaucacccgcgaguucuccgucaaugcaggagucacaaccccaguaucaaccuacaugcucaccaacuccgaacuccugucgcucaucaacgacaugcccaucacaaacgaccaaaagaaacucauguccaacaacguacaaaucgucagacaacaauccuauucuauaaugugcaucaucaaagaagaaguccucgccuacgucguacaacucccccucuacggcguuaucgacacccccugcuggaaacuccacaccucaccccucugcaccaccaacacaaaagaaggcuccaacaucugccucacucggaccgaccgcggcugguacugcgacaaugccggcagcgucuccuucuucccacaagccgaaaccugcaaaguccaguccaaccgcguauucugcgacacuaugaacuccagaacccuccccuccgaaguaaaccucugcaacaucgacaucuucaacccaaaauacgacugcaaaaucaugaccucaaaaaccgacgucagcucgucagucauaaccagccucggagccauagucucaugcuacggaaaaaccaaaugcaccgccagcaacaaaaaccgcggcauaauaaaaacauucuccaacggcugcgacuauguauccaacaaaggagucgauaccgucuccguaggcaacacccuauacuacgucaacaaacaagaaggcaaaucccucuacgucaaaggugaaccaaucaucaacuucuacgacccucucgucuuccccuccgaugaguucgacgccucaaucagccaaguaaacgaaaagauaaaccaaucacucgccuucauccgcaaauccgacgaacuucuucacaacgucaacgucggcaaaucuaccaccaacauaaugauaaccaccaucaucaucgucaucaucguaauacuccuccuucucaucgccgucggccuauuccuauacugcaaagcccgcuag

SEQ ID NO: 13580 - RNA, 1821 nt, Artificial Sequence
  mRNA product Design a-1 comprising derived and/or modified sequence from HRSV(Memphis-37)__AIY60640.1__F-del_DSCav1_mut0 (opt1)
gggagagucccgcagucggcguccagcggcucugcuuguucgugugugugucguugcaggccuuauucaagcuuaccauggagcugcccauccucaagaccaacgccaucaccacgauccuggccgcggugacccugugcuucgccagcucccagaacaucaccgaggaguucuaccagagcacgugcuccgccgucagcaagggcuaccucuccgcccugcgcaccgggugguacaccagcgugaucaccaucgagcuguccaacaucaaggagaacaagugcaacggcaccgacgccaaggugaagcucaucaagcaggagcuggacaaguacaagaacgcggucacggagcugcagcuccugaugcagagcaccccggccgccggcuccgggagcgcgaucgccuccggcaucgccgucugcaaggugcugcaccucgagggcgaggugaacaagaucaagaacgcccugcuguccaccaacaaggccgucgugagccucuccaacggggugagcguccugaccuucaaggugcuggaccucaagaacuacaucgacaagcagcugcugcccauccugaacaagcagagcugcuccaucagcaacaucgagaccgucaucgaguuccagcagaagaacaaccgccuccuggagaucacgcgggaguucagcgugaacgcgggcgugaccacccccgucuccaccuacaugcugacgaacagcgagcuccugucccugaucaacgacaugccgaucaccaacgaccagaagaagcucaugagcaacaacgugcagaucgugcgccagcaguccuacagcaucaugugcaucaucaaggaggagguccuggccuacguggugcagcugccccucuacggggucaucgacacccccugcuggaagcugcacaccagcccccugugcacgaccaacaccaaggagggcuccaacaucugccucacccggacggaccgcgggugguacugcgacaacgccggcagcguguccuucuucccgcaggccgagaccugcaagguccagagcaaccggguguucugcgacaccaugaacucccggacccugcccagcgaggugaaccucugcaacaucgacaucuucaaccccaaguacgacugcaagaucaugacguccaagaccgacgucagcuccagcgugaucaccucccugggcgccaucgugagcugcuacgggaagaccaagugcacggcgagcaacaagaaccgcggcaucaucaagaccuucuccaacgggugcgacuacgucagcaacaagggcguggacaccguguccgucggcaacacccuguacuacgugaacaagcaggagggcaagagccucuacgugaagggggagcccaucaucaacuucuacgacccgcuggucuuccccuccgacgaguucgacgccagcaucucccaggugaacgagaagaucaaccagagccuggccuucauccggaaguccgacgagcuccugcacaacgugaacgucggcaagagcaccacgaacaucaugaucaccaccaucaucaucgugaucaucgugauccugcugcuccugaucgccgucgggcuguuccucuacugcaaggcccgcugaggacuagucccuguucccagagcccacuuuuuuuucuuuuuuugaaauaaaauagccugucuuucagaucuaaaaaaaaaaaaaaaaaaaaaaaaaaaaaaaaaaaaaaaaaaaaaaaaaaaaaaaaaaaaaaaaugcaucccccccccccccccccccccccccccccccaaaggcucuuuucagagccaccagaauu

SEQ ID NO: 13581 - RNA, 1821 nt, Artificial Sequence
  mRNA product Design a-1 comprising derived and/or modified sequence from HRSV(Memphis-37)__AIY60640.1__F-del_DSCav1_mut0 (opt1)
gggagagucccgcagucggcguccagcggcucugcuuguucgugugugugucguugcaggccuuauucaagcuuaccauggagcugcccauccucaagaccaacgccaucaccacgauccuggccgcggugacccugugcuucgccagcucccagaacaucaccgaggaguucuaccagagcacgugcuccgccgucagcaagggcuaccucuccgcccugcgcaccgggugguacaccagcgugaucaccaucgagcuguccaacaucaaggagaacaagugcaacggcaccgacgccaaggugaagcucaucaagcaggagcuggacaaguacaagaacgcggucacggagcugcagcuccugaugcagagcaccccggccgccggguccggcagcgccaucgcguccgggaucgccgugugcaaggugcugcaccucgagggcgaggucaacaagaucaagaacgcccugcugagcaccaacaaggccguggugucccucagcaacggcgucuccgugcugaccuucaaggugcuggaccucaagaacuacaucgacaagcagcugcugcccauccucaacaagcagagcugcuccaucagcaacaucgagacggucaucgaguuccagcagaagaacaaccggcugcuggagaucacccgcgaguucuccgugaacgccggggugaccacccccgucagcacguacaugcucaccaacagcgagcugcugucccucaucaacgacaugcccaucaccaacgaccagaagaagcugaugagcaacaacgugcagaucgugcggcagcaguccuacagcaucaugugcaucaucaaggaggagguccuggcguacguggugcagcucccgcuguacggcgucaucgacacccccugcuggaagcugcacacgagcccccucugcaccaccaacaccaaggagggguccaacaucugccugacgcgcaccgaccggggcugguacugcgacaacgccggguccgugagcuucuucccccaggccgagaccugcaaggugcaguccaaccgcgucuucugcgacaccaugaacagccggacgcucccguccgaggugaaccugugcaacaucgacaucuucaaccccaaguacgacugcaagaucaugaccagcaagaccgacgucuccagcuccgugaucaccagccugggcgccaucguguccugcuacggcaagacgaagugcaccgccagcaacaagaaccgggggaucaucaagaccuucuccaacggcugcgacuacgucagcaacaaggggguggacaccgugagcgucggcaacacgcucuacuacgugaacaagcaggagggcaagucccuguacgugaagggggagcccaucaucaacuucuacgacccccuggucuucccgagcgacgaguucgacgcguccaucagccaggugaacgagaagaucaaccagucccucgccuucauccgcaagagcgacgagcugcugcacaacgugaacgucggcaaguccaccaccaacaucaugaucaccaccaucaucaucgugaucaucgugauccuccugcugcucaucgccgucgggcuguuccuguacugcaaggcccggugaggacuagucccuguucccagagcccacuuuuuuuucuuuuuuugaaauaaaauagccugucuuucagaucuaaaaaaaaaaaaaaaaaaaaaaaaaaaaaaaaaaaaaaaaaaaaaaaaaaaaaaaaaaaaaaaaugcaucccccccccccccccccccccccccccccccaaaggcucuuuucagagccaccagaauu

SEQ ID NO: 13582 - RNA, 1821 nt, Artificial Sequence
  mRNA product Design a-1 comprising derived and/or modified sequence from HRSV(Memphis-37)__AIY60640.1__F-del_DSCav1_mut0 (opt2)
gggagagucccgcagucggcguccagcggcucugcuuguucgugugugugucguugcaggccuuauucaagcuuaccauggagcuccccauccucaagaccaacgccaucaccaccauccucgccgccgucacccucugcuucgccuccucccagaacaucaccgaggaguucuaccaguccaccugcuccgccgucuccaagggcuaccucuccgcccuccgcaccggcugguacaccuccgucaucaccaucgagcucuccaacaucaaggagaacaagugcaacggcaccgacgccaaggucaagcucaucaagcaggagcucgacaaguacaagaacgccgucaccgagcuccagcuccucaugcaguccacccccgccgccggcuccggcuccgccaucgccuccggcaucgccgucugcaagguccuccaccucgagggcgaggucaacaagaucaagaacgcccuccucuccaccaacaaggccgucgucucccucuccaacggcgucuccguccucaccuucaagguccucgaccucaagaacuacaucgacaagcagcuccuccccauccucaacaagcaguccugcuccaucuccaacaucgagaccgucaucgaguuccagcagaagaacaaccgccuccucgagaucacccgcgaguucuccgucaacgccggcgucaccacccccgucuccaccuacaugcucaccaacuccgagcuccucucccucaucaacgacaugcccaucaccaacgaccagaagaagcucauguccaacaacguccagaucguccgccagcaguccuacuccaucaugugcaucaucaaggaggagguccucgccuacgucguccagcucccccucuacggcgucaucgacacccccugcuggaagcuccacaccuccccccucugcaccaccaacaccaaggagggcuccaacaucugccucacccgcaccgaccgcggcugguacugcgacaacgccggcuccgucuccuucuucccccaggccgagaccugcaagguccaguccaaccgcgucuucugcgacaccaugaacucccgcacccuccccuccgaggucaaccucugcaacaucgacaucuucaaccccaaguacgacugcaagaucaugaccuccaagaccgacgucuccuccuccgucaucaccucccucggcgccaucgucuccugcuacggcaagaccaagugcaccgccuccaacaagaaccgcggcaucaucaagaccuucuccaacggcugcgacuacgucuccaacaagggcgucgacaccgucuccgucggcaacacccucuacuacgucaacaagcaggagggcaagucccucuacgucaagggcgagcccaucaucaacuucuacgacccccucgucuuccccuccgacgaguucgacgccuccaucucccaggucaacgagaagaucaaccagucccucgccuucauccgcaaguccgacgagcuccuccacaacgucaacgucggcaaguccaccaccaacaucaugaucaccaccaucaucaucgucaucaucgucauccuccuccuccucaucgccgucggccucuuccucuacugcaaggcccgcugaggacuagucccuguucccagagcccacuuuuuuuucuuuuuuugaaauaaaauagccugucuuucagaucuaaaaaaaaaaaaaaaaaaaaaaaaaaaaaaaaaaaaaaaaaaaaaaaaaaaaaaaaaaaaaaaaugcaucccccccccccccccccccccccccccccccaaaggcucuuuucagagccaccagaauu

SEQ ID NO: 13583 - RNA, 1821 nt, Artificial Sequence
  mRNA product Design a-1 comprising derived and/or modified sequence from HRSV(Memphis-37)__AIY60640.1__F-del_DSCav1_mut0 (opt3)
gggagagucccgcagucggcguccagcggcucugcuuguucgugugugugucguugcaggccuuauucaagcuuaccauggagcugcccauccucaagaccaacgccauuacaacuauacuugcugcagugacgcugugcuucgccagcucccagaauaucaccgaagaguuuuaccaaucuacauguucagcggucaguaaaggcuauuugagcgcuuuaagaacugggugguacaccuccguuauuacaaucgaacugucuaacauuaaggagaauaaaugcaacggaaccgacgccaaggugaaacuaaucaagcaggaacucgauaaguauaaaaaugcaguaacugagcugcagcuucugaugcagucgaccccugccgcugguucaggcagcgcaauagccagugggaucgcuguguguaaggucuugcaccucgagggagaagugaacaaaauuaagaaugcccugcuguccacaaacaaagcgguugugucucucagcaauggcgucuccguguuaacguucaagguacuggaccuuaagaacuacaucgauaaacaauugcugccaauucuaaauaagcagucaugcaguaucagcaacauagagacuguuauugaauuucagcagaaaaauaacaggcuccuggagaucacccgggaguucucugugaaugccggugucacaacuccgguguccaccuauaugcuuacaaacucagaacuguugagccucauuaacgacaugcccaucaccaaugaucaaaagaaacugaugaguaacaaugugcagaucguccgccagcagucuuacuccauuauguguauaaucaaggaggaaguuuuagcauaugugguacaacugccucucuacggggugauugacacgccaugcuggaaacuucauacuagcccccuguguacaaccaacacuaaggagggaucgaauaucugcuugacacgaaccgaucguggcugguacugugacaacgcuggcucugucuccuuuuucccucaggccgaaacgugcaaggugcagucaaauagaguguuuugugauaccaugaacaguagaacacugccaagcgaggugaaucucugcaacauagacauuuucaaucccaaauaugauugcaagaucaugacuuccaaaaccgacgucucuagcucagugaucacaagucugggggcaauuguauccuguuacggaaagacuaaaugcaccgcuagcaacaagaauagggguaucauuaagacauuuucuaacggcugugauuauguuucaaauaaagggguggacaccgucagugugggaaacacucuuuacuaugucaacaagcaagagggcaaaagccuguacgugaagggugaaccuauaaucaauuucuaugacccauugguuuuuccguccgaugaguucgacgccucuauuucgcagguuaacgagaaaaucaaucagagccucgcguuuauccggaaguccgaugaacuguuacacaacguaaaugucgggaagucaacgacaaacauuaugauaaccacuaucauuaucgugauuaucguuauacugcuacuccugaucgccgugggacuuuucuuguacugcaaagcacgcugaggacuagucccuguucccagagcccacuuuuuuuucuuuuuuugaaauaaaauagccugucuuucagaucuaaaaaaaaaaaaaaaaaaaaaaaaaaaaaaaaaaaaaaaaaaaaaaaaaaaaaaaaaaaaaaaaugcaucccccccccccccccccccccccccccccccaaaggcucuuuucagagccaccagaauu

SEQ ID NO: 13584 - RNA, 1821 nt, Artificial Sequence
  mRNA product Design a-1 comprising derived and/or modified sequence from HRSV(Memphis-37)__AIY60640.1__F-del_DSCav1_mut0 (opt4)
gggagagucccgcagucggcguccagcggcucugcuuguucgugugugugucguugcaggccuuauucaagcuuaccauggagcugcccauccugaagaccaacgccaucaccaccauccuggccgccgugacccugugcuucgccagcagccagaacaucaccgaggaguucuaccagagcaccugcagcgccgugagcaagggcuaccugagcgcccugagaaccggcugguacaccagcgugaucaccaucgagcugagcaacaucaaggagaacaagugcaacggcaccgacgccaaggugaagcugaucaagcaggagcuggacaaguacaagaacgccgugaccgagcugcagcugcugaugcagagcacccccgccgccggcagcggcagcgccaucgccagcggcaucgccgugugcaaggugcugcaccuggagggcgaggugaacaagaucaagaacgcccugcugagcaccaacaaggccguggugagccugagcaacggcgugagcgugcugaccuucaaggugcuggaccugaagaacuacaucgacaagcagcugcugcccauccugaacaagcagagcugcagcaucagcaacaucgagaccgugaucgaguuccagcagaagaacaacagacugcuggagaucaccagagaguucagcgugaacgccggcgugaccacccccgugagcaccuacaugcugaccaacagcgagcugcugagccugaucaacgacaugcccaucaccaacgaccagaagaagcugaugagcaacaacgugcagaucgugagacagcagagcuacagcaucaugugcaucaucaaggaggaggugcuggccuacguggugcagcugccccuguacggcgugaucgacacccccugcuggaagcugcacaccagcccccugugcaccaccaacaccaaggagggcagcaacaucugccugaccagaaccgacagaggcugguacugcgacaacgccggcagcgugagcuucuucccccaggccgagaccugcaaggugcagagcaacagaguguucugcgacaccaugaacagcagaacccugcccagcgaggugaaccugugcaacaucgacaucuucaaccccaaguacgacugcaagaucaugaccagcaagaccgacgugagcagcagcgugaucaccagccugggcgccaucgugagcugcuacggcaagaccaagugcaccgccagcaacaagaacagaggcaucaucaagaccuucagcaacggcugcgacuacgugagcaacaagggcguggacaccgugagcgugggcaacacccuguacuacgugaacaagcaggagggcaagagccuguacgugaagggcgagcccaucaucaacuucuacgacccccugguguuccccagcgacgaguucgacgccagcaucagccaggugaacgagaagaucaaccagagccuggccuucaucagaaagagcgacgagcugcugcacaacgugaacgugggcaagagcaccaccaacaucaugaucaccaccaucaucaucgugaucaucgugauccugcugcugcugaucgccgugggccuguuccuguacugcaaggccagaugaggacuagucccuguucccagagcccacuuuuuuuucuuuuuuugaaauaaaauagccugucuuucagaucuaaaaaaaaaaaaaaaaaaaaaaaaaaaaaaaaaaaaaaaaaaaaaaaaaaaaaaaaaaaaaaaaugcaucccccccccccccccccccccccccccccccaaaggcucuuuucagagccaccagaauu

SEQ ID NO: 13585 - RNA, 1821 nt, Artificial Sequence
  mRNA product Design a-1 comprising derived and/or modified sequence from HRSV(Memphis-37)__AIY60640.1__F-del_DSCav1_mut0 (opt5)
gggagagucccgcagucggcguccagcggcucugcuuguucgugugugugucguugcaggccuuauucaagcuuaccauggagcugcccauccucaagaccaacgccauuacaacgauccuggcugccgugacccuuugcuucgcgagcucccagaauauuacagaagaguuuuaccaaucuaccuguagcgcugucuccaaaggcuaucugucugcccucagaacagggugguacaccagcguuaucacaauugaacuguccaacaucaaggagaauaaaugcaacggaaccgacgccaaggugaaacuuaucaagcaggaacuggauaaguauaaaaaugcugugacggagcuccagcugcugaugcagucuaccccugccgcuggcagcggguccgccauugcgagcggaaucgccgucuguaaggugcuccaccuggagggcgaaguuaacaaaauuaagaaugcccuucugucuacaaacaaagcuguggucucccucagcaauggggugucuguucugaccuucaaggugcuugaccugaagaacuacaucgauaaacaacuccugccgauucugaauaagcaguccugcagcaucucuaacauugagacagucaucgaauuucagcagaaaaauaaccggcuccuggagaucacccgcgaguucuccgugaaugcuggagugacgacacccgucagcaccuauaugcuuacaaacuccgaacugcucucucugauuaacgacaugccuaucaccaaugaucaaaagaaacuuaugagcaacaauguucagauugugagacagcaguccuacagcaucauguguauuaucaaggaggaagugcuggccuaugucgugcaacucccccuguacggcguuaucgacaccccuugcuggaaacugcauacaucuccccucuguacgaccaacacaaaggagggcuccaauauuugccugacccggacagaucgcgggugguacugugacaacgcgggaagcgugagcuuuuucccucaggccgaaaccugcaagguccagucuaauagaguguuuugugauacgaugaacuccagaacacugccgucugagguuaaucucugcaacaucgacauuuucaaucccaaauaugauugcaagaucaugaccagcaaaaccgacguguccagcucugucauuacaucccugggcgcuaucgugagcuguuacgggaagaccaaaugcacagccucuaacaagaaucggggaaucauuaagacguuuuccaacggcugugauuaugucagcaauaaagggguggacaccguuuccgugggaaacacacuuuacuaugucaacaagcaagagggcaaaucucuguacgugaagggcgaaccuaucauuaauuucuaugacccccucguuuuuccuagcgaugaguucgacgcuuccaucucucaggugaacgaaaagauuaaucagagccuggccuuuauccgcaaguccgaugagcugcuccacaacgucaauguggggaaaagcaccacaaacauuaugaucaccacgaucauuaucgugauuaucguuauucugcuucugcucaucgccgucggacuguuccuguacugcaaagcuagaugaggacuagucccuguucccagagcccacuuuuuuuucuuuuuuugaaauaaaauagccugucuuucagaucuaaaaaaaaaaaaaaaaaaaaaaaaaaaaaaaaaaaaaaaaaaaaaaaaaaaaaaaaaaaaaaaaugcaucccccccccccccccccccccccccccccccaaaggcucuuuucagagccaccagaauu

SEQ ID NO: 13586 - RNA, 1821 nt, Artificial Sequence
  mRNA product Design a-1 comprising derived and/or modified sequence from HRSV(Memphis-37)__AIY60640.1__F-del_DSCav1_mut0 (opt6)
gggagagucccgcagucggcguccagcggcucugcuuguucgugugugugucguugcaggccuuauucaagcuuaccauggaacucccaauacuuaaaacaaacgcaaucacaacaauacuagcugcagucacacuaugcuucgccucaucacaaaauauaacagaagaauuuuaucaaucaacaugcuccgcaguaucaaaaggauaucucucugcauuacgaacagguugguacaccucgguaauaacaauagaauuaucaaacauaaaagaaaauaaaugcaauggaaccgaugccaaaguaaaacuaaucaaacaagaacuugacaaauacaaaaacgcaguaacagaacuacaacuauuaaugcaaucaacaccagcagcagguucaggcuccgcaaucgcuucaggaauagccguuuguaaaguacuacacuuagaaggagaaguaaauaaaauaaaaaacgccuuacuaucaacaaacaaagcaguagucucccuuuccaacggaguaucagucuuaacuuuuaaaguacucgacuuaaaaaauuacaucgacaaacaacuacuacccauucuaaauaaacaaucaugcucaauaucaaacaucgaaacaguaaucgaauuucaacaaaaaaauaauagauuacuagaaauaacacgagaauuuuccguaaaugccggaguaacgaccccagucucaacauacauguuaacaaacucagaauuacuaucacucauuaacgauaugccaauaacaaaugaccaaaaaaaacuaaugucaaacaacguccaaauaguacgacaacaaucauacucuaucauguguauaauaaaagaagaaguuuuagcauacguaguacaacuaccacuuuacggagucauagacaccccaugcuggaaacuacacacaucacccuuauguacaacaaacaccaaagaagggucuaacauaugucucacuagaacagaucgaggcugguacugcgacaacgcaggaucaguuagcuuuuucccucaagccgaaaccuguaaaguacaauccaaucgaguauuuugcgacacuaugaacucuagaaccuuacccuccgaaguaaaccuauguaacauagacauauuuaaucccaaauaugauugcaaaaucaugacauccaaaacagauguaucaagcucuguaauaaccucacuaggagcaauaguuucaugcuaugguaaaacaaaaugcaccgccucaaacaaaaauagagggauaaucaaaaccuucucaaauggaugcgacuacguaucaaauaaaggaguagacaccgucuccguaggaaacacacuauacuacguaaacaaacaagaaggaaaaucacuauacguaaaaggagaaccaaucauaaacuucuacgacccacuuguuuucccaucagaugaauuugaugccuccauaucacaaguaaacgaaaaaauaaaccaaucucuagccuucaucagaaaauccgacgaacuuuuacacaacguaaacguagguaaaucaacaaccaacaucaugauaacaacaauaauaauaguaauaauuguaauacuuuuacuacuuaucgccguaggccuauucuuauauuguaaagcaagaugaggacuagucccuguucccagagcccacuuuuuuuucuuuuuuugaaauaaaauagccugucuuucagaucuaaaaaaaaaaaaaaaaaaaaaaaaaaaaaaaaaaaaaaaaaaaaaaaaaaaaaaaaaaaaaaaaugcaucccccccccccccccccccccccccccccccaaaggcucuuuucagagccaccagaauu

SEQ ID NO: 13587 - RNA, 1821 nt, Artificial Sequence
  mRNA product Design a-1 comprising derived and/or modified sequence from HRSV(Memphis-37)__AIY60640.1__F-del_DSCav1_mut0 (opt11)
gggagagucccgcagucggcguccagcggcucugcuuguucgugugugugucguugcaggccuuauucaagcuuaccauggaacuaccaauccucaaaaccaacgccaucacuacaauccuagccgcgguaacccugugcuucgccuccucacaaaacaucacagaagaauuuuaccaaucaaccugcuccgccguauccaaaggauaccugagcgcccugagaaccggcugguacaccuccgucaucaccauagaacucuccaacaucaaagaaaacaaaugcaacgguacggacgccaaaguuaaacucaucaaacaagaacuugacaaauacaagaacgccgucacagaacugcaacuccucaugcaauccacccccgccgccggcuccggcuccgccauagccuccggcaucgccgucugcaaagucuuacaccuagaaggcgaagucaacaaaaucaaaaacgcacuacuuuccacaaacaaagccgucgucucacucuccaacggcguauccguccucaccuucaaaguacuugaccucaaaaacuacaucgacaaacaacuacuccccauccugaacaaacaauccugcucaaucuccaacaucgaaaccguaaucgaguuccaacagaaaaauaaucgccuccuggagaucacccgcgaguucuccgucaaugcaggagucacaaccccaguaucaaccuacaugcucaccaacuccgaacuccugucgcucaucaacgacaugcccaucacaaacgaccaaaagaaacucauguccaacaacguacaaaucgucagacaacaauccuauucuauaaugugcaucaucaaagaagaaguccucgccuacgucguacaacucccccucuacggcguuaucgacacccccugcuggaaacuccacaccucaccccucugcaccaccaacacaaaagaaggcuccaacaucugccucacucggaccgaccgcggcugguacugcgacaaugccggcagcgucuccuucuucccacaagccgaaaccugcaaaguccaguccaaccgcguauucugcgacacuaugaacuccagaacccuccccuccgaaguaaaccucugcaacaucgacaucuucaacccaaaauacgacugcaaaaucaugaccucaaaaaccgacgucagcucgucagucauaaccagccucggagccauagucucaugcuacggaaaaaccaaaugcaccgccagcaacaaaaaccgcggcauaauaaaaacauucuccaacggcugcgacuauguauccaacaaaggagucgauaccgucuccguaggcaacacccuauacuacgucaacaaacaagaaggcaaaucccucuacgucaaaggugaaccaaucaucaacuucuacgacccucucgucuuccccuccgaugaguucgacgccucaaucagccaaguaaacgaaaagauaaaccaaucacucgccuucauccgcaaauccgacgaacuucuucacaacgucaacgucggcaaaucuaccaccaacauaaugauaaccaccaucaucaucgucaucaucguaauacuccuccuucucaucgccgucggccuauuccuauacugcaaagcccgcuagggacuagucccuguucccagagcccacuuuuuuuucuuuuuuugaaauaaaauagccugucuuucagaucuaaaaaaaaaaaaaaaaaaaaaaaaaaaaaaaaaaaaaaaaaaaaaaaaaaaaaaaaaaaaaaaaugcaucccccccccccccccccccccccccccccccaaaggcucuuuucagagccaccagaauu

SEQ ID NO: 13588 - RNA, 1840 nt, Artificial Sequence
  mRNA product Design a-2 comprising derived and/or modified sequence from HRSV(Memphis-37)__AIY60640.1__F-del_DSCav1_mut0 (opt1)
gggagaguccgcucagccagguugcagaagcggcuuagcguguguccuaaucuucucucugcguguagguaggccugugccgcaaacaagcuuaccauggagcugcccauccucaagaccaacgccaucaccacgauccuggccgcggugacccugugcuucgccagcucccagaacaucaccgaggaguucuaccagagcacgugcuccgccgucagcaagggcuaccucuccgcccugcgcaccgggugguacaccagcgugaucaccaucgagcuguccaacaucaaggagaacaagugcaacggcaccgacgccaaggugaagcucaucaagcaggagcuggacaaguacaagaacgcggucacggagcugcagcuccugaugcagagcaccccggccgccggcuccgggagcgcgaucgccuccggcaucgccgucugcaaggugcugcaccucgagggcgaggugaacaagaucaagaacgcccugcuguccaccaacaaggccgucgugagccucuccaacggggugagcguccugaccuucaaggugcuggaccucaagaacuacaucgacaagcagcugcugcccauccugaacaagcagagcugcuccaucagcaacaucgagaccgucaucgaguuccagcagaagaacaaccgccuccuggagaucacgcgggaguucagcgugaacgcgggcgugaccacccccgucuccaccuacaugcugacgaacagcgagcuccugucccugaucaacgacaugccgaucaccaacgaccagaagaagcucaugagcaacaacgugcagaucgugcgccagcaguccuacagcaucaugugcaucaucaaggaggagguccuggccuacguggugcagcugccccucuacggggucaucgacacccccugcuggaagcugcacaccagcccccugugcacgaccaacaccaaggagggcuccaacaucugccucacccggacggaccgcgggugguacugcgacaacgccggcagcguguccuucuucccgcaggccgagaccugcaagguccagagcaaccggguguucugcgacaccaugaacucccggacccugcccagcgaggugaaccucugcaacaucgacaucuucaaccccaaguacgacugcaagaucaugacguccaagaccgacgucagcuccagcgugaucaccucccugggcgccaucgugagcugcuacgggaagaccaagugcacggcgagcaacaagaaccgcggcaucaucaagaccuucuccaacgggugcgacuacgucagcaacaagggcguggacaccguguccgucggcaacacccuguacuacgugaacaagcaggagggcaagagccucuacgugaagggggagcccaucaucaacuucuacgacccgcuggucuuccccuccgacgaguucgacgccagcaucucccaggugaacgagaagaucaaccagagccuggccuucauccggaaguccgacgagcuccugcacaacgugaacgucggcaagagcaccacgaacaucaugaucaccaccaucaucaucgugaucaucgugauccugcugcuccugaucgccgucgggcuguuccucuacugcaaggcccgcugaggacuagucccuguucccagagcccacuuuuuuuucuuuuuuugaaauaaaauagccugucuuucagaucuaaaaaaaaaaaaaaaaaaaaaaaaaaaaaaaaaaaaaaaaaaaaaaaaaaaaaaaaaaaaaaaaugcaucccccccccccccccccccccccccccccccaaaggcucuuuucagagccaccagaauu

SEQ ID NO: 13589 - RNA, 1840 nt, Artificial Sequence
  mRNA product Design a-2 comprising derived and/or modified sequence from HRSV(Memphis-37)__AIY60640.1__F-del_DSCav1_mut0 (opt1)
gggagaguccgcucagccagguugcagaagcggcuuagcguguguccuaaucuucucucugcguguagguaggccugugccgcaaacaagcuuaccauggagcugcccauccucaagaccaacgccaucaccacgauccuggccgcggugacccugugcuucgccagcucccagaacaucaccgaggaguucuaccagagcacgugcuccgccgucagcaagggcuaccucuccgcccugcgcaccgggugguacaccagcgugaucaccaucgagcuguccaacaucaaggagaacaagugcaacggcaccgacgccaaggugaagcucaucaagcaggagcuggacaaguacaagaacgcggucacggagcugcagcuccugaugcagagcaccccggccgccggguccggcagcgccaucgcguccgggaucgccgugugcaaggugcugcaccucgagggcgaggucaacaagaucaagaacgcccugcugagcaccaacaaggccguggugucccucagcaacggcgucuccgugcugaccuucaaggugcuggaccucaagaacuacaucgacaagcagcugcugcccauccucaacaagcagagcugcuccaucagcaacaucgagacggucaucgaguuccagcagaagaacaaccggcugcuggagaucacccgcgaguucuccgugaacgccggggugaccacccccgucagcacguacaugcucaccaacagcgagcugcugucccucaucaacgacaugcccaucaccaacgaccagaagaagcugaugagcaacaacgugcagaucgugcggcagcaguccuacagcaucaugugcaucaucaaggaggagguccuggcguacguggugcagcucccgcuguacggcgucaucgacacccccugcuggaagcugcacacgagcccccucugcaccaccaacaccaaggagggguccaacaucugccugacgcgcaccgaccggggcugguacugcgacaacgccggguccgugagcuucuucccccaggccgagaccugcaaggugcaguccaaccgcgucuucugcgacaccaugaacagccggacgcucccguccgaggugaaccugugcaacaucgacaucuucaaccccaaguacgacugcaagaucaugaccagcaagaccgacgucuccagcuccgugaucaccagccugggcgccaucguguccugcuacggcaagacgaagugcaccgccagcaacaagaaccgggggaucaucaagaccuucuccaacggcugcgacuacgucagcaacaaggggguggacaccgugagcgucggcaacacgcucuacuacgugaacaagcaggagggcaagucccuguacgugaagggggagcccaucaucaacuucuacgacccccuggucuucccgagcgacgaguucgacgcguccaucagccaggugaacgagaagaucaaccagucccucgccuucauccgcaagagcgacgagcugcugcacaacgugaacgucggcaaguccaccaccaacaucaugaucaccaccaucaucaucgugaucaucgugauccuccugcugcucaucgccgucgggcuguuccuguacugcaaggcccggugaggacuagucccuguucccagagcccacuuuuuuuucuuuuuuugaaauaaaauagccugucuuucagaucuaaaaaaaaaaaaaaaaaaaaaaaaaaaaaaaaaaaaaaaaaaaaaaaaaaaaaaaaaaaaaaaaugcaucccccccccccccccccccccccccccccccaaaggcucuuuucagagccaccagaauu

SEQ ID NO: 13590 - RNA, 1840 nt, Artificial Sequence
  mRNA product Design a-2 comprising derived and/or modified sequence from HRSV(Memphis-37)__AIY60640.1__F-del_DSCav1_mut0 (opt2)
gggagaguccgcucagccagguugcagaagcggcuuagcguguguccuaaucuucucucugcguguagguaggccugugccgcaaacaagcuuaccauggagcuccccauccucaagaccaacgccaucaccaccauccucgccgccgucacccucugcuucgccuccucccagaacaucaccgaggaguucuaccaguccaccugcuccgccgucuccaagggcuaccucuccgcccuccgcaccggcugguacaccuccgucaucaccaucgagcucuccaacaucaaggagaacaagugcaacggcaccgacgccaaggucaagcucaucaagcaggagcucgacaaguacaagaacgccgucaccgagcuccagcuccucaugcaguccacccccgccgccggcuccggcuccgccaucgccuccggcaucgccgucugcaagguccuccaccucgagggcgaggucaacaagaucaagaacgcccuccucuccaccaacaaggccgucgucucccucuccaacggcgucuccguccucaccuucaagguccucgaccucaagaacuacaucgacaagcagcuccuccccauccucaacaagcaguccugcuccaucuccaacaucgagaccgucaucgaguuccagcagaagaacaaccgccuccucgagaucacccgcgaguucuccgucaacgccggcgucaccacccccgucuccaccuacaugcucaccaacuccgagcuccucucccucaucaacgacaugcccaucaccaacgaccagaagaagcucauguccaacaacguccagaucguccgccagcaguccuacuccaucaugugcaucaucaaggaggagguccucgccuacgucguccagcucccccucuacggcgucaucgacacccccugcuggaagcuccacaccuccccccucugcaccaccaacaccaaggagggcuccaacaucugccucacccgcaccgaccgcggcugguacugcgacaacgccggcuccgucuccuucuucccccaggccgagaccugcaagguccaguccaaccgcgucuucugcgacaccaugaacucccgcacccuccccuccgaggucaaccucugcaacaucgacaucuucaaccccaaguacgacugcaagaucaugaccuccaagaccgacgucuccuccuccgucaucaccucccucggcgccaucgucuccugcuacggcaagaccaagugcaccgccuccaacaagaaccgcggcaucaucaagaccuucuccaacggcugcgacuacgucuccaacaagggcgucgacaccgucuccgucggcaacacccucuacuacgucaacaagcaggagggcaagucccucuacgucaagggcgagcccaucaucaacuucuacgacccccucgucuuccccuccgacgaguucgacgccuccaucucccaggucaacgagaagaucaaccagucccucgccuucauccgcaaguccgacgagcuccuccacaacgucaacgucggcaaguccaccaccaacaucaugaucaccaccaucaucaucgucaucaucgucauccuccuccuccucaucgccgucggccucuuccucuacugcaaggcccgcugaggacuagucccuguucccagagcccacuuuuuuuucuuuuuuugaaauaaaauagccugucuuucagaucuaaaaaaaaaaaaaaaaaaaaaaaaaaaaaaaaaaaaaaaaaaaaaaaaaaaaaaaaaaaaaaaaugcaucccccccccccccccccccccccccccccccaaaggcucuuuucagagccaccagaauu

SEQ ID NO: 13591 - RNA, 1840 nt, Artificial Sequence
  mRNA product Design a-2 comprising derived and/or modified sequence from HRSV(Memphis-37)__AIY60640.1__F-del_DSCav1_mut0 (opt3)
gggagaguccgcucagccagguugcagaagcggcuuagcguguguccuaaucuucucucugcguguagguaggccugugccgcaaacaagcuuaccauggagcugcccauccucaagaccaacgccauuacaacuauacuugcugcagugacgcugugcuucgccagcucccagaauaucaccgaagaguuuuaccaaucuacauguucagcggucaguaaaggcuauuugagcgcuuuaagaacugggugguacaccuccguuauuacaaucgaacugucuaacauuaaggagaauaaaugcaacggaaccgacgccaaggugaaacuaaucaagcaggaacucgauaaguauaaaaaugcaguaacugagcugcagcuucugaugcagucgaccccugccgcugguucaggcagcgcaauagccagugggaucgcuguguguaaggucuugcaccucgagggagaagugaacaaaauuaagaaugcccugcuguccacaaacaaagcgguugugucucucagcaauggcgucuccguguuaacguucaagguacuggaccuuaagaacuacaucgauaaacaauugcugccaauucuaaauaagcagucaugcaguaucagcaacauagagacuguuauugaauuucagcagaaaaauaacaggcuccuggagaucacccgggaguucucugugaaugccggugucacaacuccgguguccaccuauaugcuuacaaacucagaacuguugagccucauuaacgacaugcccaucaccaaugaucaaaagaaacugaugaguaacaaugugcagaucguccgccagcagucuuacuccauuauguguauaaucaaggaggaaguuuuagcauaugugguacaacugccucucuacggggugauugacacgccaugcuggaaacuucauacuagcccccuguguacaaccaacacuaaggagggaucgaauaucugcuugacacgaaccgaucguggcugguacugugacaacgcuggcucugucuccuuuuucccucaggccgaaacgugcaaggugcagucaaauagaguguuuugugauaccaugaacaguagaacacugccaagcgaggugaaucucugcaacauagacauuuucaaucccaaauaugauugcaagaucaugacuuccaaaaccgacgucucuagcucagugaucacaagucugggggcaauuguauccuguuacggaaagacuaaaugcaccgcuagcaacaagaauagggguaucauuaagacauuuucuaacggcugugauuauguuucaaauaaagggguggacaccgucagugugggaaacacucuuuacuaugucaacaagcaagagggcaaaagccuguacgugaagggugaaccuauaaucaauuucuaugacccauugguuuuuccguccgaugaguucgacgccucuauuucgcagguuaacgagaaaaucaaucagagccucgcguuuauccggaaguccgaugaacuguuacacaacguaaaugucgggaagucaacgacaaacauuaugauaaccacuaucauuaucgugauuaucguuauacugcuacuccugaucgccgugggacuuuucuuguacugcaaagcacgcugaggacuagucccuguucccagagcccacuuuuuuuucuuuuuuugaaauaaaauagccugucuuucagaucuaaaaaaaaaaaaaaaaaaaaaaaaaaaaaaaaaaaaaaaaaaaaaaaaaaaaaaaaaaaaaaaaugcaucccccccccccccccccccccccccccccccaaaggcucuuuucagagccaccagaauu

SEQ ID NO: 13592 - RNA, 1840 nt, Artificial Sequence
  mRNA product Design a-2 comprising derived and/or modified sequence from HRSV(Memphis-37)__AIY60640.1__F-del_DSCav1_mut0 (opt4)
gggagaguccgcucagccagguugcagaagcggcuuagcguguguccuaaucuucucucugcguguagguaggccugugccgcaaacaagcuuaccauggagcugcccauccugaagaccaacgccaucaccaccauccuggccgccgugacccugugcuucgccagcagccagaacaucaccgaggaguucuaccagagcaccugcagcgccgugagcaagggcuaccugagcgcccugagaaccggcugguacaccagcgugaucaccaucgagcugagcaacaucaaggagaacaagugcaacggcaccgacgccaaggugaagcugaucaagcaggagcuggacaaguacaagaacgccgugaccgagcugcagcugcugaugcagagcacccccgccgccggcagcggcagcgccaucgccagcggcaucgccgugugcaaggugcugcaccuggagggcgaggugaacaagaucaagaacgcccugcugagcaccaacaaggccguggugagccugagcaacggcgugagcgugcugaccuucaaggugcuggaccugaagaacuacaucgacaagcagcugcugcccauccugaacaagcagagcugcagcaucagcaacaucgagaccgugaucgaguuccagcagaagaacaacagacugcuggagaucaccagagaguucagcgugaacgccggcgugaccacccccgugagcaccuacaugcugaccaacagcgagcugcugagccugaucaacgacaugcccaucaccaacgaccagaagaagcugaugagcaacaacgugcagaucgugagacagcagagcuacagcaucaugugcaucaucaaggaggaggugcuggccuacguggugcagcugccccuguacggcgugaucgacacccccugcuggaagcugcacaccagcccccugugcaccaccaacaccaaggagggcagcaacaucugccugaccagaaccgacagaggcugguacugcgacaacgccggcagcgugagcuucuucccccaggccgagaccugcaaggugcagagcaacagaguguucugcgacaccaugaacagcagaacccugcccagcgaggugaaccugugcaacaucgacaucuucaaccccaaguacgacugcaagaucaugaccagcaagaccgacgugagcagcagcgugaucaccagccugggcgccaucgugagcugcuacggcaagaccaagugcaccgccagcaacaagaacagaggcaucaucaagaccuucagcaacggcugcgacuacgugagcaacaagggcguggacaccgugagcgugggcaacacccuguacuacgugaacaagcaggagggcaagagccuguacgugaagggcgagcccaucaucaacuucuacgacccccugguguuccccagcgacgaguucgacgccagcaucagccaggugaacgagaagaucaaccagagccuggccuucaucagaaagagcgacgagcugcugcacaacgugaacgugggcaagagcaccaccaacaucaugaucaccaccaucaucaucgugaucaucgugauccugcugcugcugaucgccgugggccuguuccuguacugcaaggccagaugaggacuagucccuguucccagagcccacuuuuuuuucuuuuuuugaaauaaaauagccugucuuucagaucuaaaaaaaaaaaaaaaaaaaaaaaaaaaaaaaaaaaaaaaaaaaaaaaaaaaaaaaaaaaaaaaaugcaucccccccccccccccccccccccccccccccaaaggcucuuuucagagccaccagaauu

SEQ ID NO: 13593 - RNA, 1840 nt, Artificial Sequence
  mRNA product Design a-2 comprising derived and/or modified sequence from HRSV(Memphis-37)__AIY60640.1__F-del_DSCav1_mut0 (opt5)
gggagaguccgcucagccagguugcagaagcggcuuagcguguguccuaaucuucucucugcguguagguaggccugugccgcaaacaagcuuaccauggagcugcccauccucaagaccaacgccauuacaacgauccuggcugccgugacccuuugcuucgcgagcucccagaauauuacagaagaguuuuaccaaucuaccuguagcgcugucuccaaaggcuaucugucugcccucagaacagggugguacaccagcguuaucacaauugaacuguccaacaucaaggagaauaaaugcaacggaaccgacgccaaggugaaacuuaucaagcaggaacuggauaaguauaaaaaugcugugacggagcuccagcugcugaugcagucuaccccugccgcuggcagcggguccgccauugcgagcggaaucgccgucuguaaggugcuccaccuggagggcgaaguuaacaaaauuaagaaugcccuucugucuacaaacaaagcuguggucucccucagcaauggggugucuguucugaccuucaaggugcuugaccugaagaacuacaucgauaaacaacuccugccgauucugaauaagcaguccugcagcaucucuaacauugagacagucaucgaauuucagcagaaaaauaaccggcuccuggagaucacccgcgaguucuccgugaaugcuggagugacgacacccgucagcaccuauaugcuuacaaacuccgaacugcucucucugauuaacgacaugccuaucaccaaugaucaaaagaaacuuaugagcaacaauguucagauugugagacagcaguccuacagcaucauguguauuaucaaggaggaagugcuggccuaugucgugcaacucccccuguacggcguuaucgacaccccuugcuggaaacugcauacaucuccccucuguacgaccaacacaaaggagggcuccaauauuugccugacccggacagaucgcgggugguacugugacaacgcgggaagcgugagcuuuuucccucaggccgaaaccugcaagguccagucuaauagaguguuuugugauacgaugaacuccagaacacugccgucugagguuaaucucugcaacaucgacauuuucaaucccaaauaugauugcaagaucaugaccagcaaaaccgacguguccagcucugucauuacaucccugggcgcuaucgugagcuguuacgggaagaccaaaugcacagccucuaacaagaaucggggaaucauuaagacguuuuccaacggcugugauuaugucagcaauaaagggguggacaccguuuccgugggaaacacacuuuacuaugucaacaagcaagagggcaaaucucuguacgugaagggcgaaccuaucauuaauuucuaugacccccucguuuuuccuagcgaugaguucgacgcuuccaucucucaggugaacgaaaagauuaaucagagccuggccuuuauccgcaaguccgaugagcugcuccacaacgucaauguggggaaaagcaccacaaacauuaugaucaccacgaucauuaucgugauuaucguuauucugcuucugcucaucgccgucggacuguuccuguacugcaaagcuagaugaggacuagucccuguucccagagcccacuuuuuuuucuuuuuuugaaauaaaauagccugucuuucagaucuaaaaaaaaaaaaaaaaaaaaaaaaaaaaaaaaaaaaaaaaaaaaaaaaaaaaaaaaaaaaaaaaugcaucccccccccccccccccccccccccccccccaaaggcucuuuucagagccaccagaauu

SEQ ID NO: 13594 - RNA, 1840 nt, Artificial Sequence
  mRNA product Design a-2 comprising derived and/or modified sequence from HRSV(Memphis-37)__AIY60640.1__F-del_DSCav1_mut0 (opt6)
gggagaguccgcucagccagguugcagaagcggcuuagcguguguccuaaucuucucucugcguguagguaggccugugccgcaaacaagcuuaccauggaacucccaauacuuaaaacaaacgcaaucacaacaauacuagcugcagucacacuaugcuucgccucaucacaaaauauaacagaagaauuuuaucaaucaacaugcuccgcaguaucaaaaggauaucucucugcauuacgaacagguugguacaccucgguaauaacaauagaauuaucaaacauaaaagaaaauaaaugcaauggaaccgaugccaaaguaaaacuaaucaaacaagaacuugacaaauacaaaaacgcaguaacagaacuacaacuauuaaugcaaucaacaccagcagcagguucaggcuccgcaaucgcuucaggaauagccguuuguaaaguacuacacuuagaaggagaaguaaauaaaauaaaaaacgccuuacuaucaacaaacaaagcaguagucucccuuuccaacggaguaucagucuuaacuuuuaaaguacucgacuuaaaaaauuacaucgacaaacaacuacuacccauucuaaauaaacaaucaugcucaauaucaaacaucgaaacaguaaucgaauuucaacaaaaaaauaauagauuacuagaaauaacacgagaauuuuccguaaaugccggaguaacgaccccagucucaacauacauguuaacaaacucagaauuacuaucacucauuaacgauaugccaauaacaaaugaccaaaaaaaacuaaugucaaacaacguccaaauaguacgacaacaaucauacucuaucauguguauaauaaaagaagaaguuuuagcauacguaguacaacuaccacuuuacggagucauagacaccccaugcuggaaacuacacacaucacccuuauguacaacaaacaccaaagaagggucuaacauaugucucacuagaacagaucgaggcugguacugcgacaacgcaggaucaguuagcuuuuucccucaagccgaaaccuguaaaguacaauccaaucgaguauuuugcgacacuaugaacucuagaaccuuacccuccgaaguaaaccuauguaacauagacauauuuaaucccaaauaugauugcaaaaucaugacauccaaaacagauguaucaagcucuguaauaaccucacuaggagcaauaguuucaugcuaugguaaaacaaaaugcaccgccucaaacaaaaauagagggauaaucaaaaccuucucaaauggaugcgacuacguaucaaauaaaggaguagacaccgucuccguaggaaacacacuauacuacguaaacaaacaagaaggaaaaucacuauacguaaaaggagaaccaaucauaaacuucuacgacccacuuguuuucccaucagaugaauuugaugccuccauaucacaaguaaacgaaaaaauaaaccaaucucuagccuucaucagaaaauccgacgaacuuuuacacaacguaaacguagguaaaucaacaaccaacaucaugauaacaacaauaauaauaguaauaauuguaauacuuuuacuacuuaucgccguaggccuauucuuauauuguaaagcaagaugaggacuagucccuguucccagagcccacuuuuuuuucuuuuuuugaaauaaaauagccugucuuucagaucuaaaaaaaaaaaaaaaaaaaaaaaaaaaaaaaaaaaaaaaaaaaaaaaaaaaaaaaaaaaaaaaaugcaucccccccccccccccccccccccccccccccaaaggcucuuuucagagccaccagaauu

SEQ ID NO: 13595 - RNA, 1840 nt, Artificial Sequence
  mRNA product Design a-2 comprising derived and/or modified sequence from HRSV(Memphis-37)__AIY60640.1__F-del_DSCav1_mut0 (opt11)
gggagaguccgcucagccagguugcagaagcggcuuagcguguguccuaaucuucucucugcguguagguaggccugugccgcaaacaagcuuaccauggaacuaccaauccucaaaaccaacgccaucacuacaauccuagccgcgguaacccugugcuucgccuccucacaaaacaucacagaagaauuuuaccaaucaaccugcuccgccguauccaaaggauaccugagcgcccugagaaccggcugguacaccuccgucaucaccauagaacucuccaacaucaaagaaaacaaaugcaacgguacggacgccaaaguuaaacucaucaaacaagaacuugacaaauacaagaacgccgucacagaacugcaacuccucaugcaauccacccccgccgccggcuccggcuccgccauagccuccggcaucgccgucugcaaagucuuacaccuagaaggcgaagucaacaaaaucaaaaacgcacuacuuuccacaaacaaagccgucgucucacucuccaacggcguauccguccucaccuucaaaguacuugaccucaaaaacuacaucgacaaacaacuacuccccauccugaacaaacaauccugcucaaucuccaacaucgaaaccguaaucgaguuccaacagaaaaauaaucgccuccuggagaucacccgcgaguucuccgucaaugcaggagucacaaccccaguaucaaccuacaugcucaccaacuccgaacuccugucgcucaucaacgacaugcccaucacaaacgaccaaaagaaacucauguccaacaacguacaaaucgucagacaacaauccuauucuauaaugugcaucaucaaagaagaaguccucgccuacgucguacaacucccccucuacggcguuaucgacacccccugcuggaaacuccacaccucaccccucugcaccaccaacacaaaagaaggcuccaacaucugccucacucggaccgaccgcggcugguacugcgacaaugccggcagcgucuccuucuucccacaagccgaaaccugcaaaguccaguccaaccgcguauucugcgacacuaugaacuccagaacccuccccuccgaaguaaaccucugcaacaucgacaucuucaacccaaaauacgacugcaaaaucaugaccucaaaaaccgacgucagcucgucagucauaaccagccucggagccauagucucaugcuacggaaaaaccaaaugcaccgccagcaacaaaaaccgcggcauaauaaaaacauucuccaacggcugcgacuauguauccaacaaaggagucgauaccgucuccguaggcaacacccuauacuacgucaacaaacaagaaggcaaaucccucuacgucaaaggugaaccaaucaucaacuucuacgacccucucgucuuccccuccgaugaguucgacgccucaaucagccaaguaaacgaaaagauaaaccaaucacucgccuucauccgcaaauccgacgaacuucuucacaacgucaacgucggcaaaucuaccaccaacauaaugauaaccaccaucaucaucgucaucaucguaauacuccuccuucucaucgccgucggccuauuccuauacugcaaagcccgcuagggacuagucccuguucccagagcccacuuuuuuuucuuuuuuugaaauaaaauagccugucuuucagaucuaaaaaaaaaaaaaaaaaaaaaaaaaaaaaaaaaaaaaaaaaaaaaaaaaaaaaaaaaaaaaaaaugcaucccccccccccccccccccccccccccccccaaaggcucuuuucagagccaccagaauu

SEQ ID NO: 13596 - RNA, 1918 nt, Artificial Sequence
  mRNA product Design a-3 comprising derived and/or modified sequence from HRSV(Memphis-37)__AIY60640.1__F-del_DSCav1_mut0 (opt1)
gggagagggcgcuuggcuugcaaggacccugagcugcggcauugaagcacacccaacccaacucgacugaagucagccucacugaaccggaucugagaaucuucucucucugggcuugccagggcucuccgaaccuagcuagcauccucuucaauuccaacuagaaagcuuaccauggagcugcccauccucaagaccaacgccaucaccacgauccuggccgcggugacccugugcuucgccagcucccagaacaucaccgaggaguucuaccagagcacgugcuccgccgucagcaagggcuaccucuccgcccugcgcaccgggugguacaccagcgugaucaccaucgagcuguccaacaucaaggagaacaagugcaacggcaccgacgccaaggugaagcucaucaagcaggagcuggacaaguacaagaacgcggucacggagcugcagcuccugaugcagagcaccccggccgccggcuccgggagcgcgaucgccuccggcaucgccgucugcaaggugcugcaccucgagggcgaggugaacaagaucaagaacgcccugcuguccaccaacaaggccgucgugagccucuccaacggggugagcguccugaccuucaaggugcuggaccucaagaacuacaucgacaagcagcugcugcccauccugaacaagcagagcugcuccaucagcaacaucgagaccgucaucgaguuccagcagaagaacaaccgccuccuggagaucacgcgggaguucagcgugaacgcgggcgugaccacccccgucuccaccuacaugcugacgaacagcgagcuccugucccugaucaacgacaugccgaucaccaacgaccagaagaagcucaugagcaacaacgugcagaucgugcgccagcaguccuacagcaucaugugcaucaucaaggaggagguccuggccuacguggugcagcugccccucuacggggucaucgacacccccugcuggaagcugcacaccagcccccugugcacgaccaacaccaaggagggcuccaacaucugccucacccggacggaccgcgggugguacugcgacaacgccggcagcguguccuucuucccgcaggccgagaccugcaagguccagagcaaccggguguucugcgacaccaugaacucccggacccugcccagcgaggugaaccucugcaacaucgacaucuucaaccccaaguacgacugcaagaucaugacguccaagaccgacgucagcuccagcgugaucaccucccugggcgccaucgugagcugcuacgggaagaccaagugcacggcgagcaacaagaaccgcggcaucaucaagaccuucuccaacgggugcgacuacgucagcaacaagggcguggacaccguguccgucggcaacacccuguacuacgugaacaagcaggagggcaagagccucuacgugaagggggagcccaucaucaacuucuacgacccgcuggucuuccccuccgacgaguucgacgccagcaucucccaggugaacgagaagaucaaccagagccuggccuucauccggaaguccgacgagcuccugcacaacgugaacgucggcaagagcaccacgaacaucaugaucaccaccaucaucaucgugaucaucgugauccugcugcuccugaucgccgucgggcuguuccucuacugcaaggcccgcugaggacuagucccuguucccagagcccacuuuuuuuucuuuuuuugaaauaaaauagccugucuuucagaucuaaaaaaaaaaaaaaaaaaaaaaaaaaaaaaaaaaaaaaaaaaaaaaaaaaaaaaaaaaaaaaaaugcaucccccccccccccccccccccccccccccccaaaggcucuuuucagagccaccagaauu

SEQ ID NO: 13597 - RNA, 1918 nt, Artificial Sequence
  mRNA product Design a-3 comprising derived and/or modified sequence from HRSV(Memphis-37)__AIY60640.1__F-del_DSCav1_mut0 (opt1)
gggagagggcgcuuggcuugcaaggacccugagcugcggcauugaagcacacccaacccaacucgacugaagucagccucacugaaccggaucugagaaucuucucucucugggcuugccagggcucuccgaaccuagcuagcauccucuucaauuccaacuagaaagcuuaccauggagcugcccauccucaagaccaacgccaucaccacgauccuggccgcggugacccugugcuucgccagcucccagaacaucaccgaggaguucuaccagagcacgugcuccgccgucagcaagggcuaccucuccgcccugcgcaccgggugguacaccagcgugaucaccaucgagcuguccaacaucaaggagaacaagugcaacggcaccgacgccaaggugaagcucaucaagcaggagcuggacaaguacaagaacgcggucacggagcugcagcuccugaugcagagcaccccggccgccggguccggcagcgccaucgcguccgggaucgccgugugcaaggugcugcaccucgagggcgaggucaacaagaucaagaacgcccugcugagcaccaacaaggccguggugucccucagcaacggcgucuccgugcugaccuucaaggugcuggaccucaagaacuacaucgacaagcagcugcugcccauccucaacaagcagagcugcuccaucagcaacaucgagacggucaucgaguuccagcagaagaacaaccggcugcuggagaucacccgcgaguucuccgugaacgccggggugaccacccccgucagcacguacaugcucaccaacagcgagcugcugucccucaucaacgacaugcccaucaccaacgaccagaagaagcugaugagcaacaacgugcagaucgugcggcagcaguccuacagcaucaugugcaucaucaaggaggagguccuggcguacguggugcagcucccgcuguacggcgucaucgacacccccugcuggaagcugcacacgagcccccucugcaccaccaacaccaaggagggguccaacaucugccugacgcgcaccgaccggggcugguacugcgacaacgccggguccgugagcuucuucccccaggccgagaccugcaaggugcaguccaaccgcgucuucugcgacaccaugaacagccggacgcucccguccgaggugaaccugugcaacaucgacaucuucaaccccaaguacgacugcaagaucaugaccagcaagaccgacgucuccagcuccgugaucaccagccugggcgccaucguguccugcuacggcaagacgaagugcaccgccagcaacaagaaccgggggaucaucaagaccuucuccaacggcugcgacuacgucagcaacaaggggguggacaccgugagcgucggcaacacgcucuacuacgugaacaagcaggagggcaagucccuguacgugaagggggagcccaucaucaacuucuacgacccccuggucuucccgagcgacgaguucgacgcguccaucagccaggugaacgagaagaucaaccagucccucgccuucauccgcaagagcgacgagcugcugcacaacgugaacgucggcaaguccaccaccaacaucaugaucaccaccaucaucaucgugaucaucgugauccuccugcugcucaucgccgucgggcuguuccuguacugcaaggcccggugaggacuagucccuguucccagagcccacuuuuuuuucuuuuuuugaaauaaaauagccugucuuucagaucuaaaaaaaaaaaaaaaaaaaaaaaaaaaaaaaaaaaaaaaaaaaaaaaaaaaaaaaaaaaaaaaaugcaucccccccccccccccccccccccccccccccaaaggcucuuuucagagccaccagaauu

SEQ ID NO: 13598 - RNA, 1918 nt, Artificial Sequence
  mRNA product Design a-3 comprising derived and/or modified sequence from HRSV(Memphis-37)__AIY60640.1__F-del_DSCav1_mut0 (opt2)
gggagagggcgcuuggcuugcaaggacccugagcugcggcauugaagcacacccaacccaacucgacugaagucagccucacugaaccggaucugagaaucuucucucucugggcuugccagggcucuccgaaccuagcuagcauccucuucaauuccaacuagaaagcuuaccauggagcuccccauccucaagaccaacgccaucaccaccauccucgccgccgucacccucugcuucgccuccucccagaacaucaccgaggaguucuaccaguccaccugcuccgccgucuccaagggcuaccucuccgcccuccgcaccggcugguacaccuccgucaucaccaucgagcucuccaacaucaaggagaacaagugcaacggcaccgacgccaaggucaagcucaucaagcaggagcucgacaaguacaagaacgccgucaccgagcuccagcuccucaugcaguccacccccgccgccggcuccggcuccgccaucgccuccggcaucgccgucugcaagguccuccaccucgagggcgaggucaacaagaucaagaacgcccuccucuccaccaacaaggccgucgucucccucuccaacggcgucuccguccucaccuucaagguccucgaccucaagaacuacaucgacaagcagcuccuccccauccucaacaagcaguccugcuccaucuccaacaucgagaccgucaucgaguuccagcagaagaacaaccgccuccucgagaucacccgcgaguucuccgucaacgccggcgucaccacccccgucuccaccuacaugcucaccaacuccgagcuccucucccucaucaacgacaugcccaucaccaacgaccagaagaagcucauguccaacaacguccagaucguccgccagcaguccuacuccaucaugugcaucaucaaggaggagguccucgccuacgucguccagcucccccucuacggcgucaucgacacccccugcuggaagcuccacaccuccccccucugcaccaccaacaccaaggagggcuccaacaucugccucacccgcaccgaccgcggcugguacugcgacaacgccggcuccgucuccuucuucccccaggccgagaccugcaagguccaguccaaccgcgucuucugcgacaccaugaacucccgcacccuccccuccgaggucaaccucugcaacaucgacaucuucaaccccaaguacgacugcaagaucaugaccuccaagaccgacgucuccuccuccgucaucaccucccucggcgccaucgucuccugcuacggcaagaccaagugcaccgccuccaacaagaaccgcggcaucaucaagaccuucuccaacggcugcgacuacgucuccaacaagggcgucgacaccgucuccgucggcaacacccucuacuacgucaacaagcaggagggcaagucccucuacgucaagggcgagcccaucaucaacuucuacgacccccucgucuuccccuccgacgaguucgacgccuccaucucccaggucaacgagaagaucaaccagucccucgccuucauccgcaaguccgacgagcuccuccacaacgucaacgucggcaaguccaccaccaacaucaugaucaccaccaucaucaucgucaucaucgucauccuccuccuccucaucgccgucggccucuuccucuacugcaaggcccgcugaggacuagucccuguucccagagcccacuuuuuuuucuuuuuuugaaauaaaauagccugucuuucagaucuaaaaaaaaaaaaaaaaaaaaaaaaaaaaaaaaaaaaaaaaaaaaaaaaaaaaaaaaaaaaaaaaugcaucccccccccccccccccccccccccccccccaaaggcucuuuucagagccaccagaauu

SEQ ID NO: 13599 - RNA, 1918 nt, Artificial Sequence
  mRNA product Design a-3 comprising derived and/or modified sequence from HRSV(Memphis-37)__AIY60640.1__F-del_DSCav1_mut0 (opt3)
gggagagggcgcuuggcuugcaaggacccugagcugcggcauugaagcacacccaacccaacucgacugaagucagccucacugaaccggaucugagaaucuucucucucugggcuugccagggcucuccgaaccuagcuagcauccucuucaauuccaacuagaaagcuuaccauggagcugcccauccucaagaccaacgccauuacaacuauacuugcugcagugacgcugugcuucgccagcucccagaauaucaccgaagaguuuuaccaaucuacauguucagcggucaguaaaggcuauuugagcgcuuuaagaacugggugguacaccuccguuauuacaaucgaacugucuaacauuaaggagaauaaaugcaacggaaccgacgccaaggugaaacuaaucaagcaggaacucgauaaguauaaaaaugcaguaacugagcugcagcuucugaugcagucgaccccugccgcugguucaggcagcgcaauagccagugggaucgcuguguguaaggucuugcaccucgagggagaagugaacaaaauuaagaaugcccugcuguccacaaacaaagcgguugugucucucagcaauggcgucuccguguuaacguucaagguacuggaccuuaagaacuacaucgauaaacaauugcugccaauucuaaauaagcagucaugcaguaucagcaacauagagacuguuauugaauuucagcagaaaaauaacaggcuccuggagaucacccgggaguucucugugaaugccggugucacaacuccgguguccaccuauaugcuuacaaacucagaacuguugagccucauuaacgacaugcccaucaccaaugaucaaaagaaacugaugaguaacaaugugcagaucguccgccagcagucuuacuccauuauguguauaaucaaggaggaaguuuuagcauaugugguacaacugccucucuacggggugauugacacgccaugcuggaaacuucauacuagcccccuguguacaaccaacacuaaggagggaucgaauaucugcuugacacgaaccgaucguggcugguacugugacaacgcuggcucugucuccuuuuucccucaggccgaaacgugcaaggugcagucaaauagaguguuuugugauaccaugaacaguagaacacugccaagcgaggugaaucucugcaacauagacauuuucaaucccaaauaugauugcaagaucaugacuuccaaaaccgacgucucuagcucagugaucacaagucugggggcaauuguauccuguuacggaaagacuaaaugcaccgcuagcaacaagaauagggguaucauuaagacauuuucuaacggcugugauuauguuucaaauaaagggguggacaccgucagugugggaaacacucuuuacuaugucaacaagcaagagggcaaaagccuguacgugaagggugaaccuauaaucaauuucuaugacccauugguuuuuccguccgaugaguucgacgccucuauuucgcagguuaacgagaaaaucaaucagagccucgcguuuauccggaaguccgaugaacuguuacacaacguaaaugucgggaagucaacgacaaacauuaugauaaccacuaucauuaucgugauuaucguuauacugcuacuccugaucgccgugggacuuuucuuguacugcaaagcacgcugaggacuagucccuguucccagagcccacuuuuuuuucuuuuuuugaaauaaaauagccugucuuucagaucuaaaaaaaaaaaaaaaaaaaaaaaaaaaaaaaaaaaaaaaaaaaaaaaaaaaaaaaaaaaaaaaaugcaucccccccccccccccccccccccccccccccaaaggcucuuuucagagccaccagaauu

SEQ ID NO: 13600 - RNA, 1918 nt, Artificial Sequence
  mRNA product Design a-3 comprising derived and/or modified sequence from HRSV(Memphis-37)__AIY60640.1__F-del_DSCav1_mut0 (opt4)
gggagagggcgcuuggcuugcaaggacccugagcugcggcauugaagcacacccaacccaacucgacugaagucagccucacugaaccggaucugagaaucuucucucucugggcuugccagggcucuccgaaccuagcuagcauccucuucaauuccaacuagaaagcuuaccauggagcugcccauccugaagaccaacgccaucaccaccauccuggccgccgugacccugugcuucgccagcagccagaacaucaccgaggaguucuaccagagcaccugcagcgccgugagcaagggcuaccugagcgcccugagaaccggcugguacaccagcgugaucaccaucgagcugagcaacaucaaggagaacaagugcaacggcaccgacgccaaggugaagcugaucaagcaggagcuggacaaguacaagaacgccgugaccgagcugcagcugcugaugcagagcacccccgccgccggcagcggcagcgccaucgccagcggcaucgccgugugcaaggugcugcaccuggagggcgaggugaacaagaucaagaacgcccugcugagcaccaacaaggccguggugagccugagcaacggcgugagcgugcugaccuucaaggugcuggaccugaagaacuacaucgacaagcagcugcugcccauccugaacaagcagagcugcagcaucagcaacaucgagaccgugaucgaguuccagcagaagaacaacagacugcuggagaucaccagagaguucagcgugaacgccggcgugaccacccccgugagcaccuacaugcugaccaacagcgagcugcugagccugaucaacgacaugcccaucaccaacgaccagaagaagcugaugagcaacaacgugcagaucgugagacagcagagcuacagcaucaugugcaucaucaaggaggaggugcuggccuacguggugcagcugccccuguacggcgugaucgacacccccugcuggaagcugcacaccagcccccugugcaccaccaacaccaaggagggcagcaacaucugccugaccagaaccgacagaggcugguacugcgacaacgccggcagcgugagcuucuucccccaggccgagaccugcaaggugcagagcaacagaguguucugcgacaccaugaacagcagaacccugcccagcgaggugaaccugugcaacaucgacaucuucaaccccaaguacgacugcaagaucaugaccagcaagaccgacgugagcagcagcgugaucaccagccugggcgccaucgugagcugcuacggcaagaccaagugcaccgccagcaacaagaacagaggcaucaucaagaccuucagcaacggcugcgacuacgugagcaacaagggcguggacaccgugagcgugggcaacacccuguacuacgugaacaagcaggagggcaagagccuguacgugaagggcgagcccaucaucaacuucuacgacccccugguguuccccagcgacgaguucgacgccagcaucagccaggugaacgagaagaucaaccagagccuggccuucaucagaaagagcgacgagcugcugcacaacgugaacgugggcaagagcaccaccaacaucaugaucaccaccaucaucaucgugaucaucgugauccugcugcugcugaucgccgugggccuguuccuguacugcaaggccagaugaggacuagucccuguucccagagcccacuuuuuuuucuuuuuuugaaauaaaauagccugucuuucagaucuaaaaaaaaaaaaaaaaaaaaaaaaaaaaaaaaaaaaaaaaaaaaaaaaaaaaaaaaaaaaaaaaugcaucccccccccccccccccccccccccccccccaaaggcucuuuucagagccaccagaauu

SEQ ID NO: 13601 - RNA, 1918 nt, Artificial Sequence
  mRNA product Design a-3 comprising derived and/or modified sequence from HRSV(Memphis-37)__AIY60640.1__F-del_DSCav1_mut0 (opt5)
gggagagggcgcuuggcuugcaaggacccugagcugcggcauugaagcacacccaacccaacucgacugaagucagccucacugaaccggaucugagaaucuucucucucugggcuugccagggcucuccgaaccuagcuagcauccucuucaauuccaacuagaaagcuuaccauggagcugcccauccucaagaccaacgccauuacaacgauccuggcugccgugacccuuugcuucgcgagcucccagaauauuacagaagaguuuuaccaaucuaccuguagcgcugucuccaaaggcuaucugucugcccucagaacagggugguacaccagcguuaucacaauugaacuguccaacaucaaggagaauaaaugcaacggaaccgacgccaaggugaaacuuaucaagcaggaacuggauaaguauaaaaaugcugugacggagcuccagcugcugaugcagucuaccccugccgcuggcagcggguccgccauugcgagcggaaucgccgucuguaaggugcuccaccuggagggcgaaguuaacaaaauuaagaaugcccuucugucuacaaacaaagcuguggucucccucagcaauggggugucuguucugaccuucaaggugcuugaccugaagaacuacaucgauaaacaacuccugccgauucugaauaagcaguccugcagcaucucuaacauugagacagucaucgaauuucagcagaaaaauaaccggcuccuggagaucacccgcgaguucuccgugaaugcuggagugacgacacccgucagcaccuauaugcuuacaaacuccgaacugcucucucugauuaacgacaugccuaucaccaaugaucaaaagaaacuuaugagcaacaauguucagauugugagacagcaguccuacagcaucauguguauuaucaaggaggaagugcuggccuaugucgugcaacucccccuguacggcguuaucgacaccccuugcuggaaacugcauacaucuccccucuguacgaccaacacaaaggagggcuccaauauuugccugacccggacagaucgcgggugguacugugacaacgcgggaagcgugagcuuuuucccucaggccgaaaccugcaagguccagucuaauagaguguuuugugauacgaugaacuccagaacacugccgucugagguuaaucucugcaacaucgacauuuucaaucccaaauaugauugcaagaucaugaccagcaaaaccgacguguccagcucugucauuacaucccugggcgcuaucgugagcuguuacgggaagaccaaaugcacagccucuaacaagaaucggggaaucauuaagacguuuuccaacggcugugauuaugucagcaauaaagggguggacaccguuuccgugggaaacacacuuuacuaugucaacaagcaagagggcaaaucucuguacgugaagggcgaaccuaucauuaauuucuaugacccccucguuuuuccuagcgaugaguucgacgcuuccaucucucaggugaacgaaaagauuaaucagagccuggccuuuauccgcaaguccgaugagcugcuccacaacgucaauguggggaaaagcaccacaaacauuaugaucaccacgaucauuaucgugauuaucguuauucugcuucugcucaucgccgucggacuguuccuguacugcaaagcuagaugaggacuagucccuguucccagagcccacuuuuuuuucuuuuuuugaaauaaaauagccugucuuucagaucuaaaaaaaaaaaaaaaaaaaaaaaaaaaaaaaaaaaaaaaaaaaaaaaaaaaaaaaaaaaaaaaaugcaucccccccccccccccccccccccccccccccaaaggcucuuuucagagccaccagaauu

SEQ ID NO: 13602 - RNA, 1918 nt, Artificial Sequence
  mRNA product Design a-3 comprising derived and/or modified sequence from HRSV(Memphis-37)__AIY60640.1__F-del_DSCav1_mut0 (opt6)
gggagagggcgcuuggcuugcaaggacccugagcugcggcauugaagcacacccaacccaacucgacugaagucagccucacugaaccggaucugagaaucuucucucucugggcuugccagggcucuccgaaccuagcuagcauccucuucaauuccaacuagaaagcuuaccauggaacucccaauacuuaaaacaaacgcaaucacaacaauacuagcugcagucacacuaugcuucgccucaucacaaaauauaacagaagaauuuuaucaaucaacaugcuccgcaguaucaaaaggauaucucucugcauuacgaacagguugguacaccucgguaauaacaauagaauuaucaaacauaaaagaaaauaaaugcaauggaaccgaugccaaaguaaaacuaaucaaacaagaacuugacaaauacaaaaacgcaguaacagaacuacaacuauuaaugcaaucaacaccagcagcagguucaggcuccgcaaucgcuucaggaauagccguuuguaaaguacuacacuuagaaggagaaguaaauaaaauaaaaaacgccuuacuaucaacaaacaaagcaguagucucccuuuccaacggaguaucagucuuaacuuuuaaaguacucgacuuaaaaaauuacaucgacaaacaacuacuacccauucuaaauaaacaaucaugcucaauaucaaacaucgaaacaguaaucgaauuucaacaaaaaaauaauagauuacuagaaauaacacgagaauuuuccguaaaugccggaguaacgaccccagucucaacauacauguuaacaaacucagaauuacuaucacucauuaacgauaugccaauaacaaaugaccaaaaaaaacuaaugucaaacaacguccaaauaguacgacaacaaucauacucuaucauguguauaauaaaagaagaaguuuuagcauacguaguacaacuaccacuuuacggagucauagacaccccaugcuggaaacuacacacaucacccuuauguacaacaaacaccaaagaagggucuaacauaugucucacuagaacagaucgaggcugguacugcgacaacgcaggaucaguuagcuuuuucccucaagccgaaaccuguaaaguacaauccaaucgaguauuuugcgacacuaugaacucuagaaccuuacccuccgaaguaaaccuauguaacauagacauauuuaaucccaaauaugauugcaaaaucaugacauccaaaacagauguaucaagcucuguaauaaccucacuaggagcaauaguuucaugcuaugguaaaacaaaaugcaccgccucaaacaaaaauagagggauaaucaaaaccuucucaaauggaugcgacuacguaucaaauaaaggaguagacaccgucuccguaggaaacacacuauacuacguaaacaaacaagaaggaaaaucacuauacguaaaaggagaaccaaucauaaacuucuacgacccacuuguuuucccaucagaugaauuugaugccuccauaucacaaguaaacgaaaaaauaaaccaaucucuagccuucaucagaaaauccgacgaacuuuuacacaacguaaacguagguaaaucaacaaccaacaucaugauaacaacaauaauaauaguaauaauuguaauacuuuuacuacuuaucgccguaggccuauucuuauauuguaaagcaagaugaggacuagucccuguucccagagcccacuuuuuuuucuuuuuuugaaauaaaauagccugucuuucagaucuaaaaaaaaaaaaaaaaaaaaaaaaaaaaaaaaaaaaaaaaaaaaaaaaaaaaaaaaaaaaaaaaugcaucccccccccccccccccccccccccccccccaaaggcucuuuucagagccaccagaauu

SEQ ID NO: 13603 - RNA, 1918 nt, Artificial Sequence
  mRNA product Design a-3 comprising derived and/or modified sequence from HRSV(Memphis-37)__AIY60640.1__F-del_DSCav1_mut0 (opt11)
gggagagggcgcuuggcuugcaaggacccugagcugcggcauugaagcacacccaacccaacucgacugaagucagccucacugaaccggaucugagaaucuucucucucugggcuugccagggcucuccgaaccuagcuagcauccucuucaauuccaacuagaaagcuuaccauggaacuaccaauccucaaaaccaacgccaucacuacaauccuagccgcgguaacccugugcuucgccuccucacaaaacaucacagaagaauuuuaccaaucaaccugcuccgccguauccaaaggauaccugagcgcccugagaaccggcugguacaccuccgucaucaccauagaacucuccaacaucaaagaaaacaaaugcaacgguacggacgccaaaguuaaacucaucaaacaagaacuugacaaauacaagaacgccgucacagaacugcaacuccucaugcaauccacccccgccgccggcuccggcuccgccauagccuccggcaucgccgucugcaaagucuuacaccuagaaggcgaagucaacaaaaucaaaaacgcacuacuuuccacaaacaaagccgucgucucacucuccaacggcguauccguccucaccuucaaaguacuugaccucaaaaacuacaucgacaaacaacuacuccccauccugaacaaacaauccugcucaaucuccaacaucgaaaccguaaucgaguuccaacagaaaaauaaucgccuccuggagaucacccgcgaguucuccgucaaugcaggagucacaaccccaguaucaaccuacaugcucaccaacuccgaacuccugucgcucaucaacgacaugcccaucacaaacgaccaaaagaaacucauguccaacaacguacaaaucgucagacaacaauccuauucuauaaugugcaucaucaaagaagaaguccucgccuacgucguacaacucccccucuacggcguuaucgacacccccugcuggaaacuccacaccucaccccucugcaccaccaacacaaaagaaggcuccaacaucugccucacucggaccgaccgcggcugguacugcgacaaugccggcagcgucuccuucuucccacaagccgaaaccugcaaaguccaguccaaccgcguauucugcgacacuaugaacuccagaacccuccccuccgaaguaaaccucugcaacaucgacaucuucaacccaaaauacgacugcaaaaucaugaccucaaaaaccgacgucagcucgucagucauaaccagccucggagccauagucucaugcuacggaaaaaccaaaugcaccgccagcaacaaaaaccgcggcauaauaaaaacauucuccaacggcugcgacuauguauccaacaaaggagucgauaccgucuccguaggcaacacccuauacuacgucaacaaacaagaaggcaaaucccucuacgucaaaggugaaccaaucaucaacuucuacgacccucucgucuuccccuccgaugaguucgacgccucaaucagccaaguaaacgaaaagauaaaccaaucacucgccuucauccgcaaauccgacgaacuucuucacaacgucaacgucggcaaaucuaccaccaacauaaugauaaccaccaucaucaucgucaucaucguaauacuccuccuucucaucgccgucggccuauuccuauacugcaaagcccgcuagggacuagucccuguucccagagcccacuuuuuuuucuuuuuuugaaauaaaauagccugucuuucagaucuaaaaaaaaaaaaaaaaaaaaaaaaaaaaaaaaaaaaaaaaaaaaaaaaaaaaaaaaaaaaaaaaugcaucccccccccccccccccccccccccccccccaaaggcucuuuucagagccaccagaauu

SEQ ID NO: 13604 - RNA, 1867 nt, Artificial Sequence
  mRNA product Design a-4 comprising derived and/or modified sequence from HRSV(Memphis-37)__AIY60640.1__F-del_DSCav1_mut0 (opt1)
gggagacuccugucgggcggaaguaggaggaguagaguuuaaaaacaguacucuuuuuccgguucgggacguaguugaagcaacgacaagccggauaaccgcucuugagacaggaagcuuaccauggagcugcccauccucaagaccaacgccaucaccacgauccuggccgcggugacccugugcuucgccagcucccagaacaucaccgaggaguucuaccagagcacgugcuccgccgucagcaagggcuaccucuccgcccugcgcaccgggugguacaccagcgugaucaccaucgagcuguccaacaucaaggagaacaagugcaacggcaccgacgccaaggugaagcucaucaagcaggagcuggacaaguacaagaacgcggucacggagcugcagcuccugaugcagagcaccccggccgccggcuccgggagcgcgaucgccuccggcaucgccgucugcaaggugcugcaccucgagggcgaggugaacaagaucaagaacgcccugcuguccaccaacaaggccgucgugagccucuccaacggggugagcguccugaccuucaaggugcuggaccucaagaacuacaucgacaagcagcugcugcccauccugaacaagcagagcugcuccaucagcaacaucgagaccgucaucgaguuccagcagaagaacaaccgccuccuggagaucacgcgggaguucagcgugaacgcgggcgugaccacccccgucuccaccuacaugcugacgaacagcgagcuccugucccugaucaacgacaugccgaucaccaacgaccagaagaagcucaugagcaacaacgugcagaucgugcgccagcaguccuacagcaucaugugcaucaucaaggaggagguccuggccuacguggugcagcugccccucuacggggucaucgacacccccugcuggaagcugcacaccagcccccugugcacgaccaacaccaaggagggcuccaacaucugccucacccggacggaccgcgggugguacugcgacaacgccggcagcguguccuucuucccgcaggccgagaccugcaagguccagagcaaccggguguucugcgacaccaugaacucccggacccugcccagcgaggugaaccucugcaacaucgacaucuucaaccccaaguacgacugcaagaucaugacguccaagaccgacgucagcuccagcgugaucaccucccugggcgccaucgugagcugcuacgggaagaccaagugcacggcgagcaacaagaaccgcggcaucaucaagaccuucuccaacgggugcgacuacgucagcaacaagggcguggacaccguguccgucggcaacacccuguacuacgugaacaagcaggagggcaagagccucuacgugaagggggagcccaucaucaacuucuacgacccgcuggucuuccccuccgacgaguucgacgccagcaucucccaggugaacgagaagaucaaccagagccuggccuucauccggaaguccgacgagcuccugcacaacgugaacgucggcaagagcaccacgaacaucaugaucaccaccaucaucaucgugaucaucgugauccugcugcuccugaucgccgucgggcuguuccucuacugcaaggcccgcugaggacuagucccuguucccagagcccacuuuuuuuucuuuuuuugaaauaaaauagccugucuuucagaucuaaaaaaaaaaaaaaaaaaaaaaaaaaaaaaaaaaaaaaaaaaaaaaaaaaaaaaaaaaaaaaaaugcaucccccccccccccccccccccccccccccccaaaggcucuuuucagagccaccagaauu

SEQ ID NO: 13605 - RNA, 1867 nt, Artificial Sequence
  mRNA product Design a-4 comprising derived and/or modified sequence from HRSV(Memphis-37)__AIY60640.1__F-del_DSCav1_mut0 (opt1)
gggagacuccugucgggcggaaguaggaggaguagaguuuaaaaacaguacucuuuuuccgguucgggacguaguugaagcaacgacaagccggauaaccgcucuugagacaggaagcuuaccauggagcugcccauccucaagaccaacgccaucaccacgauccuggccgcggugacccugugcuucgccagcucccagaacaucaccgaggaguucuaccagagcacgugcuccgccgucagcaagggcuaccucuccgcccugcgcaccgggugguacaccagcgugaucaccaucgagcuguccaacaucaaggagaacaagugcaacggcaccgacgccaaggugaagcucaucaagcaggagcuggacaaguacaagaacgcggucacggagcugcagcuccugaugcagagcaccccggccgccggguccggcagcgccaucgcguccgggaucgccgugugcaaggugcugcaccucgagggcgaggucaacaagaucaagaacgcccugcugagcaccaacaaggccguggugucccucagcaacggcgucuccgugcugaccuucaaggugcuggaccucaagaacuacaucgacaagcagcugcugcccauccucaacaagcagagcugcuccaucagcaacaucgagacggucaucgaguuccagcagaagaacaaccggcugcuggagaucacccgcgaguucuccgugaacgccggggugaccacccccgucagcacguacaugcucaccaacagcgagcugcugucccucaucaacgacaugcccaucaccaacgaccagaagaagcugaugagcaacaacgugcagaucgugcggcagcaguccuacagcaucaugugcaucaucaaggaggagguccuggcguacguggugcagcucccgcuguacggcgucaucgacacccccugcuggaagcugcacacgagcccccucugcaccaccaacaccaaggagggguccaacaucugccugacgcgcaccgaccggggcugguacugcgacaacgccggguccgugagcuucuucccccaggccgagaccugcaaggugcaguccaaccgcgucuucugcgacaccaugaacagccggacgcucccguccgaggugaaccugugcaacaucgacaucuucaaccccaaguacgacugcaagaucaugaccagcaagaccgacgucuccagcuccgugaucaccagccugggcgccaucguguccugcuacggcaagacgaagugcaccgccagcaacaagaaccgggggaucaucaagaccuucuccaacggcugcgacuacgucagcaacaaggggguggacaccgugagcgucggcaacacgcucuacuacgugaacaagcaggagggcaagucccuguacgugaagggggagcccaucaucaacuucuacgacccccuggucuucccgagcgacgaguucgacgcguccaucagccaggugaacgagaagaucaaccagucccucgccuucauccgcaagagcgacgagcugcugcacaacgugaacgucggcaaguccaccaccaacaucaugaucaccaccaucaucaucgugaucaucgugauccuccugcugcucaucgccgucgggcuguuccuguacugcaaggcccggugaggacuagucccuguucccagagcccacuuuuuuuucuuuuuuugaaauaaaauagccugucuuucagaucuaaaaaaaaaaaaaaaaaaaaaaaaaaaaaaaaaaaaaaaaaaaaaaaaaaaaaaaaaaaaaaaaugcaucccccccccccccccccccccccccccccccaaaggcucuuuucagagccaccagaauu

SEQ ID NO: 13606 - RNA, 1867 nt, Artificial Sequence
  mRNA product Design a-4 comprising derived and/or modified sequence from HRSV(Memphis-37)__AIY60640.1__F-del_DSCav1_mut0 (opt2)
gggagacuccugucgggcggaaguaggaggaguagaguuuaaaaacaguacucuuuuuccgguucgggacguaguugaagcaacgacaagccggauaaccgcucuugagacaggaagcuuaccauggagcuccccauccucaagaccaacgccaucaccaccauccucgccgccgucacccucugcuucgccuccucccagaacaucaccgaggaguucuaccaguccaccugcuccgccgucuccaagggcuaccucuccgcccuccgcaccggcugguacaccuccgucaucaccaucgagcucuccaacaucaaggagaacaagugcaacggcaccgacgccaaggucaagcucaucaagcaggagcucgacaaguacaagaacgccgucaccgagcuccagcuccucaugcaguccacccccgccgccggcuccggcuccgccaucgccuccggcaucgccgucugcaagguccuccaccucgagggcgaggucaacaagaucaagaacgcccuccucuccaccaacaaggccgucgucucccucuccaacggcgucuccguccucaccuucaagguccucgaccucaagaacuacaucgacaagcagcuccuccccauccucaacaagcaguccugcuccaucuccaacaucgagaccgucaucgaguuccagcagaagaacaaccgccuccucgagaucacccgcgaguucuccgucaacgccggcgucaccacccccgucuccaccuacaugcucaccaacuccgagcuccucucccucaucaacgacaugcccaucaccaacgaccagaagaagcucauguccaacaacguccagaucguccgccagcaguccuacuccaucaugugcaucaucaaggaggagguccucgccuacgucguccagcucccccucuacggcgucaucgacacccccugcuggaagcuccacaccuccccccucugcaccaccaacaccaaggagggcuccaacaucugccucacccgcaccgaccgcggcugguacugcgacaacgccggcuccgucuccuucuucccccaggccgagaccugcaagguccaguccaaccgcgucuucugcgacaccaugaacucccgcacccuccccuccgaggucaaccucugcaacaucgacaucuucaaccccaaguacgacugcaagaucaugaccuccaagaccgacgucuccuccuccgucaucaccucccucggcgccaucgucuccugcuacggcaagaccaagugcaccgccuccaacaagaaccgcggcaucaucaagaccuucuccaacggcugcgacuacgucuccaacaagggcgucgacaccgucuccgucggcaacacccucuacuacgucaacaagcaggagggcaagucccucuacgucaagggcgagcccaucaucaacuucuacgacccccucgucuuccccuccgacgaguucgacgccuccaucucccaggucaacgagaagaucaaccagucccucgccuucauccgcaaguccgacgagcuccuccacaacgucaacgucggcaaguccaccaccaacaucaugaucaccaccaucaucaucgucaucaucgucauccuccuccuccucaucgccgucggccucuuccucuacugcaaggcccgcugaggacuagucccuguucccagagcccacuuuuuuuucuuuuuuugaaauaaaauagccugucuuucagaucuaaaaaaaaaaaaaaaaaaaaaaaaaaaaaaaaaaaaaaaaaaaaaaaaaaaaaaaaaaaaaaaaugcaucccccccccccccccccccccccccccccccaaaggcucuuuucagagccaccagaauu

SEQ ID NO: 13607 - RNA, 1867 nt, Artificial Sequence
  mRNA product Design a-4 comprising derived and/or modified sequence from HRSV(Memphis-37)__AIY60640.1__F-del_DSCav1_mut0 (opt3)
gggagacuccugucgggcggaaguaggaggaguagaguuuaaaaacaguacucuuuuuccgguucgggacguaguugaagcaacgacaagccggauaaccgcucuugagacaggaagcuuaccauggagcugcccauccucaagaccaacgccauuacaacuauacuugcugcagugacgcugugcuucgccagcucccagaauaucaccgaagaguuuuaccaaucuacauguucagcggucaguaaaggcuauuugagcgcuuuaagaacugggugguacaccuccguuauuacaaucgaacugucuaacauuaaggagaauaaaugcaacggaaccgacgccaaggugaaacuaaucaagcaggaacucgauaaguauaaaaaugcaguaacugagcugcagcuucugaugcagucgaccccugccgcugguucaggcagcgcaauagccagugggaucgcuguguguaaggucuugcaccucgagggagaagugaacaaaauuaagaaugcccugcuguccacaaacaaagcgguugugucucucagcaauggcgucuccguguuaacguucaagguacuggaccuuaagaacuacaucgauaaacaauugcugccaauucuaaauaagcagucaugcaguaucagcaacauagagacuguuauugaauuucagcagaaaaauaacaggcuccuggagaucacccgggaguucucugugaaugccggugucacaacuccgguguccaccuauaugcuuacaaacucagaacuguugagccucauuaacgacaugcccaucaccaaugaucaaaagaaacugaugaguaacaaugugcagaucguccgccagcagucuuacuccauuauguguauaaucaaggaggaaguuuuagcauaugugguacaacugccucucuacggggugauugacacgccaugcuggaaacuucauacuagcccccuguguacaaccaacacuaaggagggaucgaauaucugcuugacacgaaccgaucguggcugguacugugacaacgcuggcucugucuccuuuuucccucaggccgaaacgugcaaggugcagucaaauagaguguuuugugauaccaugaacaguagaacacugccaagcgaggugaaucucugcaacauagacauuuucaaucccaaauaugauugcaagaucaugacuuccaaaaccgacgucucuagcucagugaucacaagucugggggcaauuguauccuguuacggaaagacuaaaugcaccgcuagcaacaagaauagggguaucauuaagacauuuucuaacggcugugauuauguuucaaauaaagggguggacaccgucagugugggaaacacucuuuacuaugucaacaagcaagagggcaaaagccuguacgugaagggugaaccuauaaucaauuucuaugacccauugguuuuuccguccgaugaguucgacgccucuauuucgcagguuaacgagaaaaucaaucagagccucgcguuuauccggaaguccgaugaacuguuacacaacguaaaugucgggaagucaacgacaaacauuaugauaaccacuaucauuaucgugauuaucguuauacugcuacuccugaucgccgugggacuuuucuuguacugcaaagcacgcugaggacuagucccuguucccagagcccacuuuuuuuucuuuuuuugaaauaaaauagccugucuuucagaucuaaaaaaaaaaaaaaaaaaaaaaaaaaaaaaaaaaaaaaaaaaaaaaaaaaaaaaaaaaaaaaaaugcaucccccccccccccccccccccccccccccccaaaggcucuuuucagagccaccagaauu

SEQ ID NO: 13608 - RNA, 1867 nt, Artificial Sequence
  mRNA product Design a-4 comprising derived and/or modified sequence from HRSV(Memphis-37)__AIY60640.1__F-del_DSCav1_mut0 (opt4)
gggagacuccugucgggcggaaguaggaggaguagaguuuaaaaacaguacucuuuuuccgguucgggacguaguugaagcaacgacaagccggauaaccgcucuugagacaggaagcuuaccauggagcugcccauccugaagaccaacgccaucaccaccauccuggccgccgugacccugugcuucgccagcagccagaacaucaccgaggaguucuaccagagcaccugcagcgccgugagcaagggcuaccugagcgcccugagaaccggcugguacaccagcgugaucaccaucgagcugagcaacaucaaggagaacaagugcaacggcaccgacgccaaggugaagcugaucaagcaggagcuggacaaguacaagaacgccgugaccgagcugcagcugcugaugcagagcacccccgccgccggcagcggcagcgccaucgccagcggcaucgccgugugcaaggugcugcaccuggagggcgaggugaacaagaucaagaacgcccugcugagcaccaacaaggccguggugagccugagcaacggcgugagcgugcugaccuucaaggugcuggaccugaagaacuacaucgacaagcagcugcugcccauccugaacaagcagagcugcagcaucagcaacaucgagaccgugaucgaguuccagcagaagaacaacagacugcuggagaucaccagagaguucagcgugaacgccggcgugaccacccccgugagcaccuacaugcugaccaacagcgagcugcugagccugaucaacgacaugcccaucaccaacgaccagaagaagcugaugagcaacaacgugcagaucgugagacagcagagcuacagcaucaugugcaucaucaaggaggaggugcuggccuacguggugcagcugccccuguacggcgugaucgacacccccugcuggaagcugcacaccagcccccugugcaccaccaacaccaaggagggcagcaacaucugccugaccagaaccgacagaggcugguacugcgacaacgccggcagcgugagcuucuucccccaggccgagaccugcaaggugcagagcaacagaguguucugcgacaccaugaacagcagaacccugcccagcgaggugaaccugugcaacaucgacaucuucaaccccaaguacgacugcaagaucaugaccagcaagaccgacgugagcagcagcgugaucaccagccugggcgccaucgugagcugcuacggcaagaccaagugcaccgccagcaacaagaacagaggcaucaucaagaccuucagcaacggcugcgacuacgugagcaacaagggcguggacaccgugagcgugggcaacacccuguacuacgugaacaagcaggagggcaagagccuguacgugaagggcgagcccaucaucaacuucuacgacccccugguguuccccagcgacgaguucgacgccagcaucagccaggugaacgagaagaucaaccagagccuggccuucaucagaaagagcgacgagcugcugcacaacgugaacgugggcaagagcaccaccaacaucaugaucaccaccaucaucaucgugaucaucgugauccugcugcugcugaucgccgugggccuguuccuguacugcaaggccagaugaggacuagucccuguucccagagcccacuuuuuuuucuuuuuuugaaauaaaauagccugucuuucagaucuaaaaaaaaaaaaaaaaaaaaaaaaaaaaaaaaaaaaaaaaaaaaaaaaaaaaaaaaaaaaaaaaugcaucccccccccccccccccccccccccccccccaaaggcucuuuucagagccaccagaauu

SEQ ID NO: 13609 - RNA, 1867 nt, Artificial Sequence
  mRNA product Design a-4 comprising derived and/or modified sequence from HRSV(Memphis-37)__AIY60640.1__F-del_DSCav1_mut0 (opt5)
gggagacuccugucgggcggaaguaggaggaguagaguuuaaaaacaguacucuuuuuccgguucgggacguaguugaagcaacgacaagccggauaaccgcucuugagacaggaagcuuaccauggagcugcccauccucaagaccaacgccauuacaacgauccuggcugccgugacccuuugcuucgcgagcucccagaauauuacagaagaguuuuaccaaucuaccuguagcgcugucuccaaaggcuaucugucugcccucagaacagggugguacaccagcguuaucacaauugaacuguccaacaucaaggagaauaaaugcaacggaaccgacgccaaggugaaacuuaucaagcaggaacuggauaaguauaaaaaugcugugacggagcuccagcugcugaugcagucuaccccugccgcuggcagcggguccgccauugcgagcggaaucgccgucuguaaggugcuccaccuggagggcgaaguuaacaaaauuaagaaugcccuucugucuacaaacaaagcuguggucucccucagcaauggggugucuguucugaccuucaaggugcuugaccugaagaacuacaucgauaaacaacuccugccgauucugaauaagcaguccugcagcaucucuaacauugagacagucaucgaauuucagcagaaaaauaaccggcuccuggagaucacccgcgaguucuccgugaaugcuggagugacgacacccgucagcaccuauaugcuuacaaacuccgaacugcucucucugauuaacgacaugccuaucaccaaugaucaaaagaaacuuaugagcaacaauguucagauugugagacagcaguccuacagcaucauguguauuaucaaggaggaagugcuggccuaugucgugcaacucccccuguacggcguuaucgacaccccuugcuggaaacugcauacaucuccccucuguacgaccaacacaaaggagggcuccaauauuugccugacccggacagaucgcgggugguacugugacaacgcgggaagcgugagcuuuuucccucaggccgaaaccugcaagguccagucuaauagaguguuuugugauacgaugaacuccagaacacugccgucugagguuaaucucugcaacaucgacauuuucaaucccaaauaugauugcaagaucaugaccagcaaaaccgacguguccagcucugucauuacaucccugggcgcuaucgugagcuguuacgggaagaccaaaugcacagccucuaacaagaaucggggaaucauuaagacguuuuccaacggcugugauuaugucagcaauaaagggguggacaccguuuccgugggaaacacacuuuacuaugucaacaagcaagagggcaaaucucuguacgugaagggcgaaccuaucauuaauuucuaugacccccucguuuuuccuagcgaugaguucgacgcuuccaucucucaggugaacgaaaagauuaaucagagccuggccuuuauccgcaaguccgaugagcugcuccacaacgucaauguggggaaaagcaccacaaacauuaugaucaccacgaucauuaucgugauuaucguuauucugcuucugcucaucgccgucggacuguuccuguacugcaaagcuagaugaggacuagucccuguucccagagcccacuuuuuuuucuuuuuuugaaauaaaauagccugucuuucagaucuaaaaaaaaaaaaaaaaaaaaaaaaaaaaaaaaaaaaaaaaaaaaaaaaaaaaaaaaaaaaaaaaugcaucccccccccccccccccccccccccccccccaaaggcucuuuucagagccaccagaauu

SEQ ID NO: 13610 - RNA, 1867 nt, Artificial Sequence
  mRNA product Design a-4 comprising derived and/or modified sequence from HRSV(Memphis-37)__AIY60640.1__F-del_DSCav1_mut0 (opt6)
gggagacuccugucgggcggaaguaggaggaguagaguuuaaaaacaguacucuuuuuccgguucgggacguaguugaagcaacgacaagccggauaaccgcucuugagacaggaagcuuaccauggaacucccaauacuuaaaacaaacgcaaucacaacaauacuagcugcagucacacuaugcuucgccucaucacaaaauauaacagaagaauuuuaucaaucaacaugcuccgcaguaucaaaaggauaucucucugcauuacgaacagguugguacaccucgguaauaacaauagaauuaucaaacauaaaagaaaauaaaugcaauggaaccgaugccaaaguaaaacuaaucaaacaagaacuugacaaauacaaaaacgcaguaacagaacuacaacuauuaaugcaaucaacaccagcagcagguucaggcuccgcaaucgcuucaggaauagccguuuguaaaguacuacacuuagaaggagaaguaaauaaaauaaaaaacgccuuacuaucaacaaacaaagcaguagucucccuuuccaacggaguaucagucuuaacuuuuaaaguacucgacuuaaaaaauuacaucgacaaacaacuacuacccauucuaaauaaacaaucaugcucaauaucaaacaucgaaacaguaaucgaauuucaacaaaaaaauaauagauuacuagaaauaacacgagaauuuuccguaaaugccggaguaacgaccccagucucaacauacauguuaacaaacucagaauuacuaucacucauuaacgauaugccaauaacaaaugaccaaaaaaaacuaaugucaaacaacguccaaauaguacgacaacaaucauacucuaucauguguauaauaaaagaagaaguuuuagcauacguaguacaacuaccacuuuacggagucauagacaccccaugcuggaaacuacacacaucacccuuauguacaacaaacaccaaagaagggucuaacauaugucucacuagaacagaucgaggcugguacugcgacaacgcaggaucaguuagcuuuuucccucaagccgaaaccuguaaaguacaauccaaucgaguauuuugcgacacuaugaacucuagaaccuuacccuccgaaguaaaccuauguaacauagacauauuuaaucccaaauaugauugcaaaaucaugacauccaaaacagauguaucaagcucuguaauaaccucacuaggagcaauaguuucaugcuaugguaaaacaaaaugcaccgccucaaacaaaaauagagggauaaucaaaaccuucucaaauggaugcgacuacguaucaaauaaaggaguagacaccgucuccguaggaaacacacuauacuacguaaacaaacaagaaggaaaaucacuauacguaaaaggagaaccaaucauaaacuucuacgacccacuuguuuucccaucagaugaauuugaugccuccauaucacaaguaaacgaaaaaauaaaccaaucucuagccuucaucagaaaauccgacgaacuuuuacacaacguaaacguagguaaaucaacaaccaacaucaugauaacaacaauaauaauaguaauaauuguaauacuuuuacuacuuaucgccguaggccuauucuuauauuguaaagcaagaugaggacuagucccuguucccagagcccacuuuuuuuucuuuuuuugaaauaaaauagccugucuuucagaucuaaaaaaaaaaaaaaaaaaaaaaaaaaaaaaaaaaaaaaaaaaaaaaaaaaaaaaaaaaaaaaaaugcaucccccccccccccccccccccccccccccccaaaggcucuuuucagagccaccagaauu

SEQ ID NO: 13611 - RNA, 1867 nt, Artificial Sequence
  mRNA product Design a-4 comprising derived and/or modified sequence from HRSV(Memphis-37)__AIY60640.1__F-del_DSCav1_mut0 (opt11)
gggagacuccugucgggcggaaguaggaggaguagaguuuaaaaacaguacucuuuuuccgguucgggacguaguugaagcaacgacaagccggauaaccgcucuugagacaggaagcuuaccauggaacuaccaauccucaaaaccaacgccaucacuacaauccuagccgcgguaacccugugcuucgccuccucacaaaacaucacagaagaauuuuaccaaucaaccugcuccgccguauccaaaggauaccugagcgcccugagaaccggcugguacaccuccgucaucaccauagaacucuccaacaucaaagaaaacaaaugcaacgguacggacgccaaaguuaaacucaucaaacaagaacuugacaaauacaagaacgccgucacagaacugcaacuccucaugcaauccacccccgccgccggcuccggcuccgccauagccuccggcaucgccgucugcaaagucuuacaccuagaaggcgaagucaacaaaaucaaaaacgcacuacuuuccacaaacaaagccgucgucucacucuccaacggcguauccguccucaccuucaaaguacuugaccucaaaaacuacaucgacaaacaacuacuccccauccugaacaaacaauccugcucaaucuccaacaucgaaaccguaaucgaguuccaacagaaaaauaaucgccuccuggagaucacccgcgaguucuccgucaaugcaggagucacaaccccaguaucaaccuacaugcucaccaacuccgaacuccugucgcucaucaacgacaugcccaucacaaacgaccaaaagaaacucauguccaacaacguacaaaucgucagacaacaauccuauucuauaaugugcaucaucaaagaagaaguccucgccuacgucguacaacucccccucuacggcguuaucgacacccccugcuggaaacuccacaccucaccccucugcaccaccaacacaaaagaaggcuccaacaucugccucacucggaccgaccgcggcugguacugcgacaaugccggcagcgucuccuucuucccacaagccgaaaccugcaaaguccaguccaaccgcguauucugcgacacuaugaacuccagaacccuccccuccgaaguaaaccucugcaacaucgacaucuucaacccaaaauacgacugcaaaaucaugaccucaaaaaccgacgucagcucgucagucauaaccagccucggagccauagucucaugcuacggaaaaaccaaaugcaccgccagcaacaaaaaccgcggcauaauaaaaacauucuccaacggcugcgacuauguauccaacaaaggagucgauaccgucuccguaggcaacacccuauacuacgucaacaaacaagaaggcaaaucccucuacgucaaaggugaaccaaucaucaacuucuacgacccucucgucuuccccuccgaugaguucgacgccucaaucagccaaguaaacgaaaagauaaaccaaucacucgccuucauccgcaaauccgacgaacuucuucacaacgucaacgucggcaaaucuaccaccaacauaaugauaaccaccaucaucaucgucaucaucguaauacuccuccuucucaucgccgucggccuauuccuauacugcaaagcccgcuagggacuagucccuguucccagagcccacuuuuuuuucuuuuuuugaaauaaaauagccugucuuucagaucuaaaaaaaaaaaaaaaaaaaaaaaaaaaaaaaaaaaaaaaaaaaaaaaaaaaaaaaaaaaaaaaaugcaucccccccccccccccccccccccccccccccaaaggcucuuuucagagccaccagaauu

SEQ ID NO: 13612 - RNA, 1813 nt, Artificial Sequence
  mRNA product Design a-5 comprising derived and/or modified sequence from HRSV(Memphis-37)__AIY60640.1__F-del_DSCav1_mut0 (opt1)
gggagacuuucccauucuguagcagaauuugguguugccuguggucuuggucccgcggagaagcuuaccauggagcugcccauccucaagaccaacgccaucaccacgauccuggccgcggugacccugugcuucgccagcucccagaacaucaccgaggaguucuaccagagcacgugcuccgccgucagcaagggcuaccucuccgcccugcgcaccgggugguacaccagcgugaucaccaucgagcuguccaacaucaaggagaacaagugcaacggcaccgacgccaaggugaagcucaucaagcaggagcuggacaaguacaagaacgcggucacggagcugcagcuccugaugcagagcaccccggccgccggcuccgggagcgcgaucgccuccggcaucgccgucugcaaggugcugcaccucgagggcgaggugaacaagaucaagaacgcccugcuguccaccaacaaggccgucgugagccucuccaacggggugagcguccugaccuucaaggugcuggaccucaagaacuacaucgacaagcagcugcugcccauccugaacaagcagagcugcuccaucagcaacaucgagaccgucaucgaguuccagcagaagaacaaccgccuccuggagaucacgcgggaguucagcgugaacgcgggcgugaccacccccgucuccaccuacaugcugacgaacagcgagcuccugucccugaucaacgacaugccgaucaccaacgaccagaagaagcucaugagcaacaacgugcagaucgugcgccagcaguccuacagcaucaugugcaucaucaaggaggagguccuggccuacguggugcagcugccccucuacggggucaucgacacccccugcuggaagcugcacaccagcccccugugcacgaccaacaccaaggagggcuccaacaucugccucacccggacggaccgcgggugguacugcgacaacgccggcagcguguccuucuucccgcaggccgagaccugcaagguccagagcaaccggguguucugcgacaccaugaacucccggacccugcccagcgaggugaaccucugcaacaucgacaucuucaaccccaaguacgacugcaagaucaugacguccaagaccgacgucagcuccagcgugaucaccucccugggcgccaucgugagcugcuacgggaagaccaagugcacggcgagcaacaagaaccgcggcaucaucaagaccuucuccaacgggugcgacuacgucagcaacaagggcguggacaccguguccgucggcaacacccuguacuacgugaacaagcaggagggcaagagccucuacgugaagggggagcccaucaucaacuucuacgacccgcuggucuuccccuccgacgaguucgacgccagcaucucccaggugaacgagaagaucaaccagagccuggccuucauccggaaguccgacgagcuccugcacaacgugaacgucggcaagagcaccacgaacaucaugaucaccaccaucaucaucgugaucaucgugauccugcugcuccugaucgccgucgggcuguuccucuacugcaaggcccgcugaggacuagucccuguucccagagcccacuuuuuuuucuuuuuuugaaauaaaauagccugucuuucagaucuaaaaaaaaaaaaaaaaaaaaaaaaaaaaaaaaaaaaaaaaaaaaaaaaaaaaaaaaaaaaaaaaugcaucccccccccccccccccccccccccccccccaaaggcucuuuucagagccaccagaauu

SEQ ID NO: 13613 - RNA, 1813 nt, Artificial Sequence
  mRNA product Design a-5 comprising derived and/or modified sequence from HRSV(Memphis-37)__AIY60640.1__F-del_DSCav1_mut0 (opt1)
gggagacuuucccauucuguagcagaauuugguguugccuguggucuuggucccgcggagaagcuuaccauggagcugcccauccucaagaccaacgccaucaccacgauccuggccgcggugacccugugcuucgccagcucccagaacaucaccgaggaguucuaccagagcacgugcuccgccgucagcaagggcuaccucuccgcccugcgcaccgggugguacaccagcgugaucaccaucgagcuguccaacaucaaggagaacaagugcaacggcaccgacgccaaggugaagcucaucaagcaggagcuggacaaguacaagaacgcggucacggagcugcagcuccugaugcagagcaccccggccgccggguccggcagcgccaucgcguccgggaucgccgugugcaaggugcugcaccucgagggcgaggucaacaagaucaagaacgcccugcugagcaccaacaaggccguggugucccucagcaacggcgucuccgugcugaccuucaaggugcuggaccucaagaacuacaucgacaagcagcugcugcccauccucaacaagcagagcugcuccaucagcaacaucgagacggucaucgaguuccagcagaagaacaaccggcugcuggagaucacccgcgaguucuccgugaacgccggggugaccacccccgucagcacguacaugcucaccaacagcgagcugcugucccucaucaacgacaugcccaucaccaacgaccagaagaagcugaugagcaacaacgugcagaucgugcggcagcaguccuacagcaucaugugcaucaucaaggaggagguccuggcguacguggugcagcucccgcuguacggcgucaucgacacccccugcuggaagcugcacacgagcccccucugcaccaccaacaccaaggagggguccaacaucugccugacgcgcaccgaccggggcugguacugcgacaacgccggguccgugagcuucuucccccaggccgagaccugcaaggugcaguccaaccgcgucuucugcgacaccaugaacagccggacgcucccguccgaggugaaccugugcaacaucgacaucuucaaccccaaguacgacugcaagaucaugaccagcaagaccgacgucuccagcuccgugaucaccagccugggcgccaucguguccugcuacggcaagacgaagugcaccgccagcaacaagaaccgggggaucaucaagaccuucuccaacggcugcgacuacgucagcaacaaggggguggacaccgugagcgucggcaacacgcucuacuacgugaacaagcaggagggcaagucccuguacgugaagggggagcccaucaucaacuucuacgacccccuggucuucccgagcgacgaguucgacgcguccaucagccaggugaacgagaagaucaaccagucccucgccuucauccgcaagagcgacgagcugcugcacaacgugaacgucggcaaguccaccaccaacaucaugaucaccaccaucaucaucgugaucaucgugauccuccugcugcucaucgccgucgggcuguuccuguacugcaaggcccggugaggacuagucccuguucccagagcccacuuuuuuuucuuuuuuugaaauaaaauagccugucuuucagaucuaaaaaaaaaaaaaaaaaaaaaaaaaaaaaaaaaaaaaaaaaaaaaaaaaaaaaaaaaaaaaaaaugcaucccccccccccccccccccccccccccccccaaaggcucuuuucagagccaccagaauu

SEQ ID NO: 13614 - RNA, 1813 nt, Artificial Sequence
  mRNA product Design a-5 comprising derived and/or modified sequence from HRSV(Memphis-37)__AIY60640.1__F-del_DSCav1_mut0 (opt2)
gggagacuuucccauucuguagcagaauuugguguugccuguggucuuggucccgcggagaagcuuaccauggagcuccccauccucaagaccaacgccaucaccaccauccucgccgccgucacccucugcuucgccuccucccagaacaucaccgaggaguucuaccaguccaccugcuccgccgucuccaagggcuaccucuccgcccuccgcaccggcugguacaccuccgucaucaccaucgagcucuccaacaucaaggagaacaagugcaacggcaccgacgccaaggucaagcucaucaagcaggagcucgacaaguacaagaacgccgucaccgagcuccagcuccucaugcaguccacccccgccgccggcuccggcuccgccaucgccuccggcaucgccgucugcaagguccuccaccucgagggcgaggucaacaagaucaagaacgcccuccucuccaccaacaaggccgucgucucccucuccaacggcgucuccguccucaccuucaagguccucgaccucaagaacuacaucgacaagcagcuccuccccauccucaacaagcaguccugcuccaucuccaacaucgagaccgucaucgaguuccagcagaagaacaaccgccuccucgagaucacccgcgaguucuccgucaacgccggcgucaccacccccgucuccaccuacaugcucaccaacuccgagcuccucucccucaucaacgacaugcccaucaccaacgaccagaagaagcucauguccaacaacguccagaucguccgccagcaguccuacuccaucaugugcaucaucaaggaggagguccucgccuacgucguccagcucccccucuacggcgucaucgacacccccugcuggaagcuccacaccuccccccucugcaccaccaacaccaaggagggcuccaacaucugccucacccgcaccgaccgcggcugguacugcgacaacgccggcuccgucuccuucuucccccaggccgagaccugcaagguccaguccaaccgcgucuucugcgacaccaugaacucccgcacccuccccuccgaggucaaccucugcaacaucgacaucuucaaccccaaguacgacugcaagaucaugaccuccaagaccgacgucuccuccuccgucaucaccucccucggcgccaucgucuccugcuacggcaagaccaagugcaccgccuccaacaagaaccgcggcaucaucaagaccuucuccaacggcugcgacuacgucuccaacaagggcgucgacaccgucuccgucggcaacacccucuacuacgucaacaagcaggagggcaagucccucuacgucaagggcgagcccaucaucaacuucuacgacccccucgucuuccccuccgacgaguucgacgccuccaucucccaggucaacgagaagaucaaccagucccucgccuucauccgcaaguccgacgagcuccuccacaacgucaacgucggcaaguccaccaccaacaucaugaucaccaccaucaucaucgucaucaucgucauccuccuccuccucaucgccgucggccucuuccucuacugcaaggcccgcugaggacuagucccuguucccagagcccacuuuuuuuucuuuuuuugaaauaaaauagccugucuuucagaucuaaaaaaaaaaaaaaaaaaaaaaaaaaaaaaaaaaaaaaaaaaaaaaaaaaaaaaaaaaaaaaaaugcaucccccccccccccccccccccccccccccccaaaggcucuuuucagagccaccagaauu

SEQ ID NO: 13615 - RNA, 1813 nt, Artificial Sequence
  mRNA product Design a-5 comprising derived and/or modified sequence from HRSV(Memphis-37)__AIY60640.1__F-del_DSCav1_mut0 (opt3)
gggagacuuucccauucuguagcagaauuugguguugccuguggucuuggucccgcggagaagcuuaccauggagcugcccauccucaagaccaacgccauuacaacuauacuugcugcagugacgcugugcuucgccagcucccagaauaucaccgaagaguuuuaccaaucuacauguucagcggucaguaaaggcuauuugagcgcuuuaagaacugggugguacaccuccguuauuacaaucgaacugucuaacauuaaggagaauaaaugcaacggaaccgacgccaaggugaaacuaaucaagcaggaacucgauaaguauaaaaaugcaguaacugagcugcagcuucugaugcagucgaccccugccgcugguucaggcagcgcaauagccagugggaucgcuguguguaaggucuugcaccucgagggagaagugaacaaaauuaagaaugcccugcuguccacaaacaaagcgguugugucucucagcaauggcgucuccguguuaacguucaagguacuggaccuuaagaacuacaucgauaaacaauugcugccaauucuaaauaagcagucaugcaguaucagcaacauagagacuguuauugaauuucagcagaaaaauaacaggcuccuggagaucacccgggaguucucugugaaugccggugucacaacuccgguguccaccuauaugcuuacaaacucagaacuguugagccucauuaacgacaugcccaucaccaaugaucaaaagaaacugaugaguaacaaugugcagaucguccgccagcagucuuacuccauuauguguauaaucaaggaggaaguuuuagcauaugugguacaacugccucucuacggggugauugacacgccaugcuggaaacuucauacuagcccccuguguacaaccaacacuaaggagggaucgaauaucugcuugacacgaaccgaucguggcugguacugugacaacgcuggcucugucuccuuuuucccucaggccgaaacgugcaaggugcagucaaauagaguguuuugugauaccaugaacaguagaacacugccaagcgaggugaaucucugcaacauagacauuuucaaucccaaauaugauugcaagaucaugacuuccaaaaccgacgucucuagcucagugaucacaagucugggggcaauuguauccuguuacggaaagacuaaaugcaccgcuagcaacaagaauagggguaucauuaagacauuuucuaacggcugugauuauguuucaaauaaagggguggacaccgucagugugggaaacacucuuuacuaugucaacaagcaagagggcaaaagccuguacgugaagggugaaccuauaaucaauuucuaugacccauugguuuuuccguccgaugaguucgacgccucuauuucgcagguuaacgagaaaaucaaucagagccucgcguuuauccggaaguccgaugaacuguuacacaacguaaaugucgggaagucaacgacaaacauuaugauaaccacuaucauuaucgugauuaucguuauacugcuacuccugaucgccgugggacuuuucuuguacugcaaagcacgcugaggacuagucccuguucccagagcccacuuuuuuuucuuuuuuugaaauaaaauagccugucuuucagaucuaaaaaaaaaaaaaaaaaaaaaaaaaaaaaaaaaaaaaaaaaaaaaaaaaaaaaaaaaaaaaaaaugcaucccccccccccccccccccccccccccccccaaaggcucuuuucagagccaccagaauu

SEQ ID NO: 13616 - RNA, 1813 nt, Artificial Sequence
  mRNA product Design a-5 comprising derived and/or modified sequence from HRSV(Memphis-37)__AIY60640.1__F-del_DSCav1_mut0 (opt4)
gggagacuuucccauucuguagcagaauuugguguugccuguggucuuggucccgcggagaagcuuaccauggagcugcccauccugaagaccaacgccaucaccaccauccuggccgccgugacccugugcuucgccagcagccagaacaucaccgaggaguucuaccagagcaccugcagcgccgugagcaagggcuaccugagcgcccugagaaccggcugguacaccagcgugaucaccaucgagcugagcaacaucaaggagaacaagugcaacggcaccgacgccaaggugaagcugaucaagcaggagcuggacaaguacaagaacgccgugaccgagcugcagcugcugaugcagagcacccccgccgccggcagcggcagcgccaucgccagcggcaucgccgugugcaaggugcugcaccuggagggcgaggugaacaagaucaagaacgcccugcugagcaccaacaaggccguggugagccugagcaacggcgugagcgugcugaccuucaaggugcuggaccugaagaacuacaucgacaagcagcugcugcccauccugaacaagcagagcugcagcaucagcaacaucgagaccgugaucgaguuccagcagaagaacaacagacugcuggagaucaccagagaguucagcgugaacgccggcgugaccacccccgugagcaccuacaugcugaccaacagcgagcugcugagccugaucaacgacaugcccaucaccaacgaccagaagaagcugaugagcaacaacgugcagaucgugagacagcagagcuacagcaucaugugcaucaucaaggaggaggugcuggccuacguggugcagcugccccuguacggcgugaucgacacccccugcuggaagcugcacaccagcccccugugcaccaccaacaccaaggagggcagcaacaucugccugaccagaaccgacagaggcugguacugcgacaacgccggcagcgugagcuucuucccccaggccgagaccugcaaggugcagagcaacagaguguucugcgacaccaugaacagcagaacccugcccagcgaggugaaccugugcaacaucgacaucuucaaccccaaguacgacugcaagaucaugaccagcaagaccgacgugagcagcagcgugaucaccagccugggcgccaucgugagcugcuacggcaagaccaagugcaccgccagcaacaagaacagaggcaucaucaagaccuucagcaacggcugcgacuacgugagcaacaagggcguggacaccgugagcgugggcaacacccuguacuacgugaacaagcaggagggcaagagccuguacgugaagggcgagcccaucaucaacuucuacgacccccugguguuccccagcgacgaguucgacgccagcaucagccaggugaacgagaagaucaaccagagccuggccuucaucagaaagagcgacgagcugcugcacaacgugaacgugggcaagagcaccaccaacaucaugaucaccaccaucaucaucgugaucaucgugauccugcugcugcugaucgccgugggccuguuccuguacugcaaggccagaugaggacuagucccuguucccagagcccacuuuuuuuucuuuuuuugaaauaaaauagccugucuuucagaucuaaaaaaaaaaaaaaaaaaaaaaaaaaaaaaaaaaaaaaaaaaaaaaaaaaaaaaaaaaaaaaaaugcaucccccccccccccccccccccccccccccccaaaggcucuuuucagagccaccagaauu

SEQ ID NO: 13617 - RNA, 1813 nt, Artificial Sequence
  mRNA product Design a-5 comprising derived and/or modified sequence from HRSV(Memphis-37)__AIY60640.1__F-del_DSCav1_mut0 (opt5)
gggagacuuucccauucuguagcagaauuugguguugccuguggucuuggucccgcggagaagcuuaccauggagcugcccauccucaagaccaacgccauuacaacgauccuggcugccgugacccuuugcuucgcgagcucccagaauauuacagaagaguuuuaccaaucuaccuguagcgcugucuccaaaggcuaucugucugcccucagaacagggugguacaccagcguuaucacaauugaacuguccaacaucaaggagaauaaaugcaacggaaccgacgccaaggugaaacuuaucaagcaggaacuggauaaguauaaaaaugcugugacggagcuccagcugcugaugcagucuaccccugccgcuggcagcggguccgccauugcgagcggaaucgccgucuguaaggugcuccaccuggagggcgaaguuaacaaaauuaagaaugcccuucugucuacaaacaaagcuguggucucccucagcaauggggugucuguucugaccuucaaggugcuugaccugaagaacuacaucgauaaacaacuccugccgauucugaauaagcaguccugcagcaucucuaacauugagacagucaucgaauuucagcagaaaaauaaccggcuccuggagaucacccgcgaguucuccgugaaugcuggagugacgacacccgucagcaccuauaugcuuacaaacuccgaacugcucucucugauuaacgacaugccuaucaccaaugaucaaaagaaacuuaugagcaacaauguucagauugugagacagcaguccuacagcaucauguguauuaucaaggaggaagugcuggccuaugucgugcaacucccccuguacggcguuaucgacaccccuugcuggaaacugcauacaucuccccucuguacgaccaacacaaaggagggcuccaauauuugccugacccggacagaucgcgggugguacugugacaacgcgggaagcgugagcuuuuucccucaggccgaaaccugcaagguccagucuaauagaguguuuugugauacgaugaacuccagaacacugccgucugagguuaaucucugcaacaucgacauuuucaaucccaaauaugauugcaagaucaugaccagcaaaaccgacguguccagcucugucauuacaucccugggcgcuaucgugagcuguuacgggaagaccaaaugcacagccucuaacaagaaucggggaaucauuaagacguuuuccaacggcugugauuaugucagcaauaaagggguggacaccguuuccgugggaaacacacuuuacuaugucaacaagcaagagggcaaaucucuguacgugaagggcgaaccuaucauuaauuucuaugacccccucguuuuuccuagcgaugaguucgacgcuuccaucucucaggugaacgaaaagauuaaucagagccuggccuuuauccgcaaguccgaugagcugcuccacaacgucaauguggggaaaagcaccacaaacauuaugaucaccacgaucauuaucgugauuaucguuauucugcuucugcucaucgccgucggacuguuccuguacugcaaagcuagaugaggacuagucccuguucccagagcccacuuuuuuuucuuuuuuugaaauaaaauagccugucuuucagaucuaaaaaaaaaaaaaaaaaaaaaaaaaaaaaaaaaaaaaaaaaaaaaaaaaaaaaaaaaaaaaaaaugcaucccccccccccccccccccccccccccccccaaaggcucuuuucagagccaccagaauu

SEQ ID NO: 13618 - RNA, 1813 nt, Artificial Sequence
  mRNA product Design a-5 comprising derived and/or modified sequence from HRSV(Memphis-37)__AIY60640.1__F-del_DSCav1_mut0 (opt6)
gggagacuuucccauucuguagcagaauuugguguugccuguggucuuggucccgcggagaagcuuaccauggaacucccaauacuuaaaacaaacgcaaucacaacaauacuagcugcagucacacuaugcuucgccucaucacaaaauauaacagaagaauuuuaucaaucaacaugcuccgcaguaucaaaaggauaucucucugcauuacgaacagguugguacaccucgguaauaacaauagaauuaucaaacauaaaagaaaauaaaugcaauggaaccgaugccaaaguaaaacuaaucaaacaagaacuugacaaauacaaaaacgcaguaacagaacuacaacuauuaaugcaaucaacaccagcagcagguucaggcuccgcaaucgcuucaggaauagccguuuguaaaguacuacacuuagaaggagaaguaaauaaaauaaaaaacgccuuacuaucaacaaacaaagcaguagucucccuuuccaacggaguaucagucuuaacuuuuaaaguacucgacuuaaaaaauuacaucgacaaacaacuacuacccauucuaaauaaacaaucaugcucaauaucaaacaucgaaacaguaaucgaauuucaacaaaaaaauaauagauuacuagaaauaacacgagaauuuuccguaaaugccggaguaacgaccccagucucaacauacauguuaacaaacucagaauuacuaucacucauuaacgauaugccaauaacaaaugaccaaaaaaaacuaaugucaaacaacguccaaauaguacgacaacaaucauacucuaucauguguauaauaaaagaagaaguuuuagcauacguaguacaacuaccacuuuacggagucauagacaccccaugcuggaaacuacacacaucacccuuauguacaacaaacaccaaagaagggucuaacauaugucucacuagaacagaucgaggcugguacugcgacaacgcaggaucaguuagcuuuuucccucaagccgaaaccuguaaaguacaauccaaucgaguauuuugcgacacuaugaacucuagaaccuuacccuccgaaguaaaccuauguaacauagacauauuuaaucccaaauaugauugcaaaaucaugacauccaaaacagauguaucaagcucuguaauaaccucacuaggagcaauaguuucaugcuaugguaaaacaaaaugcaccgccucaaacaaaaauagagggauaaucaaaaccuucucaaauggaugcgacuacguaucaaauaaaggaguagacaccgucuccguaggaaacacacuauacuacguaaacaaacaagaaggaaaaucacuauacguaaaaggagaaccaaucauaaacuucuacgacccacuuguuuucccaucagaugaauuugaugccuccauaucacaaguaaacgaaaaaauaaaccaaucucuagccuucaucagaaaauccgacgaacuuuuacacaacguaaacguagguaaaucaacaaccaacaucaugauaacaacaauaauaauaguaauaauuguaauacuuuuacuacuuaucgccguaggccuauucuuauauuguaaagcaagaugaggacuagucccuguucccagagcccacuuuuuuuucuuuuuuugaaauaaaauagccugucuuucagaucuaaaaaaaaaaaaaaaaaaaaaaaaaaaaaaaaaaaaaaaaaaaaaaaaaaaaaaaaaaaaaaaaugcaucccccccccccccccccccccccccccccccaaaggcucuuuucagagccaccagaauu

SEQ ID NO: 13619 - RNA, 1813 nt, Artificial Sequence
  mRNA product Design a-5 comprising derived and/or modified sequence from HRSV(Memphis-37)__AIY60640.1__F-del_DSCav1_mut0 (opt11)
gggagacuuucccauucuguagcagaauuugguguugccuguggucuuggucccgcggagaagcuuaccauggaacuaccaauccucaaaaccaacgccaucacuacaauccuagccgcgguaacccugugcuucgccuccucacaaaacaucacagaagaauuuuaccaaucaaccugcuccgccguauccaaaggauaccugagcgcccugagaaccggcugguacaccuccgucaucaccauagaacucuccaacaucaaagaaaacaaaugcaacgguacggacgccaaaguuaaacucaucaaacaagaacuugacaaauacaagaacgccgucacagaacugcaacuccucaugcaauccacccccgccgccggcuccggcuccgccauagccuccggcaucgccgucugcaaagucuuacaccuagaaggcgaagucaacaaaaucaaaaacgcacuacuuuccacaaacaaagccgucgucucacucuccaacggcguauccguccucaccuucaaaguacuugaccucaaaaacuacaucgacaaacaacuacuccccauccugaacaaacaauccugcucaaucuccaacaucgaaaccguaaucgaguuccaacagaaaaauaaucgccuccuggagaucacccgcgaguucuccgucaaugcaggagucacaaccccaguaucaaccuacaugcucaccaacuccgaacuccugucgcucaucaacgacaugcccaucacaaacgaccaaaagaaacucauguccaacaacguacaaaucgucagacaacaauccuauucuauaaugugcaucaucaaagaagaaguccucgccuacgucguacaacucccccucuacggcguuaucgacacccccugcuggaaacuccacaccucaccccucugcaccaccaacacaaaagaaggcuccaacaucugccucacucggaccgaccgcggcugguacugcgacaaugccggcagcgucuccuucuucccacaagccgaaaccugcaaaguccaguccaaccgcguauucugcgacacuaugaacuccagaacccuccccuccgaaguaaaccucugcaacaucgacaucuucaacccaaaauacgacugcaaaaucaugaccucaaaaaccgacgucagcucgucagucauaaccagccucggagccauagucucaugcuacggaaaaaccaaaugcaccgccagcaacaaaaaccgcggcauaauaaaaacauucuccaacggcugcgacuauguauccaacaaaggagucgauaccgucuccguaggcaacacccuauacuacgucaacaaacaagaaggcaaaucccucuacgucaaaggugaaccaaucaucaacuucuacgacccucucgucuuccccuccgaugaguucgacgccucaaucagccaaguaaacgaaaagauaaaccaaucacucgccuucauccgcaaauccgacgaacuucuucacaacgucaacgucggcaaaucuaccaccaacauaaugauaaccaccaucaucaucgucaucaucguaauacuccuccuucucaucgccgucggccuauuccuauacugcaaagcccgcuagggacuagucccuguucccagagcccacuuuuuuuucuuuuuuugaaauaaaauagccugucuuucagaucuaaaaaaaaaaaaaaaaaaaaaaaaaaaaaaaaaaaaaaaaaaaaaaaaaaaaaaaaaaaaaaaaugcaucccccccccccccccccccccccccccccccaaaggcucuuuucagagccaccagaauu

SEQ ID NO: 13620 - RNA, 1994 nt, Artificial Sequence
  mRNA product Design b-1 comprising derived and/or modified sequence from HRSV(Memphis-37)__AIY60640.1__F-del_DSCav1_mut0 (opt1)
gggagacggagacggccugcaggaccugcucucucagcccucagccgaggccuacgccgagccgagugcgcagccgacgaccgggaggagccgcagccuucaacucugagguacugugauccgcgcugcccgccgggccgccccaguccgcugcugcggcaccuccuucccucgcgcccucuucgcucgccagcgccuucccugugagccugcgucaccgcggccgccaagcuuaccauggagcugcccauccucaagaccaacgccaucaccacgauccuggccgcggugacccugugcuucgccagcucccagaacaucaccgaggaguucuaccagagcacgugcuccgccgucagcaagggcuaccucuccgcccugcgcaccgggugguacaccagcgugaucaccaucgagcuguccaacaucaaggagaacaagugcaacggcaccgacgccaaggugaagcucaucaagcaggagcuggacaaguacaagaacgcggucacggagcugcagcuccugaugcagagcaccccggccgccggcuccgggagcgcgaucgccuccggcaucgccgucugcaaggugcugcaccucgagggcgaggugaacaagaucaagaacgcccugcuguccaccaacaaggccgucgugagccucuccaacggggugagcguccugaccuucaaggugcuggaccucaagaacuacaucgacaagcagcugcugcccauccugaacaagcagagcugcuccaucagcaacaucgagaccgucaucgaguuccagcagaagaacaaccgccuccuggagaucacgcgggaguucagcgugaacgcgggcgugaccacccccgucuccaccuacaugcugacgaacagcgagcuccugucccugaucaacgacaugccgaucaccaacgaccagaagaagcucaugagcaacaacgugcagaucgugcgccagcaguccuacagcaucaugugcaucaucaaggaggagguccuggccuacguggugcagcugccccucuacggggucaucgacacccccugcuggaagcugcacaccagcccccugugcacgaccaacaccaaggagggcuccaacaucugccucacccggacggaccgcgggugguacugcgacaacgccggcagcguguccuucuucccgcaggccgagaccugcaagguccagagcaaccggguguucugcgacaccaugaacucccggacccugcccagcgaggugaaccucugcaacaucgacaucuucaaccccaaguacgacugcaagaucaugacguccaagaccgacgucagcuccagcgugaucaccucccugggcgccaucgugagcugcuacgggaagaccaagugcacggcgagcaacaagaaccgcggcaucaucaagaccuucuccaacgggugcgacuacgucagcaacaagggcguggacaccguguccgucggcaacacccuguacuacgugaacaagcaggagggcaagagccucuacgugaagggggagcccaucaucaacuucuacgacccgcuggucuuccccuccgacgaguucgacgccagcaucucccaggugaacgagaagaucaaccagagccuggccuucauccggaaguccgacgagcuccugcacaacgugaacgucggcaagagcaccacgaacaucaugaucaccaccaucaucaucgugaucaucgugauccugcugcuccugaucgccgucgggcuguuccucuacugcaaggcccgcugaggacuaguguccaccugucccuccugggcugcuggauugucucguuuuccugccaaauaaacaggaucagcgcuuuacagaucuaaaaaaaaaaaaaaaaaaaaaaaaaaaaaaaaaaaaaaaaaaaaaaaaaaaaaaaaaaaaaaaaugcaucccccccccccccccccccccccccccccccaaaggcucuuuucagagccaccagaauu

SEQ ID NO: 13621 - RNA, 1994 nt, Artificial Sequence
  mRNA product Design b-1 comprising derived and/or modified sequence from HRSV(Memphis-37)__AIY60640.1__F-del_DSCav1_mut0 (opt1)
gggagacggagacggccugcaggaccugcucucucagcccucagccgaggccuacgccgagccgagugcgcagccgacgaccgggaggagccgcagccuucaacucugagguacugugauccgcgcugcccgccgggccgccccaguccgcugcugcggcaccuccuucccucgcgcccucuucgcucgccagcgccuucccugugagccugcgucaccgcggccgccaagcuuaccauggagcugcccauccucaagaccaacgccaucaccacgauccuggccgcggugacccugugcuucgccagcucccagaacaucaccgaggaguucuaccagagcacgugcuccgccgucagcaagggcuaccucuccgcccugcgcaccgggugguacaccagcgugaucaccaucgagcuguccaacaucaaggagaacaagugcaacggcaccgacgccaaggugaagcucaucaagcaggagcuggacaaguacaagaacgcggucacggagcugcagcuccugaugcagagcaccccggccgccggguccggcagcgccaucgcguccgggaucgccgugugcaaggugcugcaccucgagggcgaggucaacaagaucaagaacgcccugcugagcaccaacaaggccguggugucccucagcaacggcgucuccgugcugaccuucaaggugcuggaccucaagaacuacaucgacaagcagcugcugcccauccucaacaagcagagcugcuccaucagcaacaucgagacggucaucgaguuccagcagaagaacaaccggcugcuggagaucacccgcgaguucuccgugaacgccggggugaccacccccgucagcacguacaugcucaccaacagcgagcugcugucccucaucaacgacaugcccaucaccaacgaccagaagaagcugaugagcaacaacgugcagaucgugcggcagcaguccuacagcaucaugugcaucaucaaggaggagguccuggcguacguggugcagcucccgcuguacggcgucaucgacacccccugcuggaagcugcacacgagcccccucugcaccaccaacaccaaggagggguccaacaucugccugacgcgcaccgaccggggcugguacugcgacaacgccggguccgugagcuucuucccccaggccgagaccugcaaggugcaguccaaccgcgucuucugcgacaccaugaacagccggacgcucccguccgaggugaaccugugcaacaucgacaucuucaaccccaaguacgacugcaagaucaugaccagcaagaccgacgucuccagcuccgugaucaccagccugggcgccaucguguccugcuacggcaagacgaagugcaccgccagcaacaagaaccgggggaucaucaagaccuucuccaacggcugcgacuacgucagcaacaaggggguggacaccgugagcgucggcaacacgcucuacuacgugaacaagcaggagggcaagucccuguacgugaagggggagcccaucaucaacuucuacgacccccuggucuucccgagcgacgaguucgacgcguccaucagccaggugaacgagaagaucaaccagucccucgccuucauccgcaagagcgacgagcugcugcacaacgugaacgucggcaaguccaccaccaacaucaugaucaccaccaucaucaucgugaucaucgugauccuccugcugcucaucgccgucgggcuguuccuguacugcaaggcccggugaggacuaguguccaccugucccuccugggcugcuggauugucucguuuuccugccaaauaaacaggaucagcgcuuuacagaucuaaaaaaaaaaaaaaaaaaaaaaaaaaaaaaaaaaaaaaaaaaaaaaaaaaaaaaaaaaaaaaaaugcaucccccccccccccccccccccccccccccccaaaggcucuuuucagagccaccagaauu

SEQ ID NO: 13622 - RNA, 1994 nt, Artificial Sequence
  mRNA product Design b-1 comprising derived and/or modified sequence from HRSV(Memphis-37)__AIY60640.1__F-del_DSCav1_mut0 (opt2)
gggagacggagacggccugcaggaccugcucucucagcccucagccgaggccuacgccgagccgagugcgcagccgacgaccgggaggagccgcagccuucaacucugagguacugugauccgcgcugcccgccgggccgccccaguccgcugcugcggcaccuccuucccucgcgcccucuucgcucgccagcgccuucccugugagccugcgucaccgcggccgccaagcuuaccauggagcuccccauccucaagaccaacgccaucaccaccauccucgccgccgucacccucugcuucgccuccucccagaacaucaccgaggaguucuaccaguccaccugcuccgccgucuccaagggcuaccucuccgcccuccgcaccggcugguacaccuccgucaucaccaucgagcucuccaacaucaaggagaacaagugcaacggcaccgacgccaaggucaagcucaucaagcaggagcucgacaaguacaagaacgccgucaccgagcuccagcuccucaugcaguccacccccgccgccggcuccggcuccgccaucgccuccggcaucgccgucugcaagguccuccaccucgagggcgaggucaacaagaucaagaacgcccuccucuccaccaacaaggccgucgucucccucuccaacggcgucuccguccucaccuucaagguccucgaccucaagaacuacaucgacaagcagcuccuccccauccucaacaagcaguccugcuccaucuccaacaucgagaccgucaucgaguuccagcagaagaacaaccgccuccucgagaucacccgcgaguucuccgucaacgccggcgucaccacccccgucuccaccuacaugcucaccaacuccgagcuccucucccucaucaacgacaugcccaucaccaacgaccagaagaagcucauguccaacaacguccagaucguccgccagcaguccuacuccaucaugugcaucaucaaggaggagguccucgccuacgucguccagcucccccucuacggcgucaucgacacccccugcuggaagcuccacaccuccccccucugcaccaccaacaccaaggagggcuccaacaucugccucacccgcaccgaccgcggcugguacugcgacaacgccggcuccgucuccuucuucccccaggccgagaccugcaagguccaguccaaccgcgucuucugcgacaccaugaacucccgcacccuccccuccgaggucaaccucugcaacaucgacaucuucaaccccaaguacgacugcaagaucaugaccuccaagaccgacgucuccuccuccgucaucaccucccucggcgccaucgucuccugcuacggcaagaccaagugcaccgccuccaacaagaaccgcggcaucaucaagaccuucuccaacggcugcgacuacgucuccaacaagggcgucgacaccgucuccgucggcaacacccucuacuacgucaacaagcaggagggcaagucccucuacgucaagggcgagcccaucaucaacuucuacgacccccucgucuuccccuccgacgaguucgacgccuccaucucccaggucaacgagaagaucaaccagucccucgccuucauccgcaaguccgacgagcuccuccacaacgucaacgucggcaaguccaccaccaacaucaugaucaccaccaucaucaucgucaucaucgucauccuccuccuccucaucgccgucggccucuuccucuacugcaaggcccgcugaggacuaguguccaccugucccuccugggcugcuggauugucucguuuuccugccaaauaaacaggaucagcgcuuuacagaucuaaaaaaaaaaaaaaaaaaaaaaaaaaaaaaaaaaaaaaaaaaaaaaaaaaaaaaaaaaaaaaaaugcaucccccccccccccccccccccccccccccccaaaggcucuuuucagagccaccagaauu

SEQ ID NO: 13623 - RNA, 1994 nt, Artificial Sequence
  mRNA product Design b-1 comprising derived and/or modified sequence from HRSV(Memphis-37)__AIY60640.1__F-del_DSCav1_mut0 (opt3)
gggagacggagacggccugcaggaccugcucucucagcccucagccgaggccuacgccgagccgagugcgcagccgacgaccgggaggagccgcagccuucaacucugagguacugugauccgcgcugcccgccgggccgccccaguccgcugcugcggcaccuccuucccucgcgcccucuucgcucgccagcgccuucccugugagccugcgucaccgcggccgccaagcuuaccauggagcugcccauccucaagaccaacgccauuacaacuauacuugcugcagugacgcugugcuucgccagcucccagaauaucaccgaagaguuuuaccaaucuacauguucagcggucaguaaaggcuauuugagcgcuuuaagaacugggugguacaccuccguuauuacaaucgaacugucuaacauuaaggagaauaaaugcaacggaaccgacgccaaggugaaacuaaucaagcaggaacucgauaaguauaaaaaugcaguaacugagcugcagcuucugaugcagucgaccccugccgcugguucaggcagcgcaauagccagugggaucgcuguguguaaggucuugcaccucgagggagaagugaacaaaauuaagaaugcccugcuguccacaaacaaagcgguugugucucucagcaauggcgucuccguguuaacguucaagguacuggaccuuaagaacuacaucgauaaacaauugcugccaauucuaaauaagcagucaugcaguaucagcaacauagagacuguuauugaauuucagcagaaaaauaacaggcuccuggagaucacccgggaguucucugugaaugccggugucacaacuccgguguccaccuauaugcuuacaaacucagaacuguugagccucauuaacgacaugcccaucaccaaugaucaaaagaaacugaugaguaacaaugugcagaucguccgccagcagucuuacuccauuauguguauaaucaaggaggaaguuuuagcauaugugguacaacugccucucuacggggugauugacacgccaugcuggaaacuucauacuagcccccuguguacaaccaacacuaaggagggaucgaauaucugcuugacacgaaccgaucguggcugguacugugacaacgcuggcucugucuccuuuuucccucaggccgaaacgugcaaggugcagucaaauagaguguuuugugauaccaugaacaguagaacacugccaagcgaggugaaucucugcaacauagacauuuucaaucccaaauaugauugcaagaucaugacuuccaaaaccgacgucucuagcucagugaucacaagucugggggcaauuguauccuguuacggaaagacuaaaugcaccgcuagcaacaagaauagggguaucauuaagacauuuucuaacggcugugauuauguuucaaauaaagggguggacaccgucagugugggaaacacucuuuacuaugucaacaagcaagagggcaaaagccuguacgugaagggugaaccuauaaucaauuucuaugacccauugguuuuuccguccgaugaguucgacgccucuauuucgcagguuaacgagaaaaucaaucagagccucgcguuuauccggaaguccgaugaacuguuacacaacguaaaugucgggaagucaacgacaaacauuaugauaaccacuaucauuaucgugauuaucguuauacugcuacuccugaucgccgugggacuuuucuuguacugcaaagcacgcugaggacuaguguccaccugucccuccugggcugcuggauugucucguuuuccugccaaauaaacaggaucagcgcuuuacagaucuaaaaaaaaaaaaaaaaaaaaaaaaaaaaaaaaaaaaaaaaaaaaaaaaaaaaaaaaaaaaaaaaugcaucccccccccccccccccccccccccccccccaaaggcucuuuucagagccaccagaauu

SEQ ID NO: 13624 - RNA, 1994 nt, Artificial Sequence
  mRNA product Design b-1 comprising derived and/or modified sequence from HRSV(Memphis-37)__AIY60640.1__F-del_DSCav1_mut0 (opt4)
gggagacggagacggccugcaggaccugcucucucagcccucagccgaggccuacgccgagccgagugcgcagccgacgaccgggaggagccgcagccuucaacucugagguacugugauccgcgcugcccgccgggccgccccaguccgcugcugcggcaccuccuucccucgcgcccucuucgcucgccagcgccuucccugugagccugcgucaccgcggccgccaagcuuaccauggagcugcccauccugaagaccaacgccaucaccaccauccuggccgccgugacccugugcuucgccagcagccagaacaucaccgaggaguucuaccagagcaccugcagcgccgugagcaagggcuaccugagcgcccugagaaccggcugguacaccagcgugaucaccaucgagcugagcaacaucaaggagaacaagugcaacggcaccgacgccaaggugaagcugaucaagcaggagcuggacaaguacaagaacgccgugaccgagcugcagcugcugaugcagagcacccccgccgccggcagcggcagcgccaucgccagcggcaucgccgugugcaaggugcugcaccuggagggcgaggugaacaagaucaagaacgcccugcugagcaccaacaaggccguggugagccugagcaacggcgugagcgugcugaccuucaaggugcuggaccugaagaacuacaucgacaagcagcugcugcccauccugaacaagcagagcugcagcaucagcaacaucgagaccgugaucgaguuccagcagaagaacaacagacugcuggagaucaccagagaguucagcgugaacgccggcgugaccacccccgugagcaccuacaugcugaccaacagcgagcugcugagccugaucaacgacaugcccaucaccaacgaccagaagaagcugaugagcaacaacgugcagaucgugagacagcagagcuacagcaucaugugcaucaucaaggaggaggugcuggccuacguggugcagcugccccuguacggcgugaucgacacccccugcuggaagcugcacaccagcccccugugcaccaccaacaccaaggagggcagcaacaucugccugaccagaaccgacagaggcugguacugcgacaacgccggcagcgugagcuucuucccccaggccgagaccugcaaggugcagagcaacagaguguucugcgacaccaugaacagcagaacccugcccagcgaggugaaccugugcaacaucgacaucuucaaccccaaguacgacugcaagaucaugaccagcaagaccgacgugagcagcagcgugaucaccagccugggcgccaucgugagcugcuacggcaagaccaagugcaccgccagcaacaagaacagaggcaucaucaagaccuucagcaacggcugcgacuacgugagcaacaagggcguggacaccgugagcgugggcaacacccuguacuacgugaacaagcaggagggcaagagccuguacgugaagggcgagcccaucaucaacuucuacgacccccugguguuccccagcgacgaguucgacgccagcaucagccaggugaacgagaagaucaaccagagccuggccuucaucagaaagagcgacgagcugcugcacaacgugaacgugggcaagagcaccaccaacaucaugaucaccaccaucaucaucgugaucaucgugauccugcugcugcugaucgccgugggccuguuccuguacugcaaggccagaugaggacuaguguccaccugucccuccugggcugcuggauugucucguuuuccugccaaauaaacaggaucagcgcuuuacagaucuaaaaaaaaaaaaaaaaaaaaaaaaaaaaaaaaaaaaaaaaaaaaaaaaaaaaaaaaaaaaaaaaugcaucccccccccccccccccccccccccccccccaaaggcucuuuucagagccaccagaauu

SEQ ID NO: 13625 - RNA, 1994 nt, Artificial Sequence
  mRNA product Design b-1 comprising derived and/or modified sequence from HRSV(Memphis-37)__AIY60640.1__F-del_DSCav1_mut0 (opt5)
gggagacggagacggccugcaggaccugcucucucagcccucagccgaggccuacgccgagccgagugcgcagccgacgaccgggaggagccgcagccuucaacucugagguacugugauccgcgcugcccgccgggccgccccaguccgcugcugcggcaccuccuucccucgcgcccucuucgcucgccagcgccuucccugugagccugcgucaccgcggccgccaagcuuaccauggagcugcccauccucaagaccaacgccauuacaacgauccuggcugccgugacccuuugcuucgcgagcucccagaauauuacagaagaguuuuaccaaucuaccuguagcgcugucuccaaaggcuaucugucugcccucagaacagggugguacaccagcguuaucacaauugaacuguccaacaucaaggagaauaaaugcaacggaaccgacgccaaggugaaacuuaucaagcaggaacuggauaaguauaaaaaugcugugacggagcuccagcugcugaugcagucuaccccugccgcuggcagcggguccgccauugcgagcggaaucgccgucuguaaggugcuccaccuggagggcgaaguuaacaaaauuaagaaugcccuucugucuacaaacaaagcuguggucucccucagcaauggggugucuguucugaccuucaaggugcuugaccugaagaacuacaucgauaaacaacuccugccgauucugaauaagcaguccugcagcaucucuaacauugagacagucaucgaauuucagcagaaaaauaaccggcuccuggagaucacccgcgaguucuccgugaaugcuggagugacgacacccgucagcaccuauaugcuuacaaacuccgaacugcucucucugauuaacgacaugccuaucaccaaugaucaaaagaaacuuaugagcaacaauguucagauugugagacagcaguccuacagcaucauguguauuaucaaggaggaagugcuggccuaugucgugcaacucccccuguacggcguuaucgacaccccuugcuggaaacugcauacaucuccccucuguacgaccaacacaaaggagggcuccaauauuugccugacccggacagaucgcgggugguacugugacaacgcgggaagcgugagcuuuuucccucaggccgaaaccugcaagguccagucuaauagaguguuuugugauacgaugaacuccagaacacugccgucugagguuaaucucugcaacaucgacauuuucaaucccaaauaugauugcaagaucaugaccagcaaaaccgacguguccagcucugucauuacaucccugggcgcuaucgugagcuguuacgggaagaccaaaugcacagccucuaacaagaaucggggaaucauuaagacguuuuccaacggcugugauuaugucagcaauaaagggguggacaccguuuccgugggaaacacacuuuacuaugucaacaagcaagagggcaaaucucuguacgugaagggcgaaccuaucauuaauuucuaugacccccucguuuuuccuagcgaugaguucgacgcuuccaucucucaggugaacgaaaagauuaaucagagccuggccuuuauccgcaaguccgaugagcugcuccacaacgucaauguggggaaaagcaccacaaacauuaugaucaccacgaucauuaucgugauuaucguuauucugcuucugcucaucgccgucggacuguuccuguacugcaaagcuagaugaggacuaguguccaccugucccuccugggcugcuggauugucucguuuuccugccaaauaaacaggaucagcgcuuuacagaucuaaaaaaaaaaaaaaaaaaaaaaaaaaaaaaaaaaaaaaaaaaaaaaaaaaaaaaaaaaaaaaaaugcaucccccccccccccccccccccccccccccccaaaggcucuuuucagagccaccagaauu

SEQ ID NO: 13626 - RNA, 1994 nt, Artificial Sequence
  mRNA product Design b-1 comprising derived and/or modified sequence from HRSV(Memphis-37)__AIY60640.1__F-del_DSCav1_mut0 (opt6)
gggagacggagacggccugcaggaccugcucucucagcccucagccgaggccuacgccgagccgagugcgcagccgacgaccgggaggagccgcagccuucaacucugagguacugugauccgcgcugcccgccgggccgccccaguccgcugcugcggcaccuccuucccucgcgcccucuucgcucgccagcgccuucccugugagccugcgucaccgcggccgccaagcuuaccauggaacucccaauacuuaaaacaaacgcaaucacaacaauacuagcugcagucacacuaugcuucgccucaucacaaaauauaacagaagaauuuuaucaaucaacaugcuccgcaguaucaaaaggauaucucucugcauuacgaacagguugguacaccucgguaauaacaauagaauuaucaaacauaaaagaaaauaaaugcaauggaaccgaugccaaaguaaaacuaaucaaacaagaacuugacaaauacaaaaacgcaguaacagaacuacaacuauuaaugcaaucaacaccagcagcagguucaggcuccgcaaucgcuucaggaauagccguuuguaaaguacuacacuuagaaggagaaguaaauaaaauaaaaaacgccuuacuaucaacaaacaaagcaguagucucccuuuccaacggaguaucagucuuaacuuuuaaaguacucgacuuaaaaaauuacaucgacaaacaacuacuacccauucuaaauaaacaaucaugcucaauaucaaacaucgaaacaguaaucgaauuucaacaaaaaaauaauagauuacuagaaauaacacgagaauuuuccguaaaugccggaguaacgaccccagucucaacauacauguuaacaaacucagaauuacuaucacucauuaacgauaugccaauaacaaaugaccaaaaaaaacuaaugucaaacaacguccaaauaguacgacaacaaucauacucuaucauguguauaauaaaagaagaaguuuuagcauacguaguacaacuaccacuuuacggagucauagacaccccaugcuggaaacuacacacaucacccuuauguacaacaaacaccaaagaagggucuaacauaugucucacuagaacagaucgaggcugguacugcgacaacgcaggaucaguuagcuuuuucccucaagccgaaaccuguaaaguacaauccaaucgaguauuuugcgacacuaugaacucuagaaccuuacccuccgaaguaaaccuauguaacauagacauauuuaaucccaaauaugauugcaaaaucaugacauccaaaacagauguaucaagcucuguaauaaccucacuaggagcaauaguuucaugcuaugguaaaacaaaaugcaccgccucaaacaaaaauagagggauaaucaaaaccuucucaaauggaugcgacuacguaucaaauaaaggaguagacaccgucuccguaggaaacacacuauacuacguaaacaaacaagaaggaaaaucacuauacguaaaaggagaaccaaucauaaacuucuacgacccacuuguuuucccaucagaugaauuugaugccuccauaucacaaguaaacgaaaaaauaaaccaaucucuagccuucaucagaaaauccgacgaacuuuuacacaacguaaacguagguaaaucaacaaccaacaucaugauaacaacaauaauaauaguaauaauuguaauacuuuuacuacuuaucgccguaggccuauucuuauauuguaaagcaagaugaggacuaguguccaccugucccuccugggcugcuggauugucucguuuuccugccaaauaaacaggaucagcgcuuuacagaucuaaaaaaaaaaaaaaaaaaaaaaaaaaaaaaaaaaaaaaaaaaaaaaaaaaaaaaaaaaaaaaaaugcaucccccccccccccccccccccccccccccccaaaggcucuuuucagagccaccagaauu

SEQ ID NO: 13627 - RNA, 1994 nt, Artificial Sequence
  mRNA product Design b-1 comprising derived and/or modified sequence from HRSV(Memphis-37)__AIY60640.1__F-del_DSCav1_mut0 (opt11)
gggagacggagacggccugcaggaccugcucucucagcccucagccgaggccuacgccgagccgagugcgcagccgacgaccgggaggagccgcagccuucaacucugagguacugugauccgcgcugcccgccgggccgccccaguccgcugcugcggcaccuccuucccucgcgcccucuucgcucgccagcgccuucccugugagccugcgucaccgcggccgccaagcuuaccauggaacuaccaauccucaaaaccaacgccaucacuacaauccuagccgcgguaacccugugcuucgccuccucacaaaacaucacagaagaauuuuaccaaucaaccugcuccgccguauccaaaggauaccugagcgcccugagaaccggcugguacaccuccgucaucaccauagaacucuccaacaucaaagaaaacaaaugcaacgguacggacgccaaaguuaaacucaucaaacaagaacuugacaaauacaagaacgccgucacagaacugcaacuccucaugcaauccacccccgccgccggcuccggcuccgccauagccuccggcaucgccgucugcaaagucuuacaccuagaaggcgaagucaacaaaaucaaaaacgcacuacuuuccacaaacaaagccgucgucucacucuccaacggcguauccguccucaccuucaaaguacuugaccucaaaaacuacaucgacaaacaacuacuccccauccugaacaaacaauccugcucaaucuccaacaucgaaaccguaaucgaguuccaacagaaaaauaaucgccuccuggagaucacccgcgaguucuccgucaaugcaggagucacaaccccaguaucaaccuacaugcucaccaacuccgaacuccugucgcucaucaacgacaugcccaucacaaacgaccaaaagaaacucauguccaacaacguacaaaucgucagacaacaauccuauucuauaaugugcaucaucaaagaagaaguccucgccuacgucguacaacucccccucuacggcguuaucgacacccccugcuggaaacuccacaccucaccccucugcaccaccaacacaaaagaaggcuccaacaucugccucacucggaccgaccgcggcugguacugcgacaaugccggcagcgucuccuucuucccacaagccgaaaccugcaaaguccaguccaaccgcguauucugcgacacuaugaacuccagaacccuccccuccgaaguaaaccucugcaacaucgacaucuucaacccaaaauacgacugcaaaaucaugaccucaaaaaccgacgucagcucgucagucauaaccagccucggagccauagucucaugcuacggaaaaaccaaaugcaccgccagcaacaaaaaccgcggcauaauaaaaacauucuccaacggcugcgacuauguauccaacaaaggagucgauaccgucuccguaggcaacacccuauacuacgucaacaaacaagaaggcaaaucccucuacgucaaaggugaaccaaucaucaacuucuacgacccucucgucuuccccuccgaugaguucgacgccucaaucagccaaguaaacgaaaagauaaaccaaucacucgccuucauccgcaaauccgacgaacuucuucacaacgucaacgucggcaaaucuaccaccaacauaaugauaaccaccaucaucaucgucaucaucguaauacuccuccuucucaucgccgucggccuauuccuauacugcaaagcccgcuagggacuaguguccaccugucccuccugggcugcuggauugucucguuuuccugccaaauaaacaggaucagcgcuuuacagaucuaaaaaaaaaaaaaaaaaaaaaaaaaaaaaaaaaaaaaaaaaaaaaaaaaaaaaaaaaaaaaaaaugcaucccccccccccccccccccccccccccccccaaaggcucuuuucagagccaccagaauu

SEQ ID NO: 13628 - RNA, 1814 nt, Artificial Sequence
  mRNA product Design b-2 comprising derived and/or modified sequence from HRSV(Memphis-37)__AIY60640.1__F-del_DSCav1_mut0 (opt1)
gggagagccucugcuggaguccggggaguggcguuggcugcuagagcgaagcuuaccauggagcugcccauccucaagaccaacgccaucaccacgauccuggccgcggugacccugugcuucgccagcucccagaacaucaccgaggaguucuaccagagcacgugcuccgccgucagcaagggcuaccucuccgcccugcgcaccgggugguacaccagcgugaucaccaucgagcuguccaacaucaaggagaacaagugcaacggcaccgacgccaaggugaagcucaucaagcaggagcuggacaaguacaagaacgcggucacggagcugcagcuccugaugcagagcaccccggccgccggcuccgggagcgcgaucgccuccggcaucgccgucugcaaggugcugcaccucgagggcgaggugaacaagaucaagaacgcccugcuguccaccaacaaggccgucgugagccucuccaacggggugagcguccugaccuucaaggugcuggaccucaagaacuacaucgacaagcagcugcugcccauccugaacaagcagagcugcuccaucagcaacaucgagaccgucaucgaguuccagcagaagaacaaccgccuccuggagaucacgcgggaguucagcgugaacgcgggcgugaccacccccgucuccaccuacaugcugacgaacagcgagcuccugucccugaucaacgacaugccgaucaccaacgaccagaagaagcucaugagcaacaacgugcagaucgugcgccagcaguccuacagcaucaugugcaucaucaaggaggagguccuggccuacguggugcagcugccccucuacggggucaucgacacccccugcuggaagcugcacaccagcccccugugcacgaccaacaccaaggagggcuccaacaucugccucacccggacggaccgcgggugguacugcgacaacgccggcagcguguccuucuucccgcaggccgagaccugcaagguccagagcaaccggguguucugcgacaccaugaacucccggacccugcccagcgaggugaaccucugcaacaucgacaucuucaaccccaaguacgacugcaagaucaugacguccaagaccgacgucagcuccagcgugaucaccucccugggcgccaucgugagcugcuacgggaagaccaagugcacggcgagcaacaagaaccgcggcaucaucaagaccuucuccaacgggugcgacuacgucagcaacaagggcguggacaccguguccgucggcaacacccuguacuacgugaacaagcaggagggcaagagccucuacgugaagggggagcccaucaucaacuucuacgacccgcuggucuuccccuccgacgaguucgacgccagcaucucccaggugaacgagaagaucaaccagagccuggccuucauccggaaguccgacgagcuccugcacaacgugaacgucggcaagagcaccacgaacaucaugaucaccaccaucaucaucgugaucaucgugauccugcugcuccugaucgccgucgggcuguuccucuacugcaaggcccgcugaggacuaguguccaccugucccuccugggcugcuggauugucucguuuuccugccaaauaaacaggaucagcgcuuuacagaucuaaaaaaaaaaaaaaaaaaaaaaaaaaaaaaaaaaaaaaaaaaaaaaaaaaaaaaaaaaaaaaaaugcaucccccccccccccccccccccccccccccccaaaggcucuuuucagagccaccagaauu

SEQ ID NO: 13629 - RNA, 1814 nt, Artificial Sequence
  mRNA product Design b-2 comprising derived and/or modified sequence from HRSV(Memphis-37)__AIY60640.1__F-del_DSCav1_mut0 (opt1)
gggagagccucugcuggaguccggggaguggcguuggcugcuagagcgaagcuuaccauggagcugcccauccucaagaccaacgccaucaccacgauccuggccgcggugacccugugcuucgccagcucccagaacaucaccgaggaguucuaccagagcacgugcuccgccgucagcaagggcuaccucuccgcccugcgcaccgggugguacaccagcgugaucaccaucgagcuguccaacaucaaggagaacaagugcaacggcaccgacgccaaggugaagcucaucaagcaggagcuggacaaguacaagaacgcggucacggagcugcagcuccugaugcagagcaccccggccgccggguccggcagcgccaucgcguccgggaucgccgugugcaaggugcugcaccucgagggcgaggucaacaagaucaagaacgcccugcugagcaccaacaaggccguggugucccucagcaacggcgucuccgugcugaccuucaaggugcuggaccucaagaacuacaucgacaagcagcugcugcccauccucaacaagcagagcugcuccaucagcaacaucgagacggucaucgaguuccagcagaagaacaaccggcugcuggagaucacccgcgaguucuccgugaacgccggggugaccacccccgucagcacguacaugcucaccaacagcgagcugcugucccucaucaacgacaugcccaucaccaacgaccagaagaagcugaugagcaacaacgugcagaucgugcggcagcaguccuacagcaucaugugcaucaucaaggaggagguccuggcguacguggugcagcucccgcuguacggcgucaucgacacccccugcuggaagcugcacacgagcccccucugcaccaccaacaccaaggagggguccaacaucugccugacgcgcaccgaccggggcugguacugcgacaacgccggguccgugagcuucuucccccaggccgagaccugcaaggugcaguccaaccgcgucuucugcgacaccaugaacagccggacgcucccguccgaggugaaccugugcaacaucgacaucuucaaccccaaguacgacugcaagaucaugaccagcaagaccgacgucuccagcuccgugaucaccagccugggcgccaucguguccugcuacggcaagacgaagugcaccgccagcaacaagaaccgggggaucaucaagaccuucuccaacggcugcgacuacgucagcaacaaggggguggacaccgugagcgucggcaacacgcucuacuacgugaacaagcaggagggcaagucccuguacgugaagggggagcccaucaucaacuucuacgacccccuggucuucccgagcgacgaguucgacgcguccaucagccaggugaacgagaagaucaaccagucccucgccuucauccgcaagagcgacgagcugcugcacaacgugaacgucggcaaguccaccaccaacaucaugaucaccaccaucaucaucgugaucaucgugauccuccugcugcucaucgccgucgggcuguuccuguacugcaaggcccggugaggacuaguguccaccugucccuccugggcugcuggauugucucguuuuccugccaaauaaacaggaucagcgcuuuacagaucuaaaaaaaaaaaaaaaaaaaaaaaaaaaaaaaaaaaaaaaaaaaaaaaaaaaaaaaaaaaaaaaaugcaucccccccccccccccccccccccccccccccaaaggcucuuuucagagccaccagaauu

SEQ ID NO: 13630 - RNA, 1814 nt, Artificial Sequence
  mRNA product Design b-2 comprising derived and/or modified sequence from HRSV(Memphis-37)__AIY60640.1__F-del_DSCav1_mut0 (opt2)
gggagagccucugcuggaguccggggaguggcguuggcugcuagagcgaagcuuaccauggagcuccccauccucaagaccaacgccaucaccaccauccucgccgccgucacccucugcuucgccuccucccagaacaucaccgaggaguucuaccaguccaccugcuccgccgucuccaagggcuaccucuccgcccuccgcaccggcugguacaccuccgucaucaccaucgagcucuccaacaucaaggagaacaagugcaacggcaccgacgccaaggucaagcucaucaagcaggagcucgacaaguacaagaacgccgucaccgagcuccagcuccucaugcaguccacccccgccgccggcuccggcuccgccaucgccuccggcaucgccgucugcaagguccuccaccucgagggcgaggucaacaagaucaagaacgcccuccucuccaccaacaaggccgucgucucccucuccaacggcgucuccguccucaccuucaagguccucgaccucaagaacuacaucgacaagcagcuccuccccauccucaacaagcaguccugcuccaucuccaacaucgagaccgucaucgaguuccagcagaagaacaaccgccuccucgagaucacccgcgaguucuccgucaacgccggcgucaccacccccgucuccaccuacaugcucaccaacuccgagcuccucucccucaucaacgacaugcccaucaccaacgaccagaagaagcucauguccaacaacguccagaucguccgccagcaguccuacuccaucaugugcaucaucaaggaggagguccucgccuacgucguccagcucccccucuacggcgucaucgacacccccugcuggaagcuccacaccuccccccucugcaccaccaacaccaaggagggcuccaacaucugccucacccgcaccgaccgcggcugguacugcgacaacgccggcuccgucuccuucuucccccaggccgagaccugcaagguccaguccaaccgcgucuucugcgacaccaugaacucccgcacccuccccuccgaggucaaccucugcaacaucgacaucuucaaccccaaguacgacugcaagaucaugaccuccaagaccgacgucuccuccuccgucaucaccucccucggcgccaucgucuccugcuacggcaagaccaagugcaccgccuccaacaagaaccgcggcaucaucaagaccuucuccaacggcugcgacuacgucuccaacaagggcgucgacaccgucuccgucggcaacacccucuacuacgucaacaagcaggagggcaagucccucuacgucaagggcgagcccaucaucaacuucuacgacccccucgucuuccccuccgacgaguucgacgccuccaucucccaggucaacgagaagaucaaccagucccucgccuucauccgcaaguccgacgagcuccuccacaacgucaacgucggcaaguccaccaccaacaucaugaucaccaccaucaucaucgucaucaucgucauccuccuccuccucaucgccgucggccucuuccucuacugcaaggcccgcugaggacuaguguccaccugucccuccugggcugcuggauugucucguuuuccugccaaauaaacaggaucagcgcuuuacagaucuaaaaaaaaaaaaaaaaaaaaaaaaaaaaaaaaaaaaaaaaaaaaaaaaaaaaaaaaaaaaaaaaugcaucccccccccccccccccccccccccccccccaaaggcucuuuucagagccaccagaauu

SEQ ID NO: 13631 - RNA, 1814 nt, Artificial Sequence
  mRNA product Design b-2 comprising derived and/or modified sequence from HRSV(Memphis-37)__AIY60640.1__F-del_DSCav1_mut0 (opt3)
gggagagccucugcuggaguccggggaguggcguuggcugcuagagcgaagcuuaccauggagcugcccauccucaagaccaacgccauuacaacuauacuugcugcagugacgcugugcuucgccagcucccagaauaucaccgaagaguuuuaccaaucuacauguucagcggucaguaaaggcuauuugagcgcuuuaagaacugggugguacaccuccguuauuacaaucgaacugucuaacauuaaggagaauaaaugcaacggaaccgacgccaaggugaaacuaaucaagcaggaacucgauaaguauaaaaaugcaguaacugagcugcagcuucugaugcagucgaccccugccgcugguucaggcagcgcaauagccagugggaucgcuguguguaaggucuugcaccucgagggagaagugaacaaaauuaagaaugcccugcuguccacaaacaaagcgguugugucucucagcaauggcgucuccguguuaacguucaagguacuggaccuuaagaacuacaucgauaaacaauugcugccaauucuaaauaagcagucaugcaguaucagcaacauagagacuguuauugaauuucagcagaaaaauaacaggcuccuggagaucacccgggaguucucugugaaugccggugucacaacuccgguguccaccuauaugcuuacaaacucagaacuguugagccucauuaacgacaugcccaucaccaaugaucaaaagaaacugaugaguaacaaugugcagaucguccgccagcagucuuacuccauuauguguauaaucaaggaggaaguuuuagcauaugugguacaacugccucucuacggggugauugacacgccaugcuggaaacuucauacuagcccccuguguacaaccaacacuaaggagggaucgaauaucugcuugacacgaaccgaucguggcugguacugugacaacgcuggcucugucuccuuuuucccucaggccgaaacgugcaaggugcagucaaauagaguguuuugugauaccaugaacaguagaacacugccaagcgaggugaaucucugcaacauagacauuuucaaucccaaauaugauugcaagaucaugacuuccaaaaccgacgucucuagcucagugaucacaagucugggggcaauuguauccuguuacggaaagacuaaaugcaccgcuagcaacaagaauagggguaucauuaagacauuuucuaacggcugugauuauguuucaaauaaagggguggacaccgucagugugggaaacacucuuuacuaugucaacaagcaagagggcaaaagccuguacgugaagggugaaccuauaaucaauuucuaugacccauugguuuuuccguccgaugaguucgacgccucuauuucgcagguuaacgagaaaaucaaucagagccucgcguuuauccggaaguccgaugaacuguuacacaacguaaaugucgggaagucaacgacaaacauuaugauaaccacuaucauuaucgugauuaucguuauacugcuacuccugaucgccgugggacuuuucuuguacugcaaagcacgcugaggacuaguguccaccugucccuccugggcugcuggauugucucguuuuccugccaaauaaacaggaucagcgcuuuacagaucuaaaaaaaaaaaaaaaaaaaaaaaaaaaaaaaaaaaaaaaaaaaaaaaaaaaaaaaaaaaaaaaaugcaucccccccccccccccccccccccccccccccaaaggcucuuuucagagccaccagaauu

SEQ ID NO: 13632 - RNA, 1814 nt, Artificial Sequence
  mRNA product Design b-2 comprising derived and/or modified sequence from HRSV(Memphis-37)__AIY60640.1__F-del_DSCav1_mut0 (opt4)
gggagagccucugcuggaguccggggaguggcguuggcugcuagagcgaagcuuaccauggagcugcccauccugaagaccaacgccaucaccaccauccuggccgccgugacccugugcuucgccagcagccagaacaucaccgaggaguucuaccagagcaccugcagcgccgugagcaagggcuaccugagcgcccugagaaccggcugguacaccagcgugaucaccaucgagcugagcaacaucaaggagaacaagugcaacggcaccgacgccaaggugaagcugaucaagcaggagcuggacaaguacaagaacgccgugaccgagcugcagcugcugaugcagagcacccccgccgccggcagcggcagcgccaucgccagcggcaucgccgugugcaaggugcugcaccuggagggcgaggugaacaagaucaagaacgcccugcugagcaccaacaaggccguggugagccugagcaacggcgugagcgugcugaccuucaaggugcuggaccugaagaacuacaucgacaagcagcugcugcccauccugaacaagcagagcugcagcaucagcaacaucgagaccgugaucgaguuccagcagaagaacaacagacugcuggagaucaccagagaguucagcgugaacgccggcgugaccacccccgugagcaccuacaugcugaccaacagcgagcugcugagccugaucaacgacaugcccaucaccaacgaccagaagaagcugaugagcaacaacgugcagaucgugagacagcagagcuacagcaucaugugcaucaucaaggaggaggugcuggccuacguggugcagcugccccuguacggcgugaucgacacccccugcuggaagcugcacaccagcccccugugcaccaccaacaccaaggagggcagcaacaucugccugaccagaaccgacagaggcugguacugcgacaacgccggcagcgugagcuucuucccccaggccgagaccugcaaggugcagagcaacagaguguucugcgacaccaugaacagcagaacccugcccagcgaggugaaccugugcaacaucgacaucuucaaccccaaguacgacugcaagaucaugaccagcaagaccgacgugagcagcagcgugaucaccagccugggcgccaucgugagcugcuacggcaagaccaagugcaccgccagcaacaagaacagaggcaucaucaagaccuucagcaacggcugcgacuacgugagcaacaagggcguggacaccgugagcgugggcaacacccuguacuacgugaacaagcaggagggcaagagccuguacgugaagggcgagcccaucaucaacuucuacgacccccugguguuccccagcgacgaguucgacgccagcaucagccaggugaacgagaagaucaaccagagccuggccuucaucagaaagagcgacgagcugcugcacaacgugaacgugggcaagagcaccaccaacaucaugaucaccaccaucaucaucgugaucaucgugauccugcugcugcugaucgccgugggccuguuccuguacugcaaggccagaugaggacuaguguccaccugucccuccugggcugcuggauugucucguuuuccugccaaauaaacaggaucagcgcuuuacagaucuaaaaaaaaaaaaaaaaaaaaaaaaaaaaaaaaaaaaaaaaaaaaaaaaaaaaaaaaaaaaaaaaugcaucccccccccccccccccccccccccccccccaaaggcucuuuucagagccaccagaauu

SEQ ID NO: 13633 - RNA, 1814 nt, Artificial Sequence
  mRNA product Design b-2 comprising derived and/or modified sequence from HRSV(Memphis-37)__AIY60640.1__F-del_DSCav1_mut0 (opt5)
gggagagccucugcuggaguccggggaguggcguuggcugcuagagcgaagcuuaccauggagcugcccauccucaagaccaacgccauuacaacgauccuggcugccgugacccuuugcuucgcgagcucccagaauauuacagaagaguuuuaccaaucuaccuguagcgcugucuccaaaggcuaucugucugcccucagaacagggugguacaccagcguuaucacaauugaacuguccaacaucaaggagaauaaaugcaacggaaccgacgccaaggugaaacuuaucaagcaggaacuggauaaguauaaaaaugcugugacggagcuccagcugcugaugcagucuaccccugccgcuggcagcggguccgccauugcgagcggaaucgccgucuguaaggugcuccaccuggagggcgaaguuaacaaaauuaagaaugcccuucugucuacaaacaaagcuguggucucccucagcaauggggugucuguucugaccuucaaggugcuugaccugaagaacuacaucgauaaacaacuccugccgauucugaauaagcaguccugcagcaucucuaacauugagacagucaucgaauuucagcagaaaaauaaccggcuccuggagaucacccgcgaguucuccgugaaugcuggagugacgacacccgucagcaccuauaugcuuacaaacuccgaacugcucucucugauuaacgacaugccuaucaccaaugaucaaaagaaacuuaugagcaacaauguucagauugugagacagcaguccuacagcaucauguguauuaucaaggaggaagugcuggccuaugucgugcaacucccccuguacggcguuaucgacaccccuugcuggaaacugcauacaucuccccucuguacgaccaacacaaaggagggcuccaauauuugccugacccggacagaucgcgggugguacugugacaacgcgggaagcgugagcuuuuucccucaggccgaaaccugcaagguccagucuaauagaguguuuugugauacgaugaacuccagaacacugccgucugagguuaaucucugcaacaucgacauuuucaaucccaaauaugauugcaagaucaugaccagcaaaaccgacguguccagcucugucauuacaucccugggcgcuaucgugagcuguuacgggaagaccaaaugcacagccucuaacaagaaucggggaaucauuaagacguuuuccaacggcugugauuaugucagcaauaaagggguggacaccguuuccgugggaaacacacuuuacuaugucaacaagcaagagggcaaaucucuguacgugaagggcgaaccuaucauuaauuucuaugacccccucguuuuuccuagcgaugaguucgacgcuuccaucucucaggugaacgaaaagauuaaucagagccuggccuuuauccgcaaguccgaugagcugcuccacaacgucaauguggggaaaagcaccacaaacauuaugaucaccacgaucauuaucgugauuaucguuauucugcuucugcucaucgccgucggacuguuccuguacugcaaagcuagaugaggacuaguguccaccugucccuccugggcugcuggauugucucguuuuccugccaaauaaacaggaucagcgcuuuacagaucuaaaaaaaaaaaaaaaaaaaaaaaaaaaaaaaaaaaaaaaaaaaaaaaaaaaaaaaaaaaaaaaaugcaucccccccccccccccccccccccccccccccaaaggcucuuuucagagccaccagaauu

SEQ ID NO: 13634 - RNA, 1814 nt, Artificial Sequence
  mRNA product Design b-2 comprising derived and/or modified sequence from HRSV(Memphis-37)__AIY60640.1__F-del_DSCav1_mut0 (opt6)
gggagagccucugcuggaguccggggaguggcguuggcugcuagagcgaagcuuaccauggaacucccaauacuuaaaacaaacgcaaucacaacaauacuagcugcagucacacuaugcuucgccucaucacaaaauauaacagaagaauuuuaucaaucaacaugcuccgcaguaucaaaaggauaucucucugcauuacgaacagguugguacaccucgguaauaacaauagaauuaucaaacauaaaagaaaauaaaugcaauggaaccgaugccaaaguaaaacuaaucaaacaagaacuugacaaauacaaaaacgcaguaacagaacuacaacuauuaaugcaaucaacaccagcagcagguucaggcuccgcaaucgcuucaggaauagccguuuguaaaguacuacacuuagaaggagaaguaaauaaaauaaaaaacgccuuacuaucaacaaacaaagcaguagucucccuuuccaacggaguaucagucuuaacuuuuaaaguacucgacuuaaaaaauuacaucgacaaacaacuacuacccauucuaaauaaacaaucaugcucaauaucaaacaucgaaacaguaaucgaauuucaacaaaaaaauaauagauuacuagaaauaacacgagaauuuuccguaaaugccggaguaacgaccccagucucaacauacauguuaacaaacucagaauuacuaucacucauuaacgauaugccaauaacaaaugaccaaaaaaaacuaaugucaaacaacguccaaauaguacgacaacaaucauacucuaucauguguauaauaaaagaagaaguuuuagcauacguaguacaacuaccacuuuacggagucauagacaccccaugcuggaaacuacacacaucacccuuauguacaacaaacaccaaagaagggucuaacauaugucucacuagaacagaucgaggcugguacugcgacaacgcaggaucaguuagcuuuuucccucaagccgaaaccuguaaaguacaauccaaucgaguauuuugcgacacuaugaacucuagaaccuuacccuccgaaguaaaccuauguaacauagacauauuuaaucccaaauaugauugcaaaaucaugacauccaaaacagauguaucaagcucuguaauaaccucacuaggagcaauaguuucaugcuaugguaaaacaaaaugcaccgccucaaacaaaaauagagggauaaucaaaaccuucucaaauggaugcgacuacguaucaaauaaaggaguagacaccgucuccguaggaaacacacuauacuacguaaacaaacaagaaggaaaaucacuauacguaaaaggagaaccaaucauaaacuucuacgacccacuuguuuucccaucagaugaauuugaugccuccauaucacaaguaaacgaaaaaauaaaccaaucucuagccuucaucagaaaauccgacgaacuuuuacacaacguaaacguagguaaaucaacaaccaacaucaugauaacaacaauaauaauaguaauaauuguaauacuuuuacuacuuaucgccguaggccuauucuuauauuguaaagcaagaugaggacuaguguccaccugucccuccugggcugcuggauugucucguuuuccugccaaauaaacaggaucagcgcuuuacagaucuaaaaaaaaaaaaaaaaaaaaaaaaaaaaaaaaaaaaaaaaaaaaaaaaaaaaaaaaaaaaaaaaugcaucccccccccccccccccccccccccccccccaaaggcucuuuucagagccaccagaauu

SEQ ID NO: 13635 - RNA, 1814 nt, Artificial Sequence
  mRNA product Design b-2 comprising derived and/or modified sequence from HRSV(Memphis-37)__AIY60640.1__F-del_DSCav1_mut0 (opt11)
gggagagccucugcuggaguccggggaguggcguuggcugcuagagcgaagcuuaccauggaacuaccaauccucaaaaccaacgccaucacuacaauccuagccgcgguaacccugugcuucgccuccucacaaaacaucacagaagaauuuuaccaaucaaccugcuccgccguauccaaaggauaccugagcgcccugagaaccggcugguacaccuccgucaucaccauagaacucuccaacaucaaagaaaacaaaugcaacgguacggacgccaaaguuaaacucaucaaacaagaacuugacaaauacaagaacgccgucacagaacugcaacuccucaugcaauccacccccgccgccggcuccggcuccgccauagccuccggcaucgccgucugcaaagucuuacaccuagaaggcgaagucaacaaaaucaaaaacgcacuacuuuccacaaacaaagccgucgucucacucuccaacggcguauccguccucaccuucaaaguacuugaccucaaaaacuacaucgacaaacaacuacuccccauccugaacaaacaauccugcucaaucuccaacaucgaaaccguaaucgaguuccaacagaaaaauaaucgccuccuggagaucacccgcgaguucuccgucaaugcaggagucacaaccccaguaucaaccuacaugcucaccaacuccgaacuccugucgcucaucaacgacaugcccaucacaaacgaccaaaagaaacucauguccaacaacguacaaaucgucagacaacaauccuauucuauaaugugcaucaucaaagaagaaguccucgccuacgucguacaacucccccucuacggcguuaucgacacccccugcuggaaacuccacaccucaccccucugcaccaccaacacaaaagaaggcuccaacaucugccucacucggaccgaccgcggcugguacugcgacaaugccggcagcgucuccuucuucccacaagccgaaaccugcaaaguccaguccaaccgcguauucugcgacacuaugaacuccagaacccuccccuccgaaguaaaccucugcaacaucgacaucuucaacccaaaauacgacugcaaaaucaugaccucaaaaaccgacgucagcucgucagucauaaccagccucggagccauagucucaugcuacggaaaaaccaaaugcaccgccagcaacaaaaaccgcggcauaauaaaaacauucuccaacggcugcgacuauguauccaacaaaggagucgauaccgucuccguaggcaacacccuauacuacgucaacaaacaagaaggcaaaucccucuacgucaaaggugaaccaaucaucaacuucuacgacccucucgucuuccccuccgaugaguucgacgccucaaucagccaaguaaacgaaaagauaaaccaaucacucgccuucauccgcaaauccgacgaacuucuucacaacgucaacgucggcaaaucuaccaccaacauaaugauaaccaccaucaucaucgucaucaucguaauacuccuccuucucaucgccgucggccuauuccuauacugcaaagcccgcuagggacuaguguccaccugucccuccugggcugcuggauugucucguuuuccugccaaauaaacaggaucagcgcuuuacagaucuaaaaaaaaaaaaaaaaaaaaaaaaaaaaaaaaaaaaaaaaaaaaaaaaaaaaaaaaaaaaaaaaugcaucccccccccccccccccccccccccccccccaaaggcucuuuucagagccaccagaauu

SEQ ID NO: 13636 - RNA, 1834 nt, Artificial Sequence
  mRNA product Design b-3 comprising derived and/or modified sequence from HRSV(Memphis-37)__AIY60640.1__F-del_DSCav1_mut0 (opt1)
gggagagucccgcagucggcguccagcggcucugcuuguucgugugugugucguugcaggccuuauucaagcuuaccauggagcugcccauccucaagaccaacgccaucaccacgauccuggccgcggugacccugugcuucgccagcucccagaacaucaccgaggaguucuaccagagcacgugcuccgccgucagcaagggcuaccucuccgcccugcgcaccgggugguacaccagcgugaucaccaucgagcuguccaacaucaaggagaacaagugcaacggcaccgacgccaaggugaagcucaucaagcaggagcuggacaaguacaagaacgcggucacggagcugcagcuccugaugcagagcaccccggccgccggcuccgggagcgcgaucgccuccggcaucgccgucugcaaggugcugcaccucgagggcgaggugaacaagaucaagaacgcccugcuguccaccaacaaggccgucgugagccucuccaacggggugagcguccugaccuucaaggugcuggaccucaagaacuacaucgacaagcagcugcugcccauccugaacaagcagagcugcuccaucagcaacaucgagaccgucaucgaguuccagcagaagaacaaccgccuccuggagaucacgcgggaguucagcgugaacgcgggcgugaccacccccgucuccaccuacaugcugacgaacagcgagcuccugucccugaucaacgacaugccgaucaccaacgaccagaagaagcucaugagcaacaacgugcagaucgugcgccagcaguccuacagcaucaugugcaucaucaaggaggagguccuggccuacguggugcagcugccccucuacggggucaucgacacccccugcuggaagcugcacaccagcccccugugcacgaccaacaccaaggagggcuccaacaucugccucacccggacggaccgcgggugguacugcgacaacgccggcagcguguccuucuucccgcaggccgagaccugcaagguccagagcaaccggguguucugcgacaccaugaacucccggacccugcccagcgaggugaaccucugcaacaucgacaucuucaaccccaaguacgacugcaagaucaugacguccaagaccgacgucagcuccagcgugaucaccucccugggcgccaucgugagcugcuacgggaagaccaagugcacggcgagcaacaagaaccgcggcaucaucaagaccuucuccaacgggugcgacuacgucagcaacaagggcguggacaccguguccgucggcaacacccuguacuacgugaacaagcaggagggcaagagccucuacgugaagggggagcccaucaucaacuucuacgacccgcuggucuuccccuccgacgaguucgacgccagcaucucccaggugaacgagaagaucaaccagagccuggccuucauccggaaguccgacgagcuccugcacaacgugaacgucggcaagagcaccacgaacaucaugaucaccaccaucaucaucgugaucaucgugauccugcugcuccugaucgccgucgggcuguuccucuacugcaaggcccgcugaggacuaguguccaccugucccuccugggcugcuggauugucucguuuuccugccaaauaaacaggaucagcgcuuuacagaucuaaaaaaaaaaaaaaaaaaaaaaaaaaaaaaaaaaaaaaaaaaaaaaaaaaaaaaaaaaaaaaaaugcaucccccccccccccccccccccccccccccccaaaggcucuuuucagagccaccagaauu

SEQ ID NO: 13637 - RNA, 1834 nt, Artificial Sequence
  mRNA product Design b-3 comprising derived and/or modified sequence from HRSV(Memphis-37)__AIY60640.1__F-del_DSCav1_mut0 (opt1)
gggagagucccgcagucggcguccagcggcucugcuuguucgugugugugucguugcaggccuuauucaagcuuaccauggagcugcccauccucaagaccaacgccaucaccacgauccuggccgcggugacccugugcuucgccagcucccagaacaucaccgaggaguucuaccagagcacgugcuccgccgucagcaagggcuaccucuccgcccugcgcaccgggugguacaccagcgugaucaccaucgagcuguccaacaucaaggagaacaagugcaacggcaccgacgccaaggugaagcucaucaagcaggagcuggacaaguacaagaacgcggucacggagcugcagcuccugaugcagagcaccccggccgccggguccggcagcgccaucgcguccgggaucgccgugugcaaggugcugcaccucgagggcgaggucaacaagaucaagaacgcccugcugagcaccaacaaggccguggugucccucagcaacggcgucuccgugcugaccuucaaggugcuggaccucaagaacuacaucgacaagcagcugcugcccauccucaacaagcagagcugcuccaucagcaacaucgagacggucaucgaguuccagcagaagaacaaccggcugcuggagaucacccgcgaguucuccgugaacgccggggugaccacccccgucagcacguacaugcucaccaacagcgagcugcugucccucaucaacgacaugcccaucaccaacgaccagaagaagcugaugagcaacaacgugcagaucgugcggcagcaguccuacagcaucaugugcaucaucaaggaggagguccuggcguacguggugcagcucccgcuguacggcgucaucgacacccccugcuggaagcugcacacgagcccccucugcaccaccaacaccaaggagggguccaacaucugccugacgcgcaccgaccggggcugguacugcgacaacgccggguccgugagcuucuucccccaggccgagaccugcaaggugcaguccaaccgcgucuucugcgacaccaugaacagccggacgcucccguccgaggugaaccugugcaacaucgacaucuucaaccccaaguacgacugcaagaucaugaccagcaagaccgacgucuccagcuccgugaucaccagccugggcgccaucguguccugcuacggcaagacgaagugcaccgccagcaacaagaaccgggggaucaucaagaccuucuccaacggcugcgacuacgucagcaacaaggggguggacaccgugagcgucggcaacacgcucuacuacgugaacaagcaggagggcaagucccuguacgugaagggggagcccaucaucaacuucuacgacccccuggucuucccgagcgacgaguucgacgcguccaucagccaggugaacgagaagaucaaccagucccucgccuucauccgcaagagcgacgagcugcugcacaacgugaacgucggcaaguccaccaccaacaucaugaucaccaccaucaucaucgugaucaucgugauccuccugcugcucaucgccgucgggcuguuccuguacugcaaggcccggugaggacuaguguccaccugucccuccugggcugcuggauugucucguuuuccugccaaauaaacaggaucagcgcuuuacagaucuaaaaaaaaaaaaaaaaaaaaaaaaaaaaaaaaaaaaaaaaaaaaaaaaaaaaaaaaaaaaaaaaugcaucccccccccccccccccccccccccccccccaaaggcucuuuucagagccaccagaauu

SEQ ID NO: 13638 - RNA, 1834 nt, Artificial Sequence
  mRNA product Design b-3 comprising derived and/or modified sequence from HRSV(Memphis-37)__AIY60640.1__F-del_DSCav1_mut0 (opt2)
gggagagucccgcagucggcguccagcggcucugcuuguucgugugugugucguugcaggccuuauucaagcuuaccauggagcuccccauccucaagaccaacgccaucaccaccauccucgccgccgucacccucugcuucgccuccucccagaacaucaccgaggaguucuaccaguccaccugcuccgccgucuccaagggcuaccucuccgcccuccgcaccggcugguacaccuccgucaucaccaucgagcucuccaacaucaaggagaacaagugcaacggcaccgacgccaaggucaagcucaucaagcaggagcucgacaaguacaagaacgccgucaccgagcuccagcuccucaugcaguccacccccgccgccggcuccggcuccgccaucgccuccggcaucgccgucugcaagguccuccaccucgagggcgaggucaacaagaucaagaacgcccuccucuccaccaacaaggccgucgucucccucuccaacggcgucuccguccucaccuucaagguccucgaccucaagaacuacaucgacaagcagcuccuccccauccucaacaagcaguccugcuccaucuccaacaucgagaccgucaucgaguuccagcagaagaacaaccgccuccucgagaucacccgcgaguucuccgucaacgccggcgucaccacccccgucuccaccuacaugcucaccaacuccgagcuccucucccucaucaacgacaugcccaucaccaacgaccagaagaagcucauguccaacaacguccagaucguccgccagcaguccuacuccaucaugugcaucaucaaggaggagguccucgccuacgucguccagcucccccucuacggcgucaucgacacccccugcuggaagcuccacaccuccccccucugcaccaccaacaccaaggagggcuccaacaucugccucacccgcaccgaccgcggcugguacugcgacaacgccggcuccgucuccuucuucccccaggccgagaccugcaagguccaguccaaccgcgucuucugcgacaccaugaacucccgcacccuccccuccgaggucaaccucugcaacaucgacaucuucaaccccaaguacgacugcaagaucaugaccuccaagaccgacgucuccuccuccgucaucaccucccucggcgccaucgucuccugcuacggcaagaccaagugcaccgccuccaacaagaaccgcggcaucaucaagaccuucuccaacggcugcgacuacgucuccaacaagggcgucgacaccgucuccgucggcaacacccucuacuacgucaacaagcaggagggcaagucccucuacgucaagggcgagcccaucaucaacuucuacgacccccucgucuuccccuccgacgaguucgacgccuccaucucccaggucaacgagaagaucaaccagucccucgccuucauccgcaaguccgacgagcuccuccacaacgucaacgucggcaaguccaccaccaacaucaugaucaccaccaucaucaucgucaucaucgucauccuccuccuccucaucgccgucggccucuuccucuacugcaaggcccgcugaggacuaguguccaccugucccuccugggcugcuggauugucucguuuuccugccaaauaaacaggaucagcgcuuuacagaucuaaaaaaaaaaaaaaaaaaaaaaaaaaaaaaaaaaaaaaaaaaaaaaaaaaaaaaaaaaaaaaaaugcaucccccccccccccccccccccccccccccccaaaggcucuuuucagagccaccagaauu

SEQ ID NO: 13639 - RNA, 1834 nt, Artificial Sequence
  mRNA product Design b-3 comprising derived and/or modified sequence from HRSV(Memphis-37)__AIY60640.1__F-del_DSCav1_mut0 (opt3)
gggagagucccgcagucggcguccagcggcucugcuuguucgugugugugucguugcaggccuuauucaagcuuaccauggagcugcccauccucaagaccaacgccauuacaacuauacuugcugcagugacgcugugcuucgccagcucccagaauaucaccgaagaguuuuaccaaucuacauguucagcggucaguaaaggcuauuugagcgcuuuaagaacugggugguacaccuccguuauuacaaucgaacugucuaacauuaaggagaauaaaugcaacggaaccgacgccaaggugaaacuaaucaagcaggaacucgauaaguauaaaaaugcaguaacugagcugcagcuucugaugcagucgaccccugccgcugguucaggcagcgcaauagccagugggaucgcuguguguaaggucuugcaccucgagggagaagugaacaaaauuaagaaugcccugcuguccacaaacaaagcgguugugucucucagcaauggcgucuccguguuaacguucaagguacuggaccuuaagaacuacaucgauaaacaauugcugccaauucuaaauaagcagucaugcaguaucagcaacauagagacuguuauugaauuucagcagaaaaauaacaggcuccuggagaucacccgggaguucucugugaaugccggugucacaacuccgguguccaccuauaugcuuacaaacucagaacuguugagccucauuaacgacaugcccaucaccaaugaucaaaagaaacugaugaguaacaaugugcagaucguccgccagcagucuuacuccauuauguguauaaucaaggaggaaguuuuagcauaugugguacaacugccucucuacggggugauugacacgccaugcuggaaacuucauacuagcccccuguguacaaccaacacuaaggagggaucgaauaucugcuugacacgaaccgaucguggcugguacugugacaacgcuggcucugucuccuuuuucccucaggccgaaacgugcaaggugcagucaaauagaguguuuugugauaccaugaacaguagaacacugccaagcgaggugaaucucugcaacauagacauuuucaaucccaaauaugauugcaagaucaugacuuccaaaaccgacgucucuagcucagugaucacaagucugggggcaauuguauccuguuacggaaagacuaaaugcaccgcuagcaacaagaauagggguaucauuaagacauuuucuaacggcugugauuauguuucaaauaaagggguggacaccgucagugugggaaacacucuuuacuaugucaacaagcaagagggcaaaagccuguacgugaagggugaaccuauaaucaauuucuaugacccauugguuuuuccguccgaugaguucgacgccucuauuucgcagguuaacgagaaaaucaaucagagccucgcguuuauccggaaguccgaugaacuguuacacaacguaaaugucgggaagucaacgacaaacauuaugauaaccacuaucauuaucgugauuaucguuauacugcuacuccugaucgccgugggacuuuucuuguacugcaaagcacgcugaggacuaguguccaccugucccuccugggcugcuggauugucucguuuuccugccaaauaaacaggaucagcgcuuuacagaucuaaaaaaaaaaaaaaaaaaaaaaaaaaaaaaaaaaaaaaaaaaaaaaaaaaaaaaaaaaaaaaaaugcaucccccccccccccccccccccccccccccccaaaggcucuuuucagagccaccagaauu

SEQ ID NO: 13640 - RNA, 1834 nt, Artificial Sequence
  mRNA product Design b-3 comprising derived and/or modified sequence from HRSV(Memphis-37)__AIY60640.1__F-del_DSCav1_mut0 (opt4)
gggagagucccgcagucggcguccagcggcucugcuuguucgugugugugucguugcaggccuuauucaagcuuaccauggagcugcccauccugaagaccaacgccaucaccaccauccuggccgccgugacccugugcuucgccagcagccagaacaucaccgaggaguucuaccagagcaccugcagcgccgugagcaagggcuaccugagcgcccugagaaccggcugguacaccagcgugaucaccaucgagcugagcaacaucaaggagaacaagugcaacggcaccgacgccaaggugaagcugaucaagcaggagcuggacaaguacaagaacgccgugaccgagcugcagcugcugaugcagagcacccccgccgccggcagcggcagcgccaucgccagcggcaucgccgugugcaaggugcugcaccuggagggcgaggugaacaagaucaagaacgcccugcugagcaccaacaaggccguggugagccugagcaacggcgugagcgugcugaccuucaaggugcuggaccugaagaacuacaucgacaagcagcugcugcccauccugaacaagcagagcugcagcaucagcaacaucgagaccgugaucgaguuccagcagaagaacaacagacugcuggagaucaccagagaguucagcgugaacgccggcgugaccacccccgugagcaccuacaugcugaccaacagcgagcugcugagccugaucaacgacaugcccaucaccaacgaccagaagaagcugaugagcaacaacgugcagaucgugagacagcagagcuacagcaucaugugcaucaucaaggaggaggugcuggccuacguggugcagcugccccuguacggcgugaucgacacccccugcuggaagcugcacaccagcccccugugcaccaccaacaccaaggagggcagcaacaucugccugaccagaaccgacagaggcugguacugcgacaacgccggcagcgugagcuucuucccccaggccgagaccugcaaggugcagagcaacagaguguucugcgacaccaugaacagcagaacccugcccagcgaggugaaccugugcaacaucgacaucuucaaccccaaguacgacugcaagaucaugaccagcaagaccgacgugagcagcagcgugaucaccagccugggcgccaucgugagcugcuacggcaagaccaagugcaccgccagcaacaagaacagaggcaucaucaagaccuucagcaacggcugcgacuacgugagcaacaagggcguggacaccgugagcgugggcaacacccuguacuacgugaacaagcaggagggcaagagccuguacgugaagggcgagcccaucaucaacuucuacgacccccugguguuccccagcgacgaguucgacgccagcaucagccaggugaacgagaagaucaaccagagccuggccuucaucagaaagagcgacgagcugcugcacaacgugaacgugggcaagagcaccaccaacaucaugaucaccaccaucaucaucgugaucaucgugauccugcugcugcugaucgccgugggccuguuccuguacugcaaggccagaugaggacuaguguccaccugucccuccugggcugcuggauugucucguuuuccugccaaauaaacaggaucagcgcuuuacagaucuaaaaaaaaaaaaaaaaaaaaaaaaaaaaaaaaaaaaaaaaaaaaaaaaaaaaaaaaaaaaaaaaugcaucccccccccccccccccccccccccccccccaaaggcucuuuucagagccaccagaauu

SEQ ID NO: 13641 - RNA, 1834 nt, Artificial Sequence
  mRNA product Design b-3 comprising derived and/or modified sequence from HRSV(Memphis-37)__AIY60640.1__F-del_DSCav1_mut0 (opt5)
gggagagucccgcagucggcguccagcggcucugcuuguucgugugugugucguugcaggccuuauucaagcuuaccauggagcugcccauccucaagaccaacgccauuacaacgauccuggcugccgugacccuuugcuucgcgagcucccagaauauuacagaagaguuuuaccaaucuaccuguagcgcugucuccaaaggcuaucugucugcccucagaacagggugguacaccagcguuaucacaauugaacuguccaacaucaaggagaauaaaugcaacggaaccgacgccaaggugaaacuuaucaagcaggaacuggauaaguauaaaaaugcugugacggagcuccagcugcugaugcagucuaccccugccgcuggcagcggguccgccauugcgagcggaaucgccgucuguaaggugcuccaccuggagggcgaaguuaacaaaauuaagaaugcccuucugucuacaaacaaagcuguggucucccucagcaauggggugucuguucugaccuucaaggugcuugaccugaagaacuacaucgauaaacaacuccugccgauucugaauaagcaguccugcagcaucucuaacauugagacagucaucgaauuucagcagaaaaauaaccggcuccuggagaucacccgcgaguucuccgugaaugcuggagugacgacacccgucagcaccuauaugcuuacaaacuccgaacugcucucucugauuaacgacaugccuaucaccaaugaucaaaagaaacuuaugagcaacaauguucagauugugagacagcaguccuacagcaucauguguauuaucaaggaggaagugcuggccuaugucgugcaacucccccuguacggcguuaucgacaccccuugcuggaaacugcauacaucuccccucuguacgaccaacacaaaggagggcuccaauauuugccugacccggacagaucgcgggugguacugugacaacgcgggaagcgugagcuuuuucccucaggccgaaaccugcaagguccagucuaauagaguguuuugugauacgaugaacuccagaacacugccgucugagguuaaucucugcaacaucgacauuuucaaucccaaauaugauugcaagaucaugaccagcaaaaccgacguguccagcucugucauuacaucccugggcgcuaucgugagcuguuacgggaagaccaaaugcacagccucuaacaagaaucggggaaucauuaagacguuuuccaacggcugugauuaugucagcaauaaagggguggacaccguuuccgugggaaacacacuuuacuaugucaacaagcaagagggcaaaucucuguacgugaagggcgaaccuaucauuaauuucuaugacccccucguuuuuccuagcgaugaguucgacgcuuccaucucucaggugaacgaaaagauuaaucagagccuggccuuuauccgcaaguccgaugagcugcuccacaacgucaauguggggaaaagcaccacaaacauuaugaucaccacgaucauuaucgugauuaucguuauucugcuucugcucaucgccgucggacuguuccuguacugcaaagcuagaugaggacuaguguccaccugucccuccugggcugcuggauugucucguuuuccugccaaauaaacaggaucagcgcuuuacagaucuaaaaaaaaaaaaaaaaaaaaaaaaaaaaaaaaaaaaaaaaaaaaaaaaaaaaaaaaaaaaaaaaugcaucccccccccccccccccccccccccccccccaaaggcucuuuucagagccaccagaauu

SEQ ID NO: 13642 - RNA, 1834 nt, Artificial Sequence
  mRNA product Design b-3 comprising derived and/or modified sequence from HRSV(Memphis-37)__AIY60640.1__F-del_DSCav1_mut0 (opt6)
gggagagucccgcagucggcguccagcggcucugcuuguucgugugugugucguugcaggccuuauucaagcuuaccauggaacucccaauacuuaaaacaaacgcaaucacaacaauacuagcugcagucacacuaugcuucgccucaucacaaaauauaacagaagaauuuuaucaaucaacaugcuccgcaguaucaaaaggauaucucucugcauuacgaacagguugguacaccucgguaauaacaauagaauuaucaaacauaaaagaaaauaaaugcaauggaaccgaugccaaaguaaaacuaaucaaacaagaacuugacaaauacaaaaacgcaguaacagaacuacaacuauuaaugcaaucaacaccagcagcagguucaggcuccgcaaucgcuucaggaauagccguuuguaaaguacuacacuuagaaggagaaguaaauaaaauaaaaaacgccuuacuaucaacaaacaaagcaguagucucccuuuccaacggaguaucagucuuaacuuuuaaaguacucgacuuaaaaaauuacaucgacaaacaacuacuacccauucuaaauaaacaaucaugcucaauaucaaacaucgaaacaguaaucgaauuucaacaaaaaaauaauagauuacuagaaauaacacgagaauuuuccguaaaugccggaguaacgaccccagucucaacauacauguuaacaaacucagaauuacuaucacucauuaacgauaugccaauaacaaaugaccaaaaaaaacuaaugucaaacaacguccaaauaguacgacaacaaucauacucuaucauguguauaauaaaagaagaaguuuuagcauacguaguacaacuaccacuuuacggagucauagacaccccaugcuggaaacuacacacaucacccuuauguacaacaaacaccaaagaagggucuaacauaugucucacuagaacagaucgaggcugguacugcgacaacgcaggaucaguuagcuuuuucccucaagccgaaaccuguaaaguacaauccaaucgaguauuuugcgacacuaugaacucuagaaccuuacccuccgaaguaaaccuauguaacauagacauauuuaaucccaaauaugauugcaaaaucaugacauccaaaacagauguaucaagcucuguaauaaccucacuaggagcaauaguuucaugcuaugguaaaacaaaaugcaccgccucaaacaaaaauagagggauaaucaaaaccuucucaaauggaugcgacuacguaucaaauaaaggaguagacaccgucuccguaggaaacacacuauacuacguaaacaaacaagaaggaaaaucacuauacguaaaaggagaaccaaucauaaacuucuacgacccacuuguuuucccaucagaugaauuugaugccuccauaucacaaguaaacgaaaaaauaaaccaaucucuagccuucaucagaaaauccgacgaacuuuuacacaacguaaacguagguaaaucaacaaccaacaucaugauaacaacaauaauaauaguaauaauuguaauacuuuuacuacuuaucgccguaggccuauucuuauauuguaaagcaagaugaggacuaguguccaccugucccuccugggcugcuggauugucucguuuuccugccaaauaaacaggaucagcgcuuuacagaucuaaaaaaaaaaaaaaaaaaaaaaaaaaaaaaaaaaaaaaaaaaaaaaaaaaaaaaaaaaaaaaaaugcaucccccccccccccccccccccccccccccccaaaggcucuuuucagagccaccagaauu

SEQ ID NO: 13643 - RNA, 1834 nt, Artificial Sequence
  mRNA product Design b-3 comprising derived and/or modified sequence from HRSV(Memphis-37)__AIY60640.1__F-del_DSCav1_mut0 (opt11)
gggagagucccgcagucggcguccagcggcucugcuuguucgugugugugucguugcaggccuuauucaagcuuaccauggaacuaccaauccucaaaaccaacgccaucacuacaauccuagccgcgguaacccugugcuucgccuccucacaaaacaucacagaagaauuuuaccaaucaaccugcuccgccguauccaaaggauaccugagcgcccugagaaccggcugguacaccuccgucaucaccauagaacucuccaacaucaaagaaaacaaaugcaacgguacggacgccaaaguuaaacucaucaaacaagaacuugacaaauacaagaacgccgucacagaacugcaacuccucaugcaauccacccccgccgccggcuccggcuccgccauagccuccggcaucgccgucugcaaagucuuacaccuagaaggcgaagucaacaaaaucaaaaacgcacuacuuuccacaaacaaagccgucgucucacucuccaacggcguauccguccucaccuucaaaguacuugaccucaaaaacuacaucgacaaacaacuacuccccauccugaacaaacaauccugcucaaucuccaacaucgaaaccguaaucgaguuccaacagaaaaauaaucgccuccuggagaucacccgcgaguucuccgucaaugcaggagucacaaccccaguaucaaccuacaugcucaccaacuccgaacuccugucgcucaucaacgacaugcccaucacaaacgaccaaaagaaacucauguccaacaacguacaaaucgucagacaacaauccuauucuauaaugugcaucaucaaagaagaaguccucgccuacgucguacaacucccccucuacggcguuaucgacacccccugcuggaaacuccacaccucaccccucugcaccaccaacacaaaagaaggcuccaacaucugccucacucggaccgaccgcggcugguacugcgacaaugccggcagcgucuccuucuucccacaagccgaaaccugcaaaguccaguccaaccgcguauucugcgacacuaugaacuccagaacccuccccuccgaaguaaaccucugcaacaucgacaucuucaacccaaaauacgacugcaaaaucaugaccucaaaaaccgacgucagcucgucagucauaaccagccucggagccauagucucaugcuacggaaaaaccaaaugcaccgccagcaacaaaaaccgcggcauaauaaaaacauucuccaacggcugcgacuauguauccaacaaaggagucgauaccgucuccguaggcaacacccuauacuacgucaacaaacaagaaggcaaaucccucuacgucaaaggugaaccaaucaucaacuucuacgacccucucgucuuccccuccgaugaguucgacgccucaaucagccaaguaaacgaaaagauaaaccaaucacucgccuucauccgcaaauccgacgaacuucuucacaacgucaacgucggcaaaucuaccaccaacauaaugauaaccaccaucaucaucgucaucaucguaauacuccuccuucucaucgccgucggccuauuccuauacugcaaagcccgcuagggacuaguguccaccugucccuccugggcugcuggauugucucguuuuccugccaaauaaacaggaucagcgcuuuacagaucuaaaaaaaaaaaaaaaaaaaaaaaaaaaaaaaaaaaaaaaaaaaaaaaaaaaaaaaaaaaaaaaaugcaucccccccccccccccccccccccccccccccaaaggcucuuuucagagccaccagaauu

SEQ ID NO: 13644 - RNA, 1885 nt, Artificial Sequence
  mRNA product Design b-4 comprising derived and/or modified sequence from HRSV(Memphis-37)__AIY60640.1__F-del_DSCav1_mut0 (opt1)
gggagagucccgcagucggcguccagcggcucugcuuguucgugugugugucguugcaggccuuauucaagcuuaccauggagcugcccauccucaagaccaacgccaucaccacgauccuggccgcggugacccugugcuucgccagcucccagaacaucaccgaggaguucuaccagagcacgugcuccgccgucagcaagggcuaccucuccgcccugcgcaccgggugguacaccagcgugaucaccaucgagcuguccaacaucaaggagaacaagugcaacggcaccgacgccaaggugaagcucaucaagcaggagcuggacaaguacaagaacgcggucacggagcugcagcuccugaugcagagcaccccggccgccggcuccgggagcgcgaucgccuccggcaucgccgucugcaaggugcugcaccucgagggcgaggugaacaagaucaagaacgcccugcuguccaccaacaaggccgucgugagccucuccaacggggugagcguccugaccuucaaggugcuggaccucaagaacuacaucgacaagcagcugcugcccauccugaacaagcagagcugcuccaucagcaacaucgagaccgucaucgaguuccagcagaagaacaaccgccuccuggagaucacgcgggaguucagcgugaacgcgggcgugaccacccccgucuccaccuacaugcugacgaacagcgagcuccugucccugaucaacgacaugccgaucaccaacgaccagaagaagcucaugagcaacaacgugcagaucgugcgccagcaguccuacagcaucaugugcaucaucaaggaggagguccuggccuacguggugcagcugccccucuacggggucaucgacacccccugcuggaagcugcacaccagcccccugugcacgaccaacaccaaggagggcuccaacaucugccucacccggacggaccgcgggugguacugcgacaacgccggcagcguguccuucuucccgcaggccgagaccugcaagguccagagcaaccggguguucugcgacaccaugaacucccggacccugcccagcgaggugaaccucugcaacaucgacaucuucaaccccaaguacgacugcaagaucaugacguccaagaccgacgucagcuccagcgugaucaccucccugggcgccaucgugagcugcuacgggaagaccaagugcacggcgagcaacaagaaccgcggcaucaucaagaccuucuccaacgggugcgacuacgucagcaacaagggcguggacaccguguccgucggcaacacccuguacuacgugaacaagcaggagggcaagagccucuacgugaagggggagcccaucaucaacuucuacgacccgcuggucuuccccuccgacgaguucgacgccagcaucucccaggugaacgagaagaucaaccagagccuggccuucauccggaaguccgacgagcuccugcacaacgugaacgucggcaagagcaccacgaacaucaugaucaccaccaucaucaucgugaucaucgugauccugcugcuccugaucgccgucgggcuguuccucuacugcaaggcccgcugaggacuaguaauaaggaaacuguaugaaugucugugggcaggaagugaagagauccuucuguaaagguuuuuggaauuaugucugcugaauaauaaacuuuuuugaaauaauaaaucugguagaaaaaugagaucuaaaaaaaaaaaaaaaaaaaaaaaaaaaaaaaaaaaaaaaaaaaaaaaaaaaaaaaaaaaaaaaaugcaucccccccccccccccccccccccccccccccaaaggcucuuuucagagccaccagaauu

SEQ ID NO: 13645 - RNA, 1885 nt, Artificial Sequence
  mRNA product Design b-4 comprising derived and/or modified sequence from HRSV(Memphis-37)__AIY60640.1__F-del_DSCav1_mut0 (opt1)
gggagagucccgcagucggcguccagcggcucugcuuguucgugugugugucguugcaggccuuauucaagcuuaccauggagcugcccauccucaagaccaacgccaucaccacgauccuggccgcggugacccugugcuucgccagcucccagaacaucaccgaggaguucuaccagagcacgugcuccgccgucagcaagggcuaccucuccgcccugcgcaccgggugguacaccagcgugaucaccaucgagcuguccaacaucaaggagaacaagugcaacggcaccgacgccaaggugaagcucaucaagcaggagcuggacaaguacaagaacgcggucacggagcugcagcuccugaugcagagcaccccggccgccggguccggcagcgccaucgcguccgggaucgccgugugcaaggugcugcaccucgagggcgaggucaacaagaucaagaacgcccugcugagcaccaacaaggccguggugucccucagcaacggcgucuccgugcugaccuucaaggugcuggaccucaagaacuacaucgacaagcagcugcugcccauccucaacaagcagagcugcuccaucagcaacaucgagacggucaucgaguuccagcagaagaacaaccggcugcuggagaucacccgcgaguucuccgugaacgccggggugaccacccccgucagcacguacaugcucaccaacagcgagcugcugucccucaucaacgacaugcccaucaccaacgaccagaagaagcugaugagcaacaacgugcagaucgugcggcagcaguccuacagcaucaugugcaucaucaaggaggagguccuggcguacguggugcagcucccgcuguacggcgucaucgacacccccugcuggaagcugcacacgagcccccucugcaccaccaacaccaaggagggguccaacaucugccugacgcgcaccgaccggggcugguacugcgacaacgccggguccgugagcuucuucccccaggccgagaccugcaaggugcaguccaaccgcgucuucugcgacaccaugaacagccggacgcucccguccgaggugaaccugugcaacaucgacaucuucaaccccaaguacgacugcaagaucaugaccagcaagaccgacgucuccagcuccgugaucaccagccugggcgccaucguguccugcuacggcaagacgaagugcaccgccagcaacaagaaccgggggaucaucaagaccuucuccaacggcugcgacuacgucagcaacaaggggguggacaccgugagcgucggcaacacgcucuacuacgugaacaagcaggagggcaagucccuguacgugaagggggagcccaucaucaacuucuacgacccccuggucuucccgagcgacgaguucgacgcguccaucagccaggugaacgagaagaucaaccagucccucgccuucauccgcaagagcgacgagcugcugcacaacgugaacgucggcaaguccaccaccaacaucaugaucaccaccaucaucaucgugaucaucgugauccuccugcugcucaucgccgucgggcuguuccuguacugcaaggcccggugaggacuaguaauaaggaaacuguaugaaugucugugggcaggaagugaagagauccuucuguaaagguuuuuggaauuaugucugcugaauaauaaacuuuuuugaaauaauaaaucugguagaaaaaugagaucuaaaaaaaaaaaaaaaaaaaaaaaaaaaaaaaaaaaaaaaaaaaaaaaaaaaaaaaaaaaaaaaaugcaucccccccccccccccccccccccccccccccaaaggcucuuuucagagccaccagaauu

SEQ ID NO: 13646 - RNA, 1885 nt, Artificial Sequence
  mRNA product Design b-4 comprising derived and/or modified sequence from HRSV(Memphis-37)__AIY60640.1__F-del_DSCav1_mut0 (opt2)
gggagagucccgcagucggcguccagcggcucugcuuguucgugugugugucguugcaggccuuauucaagcuuaccauggagcuccccauccucaagaccaacgccaucaccaccauccucgccgccgucacccucugcuucgccuccucccagaacaucaccgaggaguucuaccaguccaccugcuccgccgucuccaagggcuaccucuccgcccuccgcaccggcugguacaccuccgucaucaccaucgagcucuccaacaucaaggagaacaagugcaacggcaccgacgccaaggucaagcucaucaagcaggagcucgacaaguacaagaacgccgucaccgagcuccagcuccucaugcaguccacccccgccgccggcuccggcuccgccaucgccuccggcaucgccgucugcaagguccuccaccucgagggcgaggucaacaagaucaagaacgcccuccucuccaccaacaaggccgucgucucccucuccaacggcgucuccguccucaccuucaagguccucgaccucaagaacuacaucgacaagcagcuccuccccauccucaacaagcaguccugcuccaucuccaacaucgagaccgucaucgaguuccagcagaagaacaaccgccuccucgagaucacccgcgaguucuccgucaacgccggcgucaccacccccgucuccaccuacaugcucaccaacuccgagcuccucucccucaucaacgacaugcccaucaccaacgaccagaagaagcucauguccaacaacguccagaucguccgccagcaguccuacuccaucaugugcaucaucaaggaggagguccucgccuacgucguccagcucccccucuacggcgucaucgacacccccugcuggaagcuccacaccuccccccucugcaccaccaacaccaaggagggcuccaacaucugccucacccgcaccgaccgcggcugguacugcgacaacgccggcuccgucuccuucuucccccaggccgagaccugcaagguccaguccaaccgcgucuucugcgacaccaugaacucccgcacccuccccuccgaggucaaccucugcaacaucgacaucuucaaccccaaguacgacugcaagaucaugaccuccaagaccgacgucuccuccuccgucaucaccucccucggcgccaucgucuccugcuacggcaagaccaagugcaccgccuccaacaagaaccgcggcaucaucaagaccuucuccaacggcugcgacuacgucuccaacaagggcgucgacaccgucuccgucggcaacacccucuacuacgucaacaagcaggagggcaagucccucuacgucaagggcgagcccaucaucaacuucuacgacccccucgucuuccccuccgacgaguucgacgccuccaucucccaggucaacgagaagaucaaccagucccucgccuucauccgcaaguccgacgagcuccuccacaacgucaacgucggcaaguccaccaccaacaucaugaucaccaccaucaucaucgucaucaucgucauccuccuccuccucaucgccgucggccucuuccucuacugcaaggcccgcugaggacuaguaauaaggaaacuguaugaaugucugugggcaggaagugaagagauccuucuguaaagguuuuuggaauuaugucugcugaauaauaaacuuuuuugaaauaauaaaucugguagaaaaaugagaucuaaaaaaaaaaaaaaaaaaaaaaaaaaaaaaaaaaaaaaaaaaaaaaaaaaaaaaaaaaaaaaaaugcaucccccccccccccccccccccccccccccccaaaggcucuuuucagagccaccagaauu

SEQ ID NO: 13647 - RNA, 1885 nt, Artificial Sequence
  mRNA product Design b-4 comprising derived and/or modified sequence from HRSV(Memphis-37)__AIY60640.1__F-del_DSCav1_mut0 (opt3)
gggagagucccgcagucggcguccagcggcucugcuuguucgugugugugucguugcaggccuuauucaagcuuaccauggagcugcccauccucaagaccaacgccauuacaacuauacuugcugcagugacgcugugcuucgccagcucccagaauaucaccgaagaguuuuaccaaucuacauguucagcggucaguaaaggcuauuugagcgcuuuaagaacugggugguacaccuccguuauuacaaucgaacugucuaacauuaaggagaauaaaugcaacggaaccgacgccaaggugaaacuaaucaagcaggaacucgauaaguauaaaaaugcaguaacugagcugcagcuucugaugcagucgaccccugccgcugguucaggcagcgcaauagccagugggaucgcuguguguaaggucuugcaccucgagggagaagugaacaaaauuaagaaugcccugcuguccacaaacaaagcgguugugucucucagcaauggcgucuccguguuaacguucaagguacuggaccuuaagaacuacaucgauaaacaauugcugccaauucuaaauaagcagucaugcaguaucagcaacauagagacuguuauugaauuucagcagaaaaauaacaggcuccuggagaucacccgggaguucucugugaaugccggugucacaacuccgguguccaccuauaugcuuacaaacucagaacuguugagccucauuaacgacaugcccaucaccaaugaucaaaagaaacugaugaguaacaaugugcagaucguccgccagcagucuuacuccauuauguguauaaucaaggaggaaguuuuagcauaugugguacaacugccucucuacggggugauugacacgccaugcuggaaacuucauacuagcccccuguguacaaccaacacuaaggagggaucgaauaucugcuugacacgaaccgaucguggcugguacugugacaacgcuggcucugucuccuuuuucccucaggccgaaacgugcaaggugcagucaaauagaguguuuugugauaccaugaacaguagaacacugccaagcgaggugaaucucugcaacauagacauuuucaaucccaaauaugauugcaagaucaugacuuccaaaaccgacgucucuagcucagugaucacaagucugggggcaauuguauccuguuacggaaagacuaaaugcaccgcuagcaacaagaauagggguaucauuaagacauuuucuaacggcugugauuauguuucaaauaaagggguggacaccgucagugugggaaacacucuuuacuaugucaacaagcaagagggcaaaagccuguacgugaagggugaaccuauaaucaauuucuaugacccauugguuuuuccguccgaugaguucgacgccucuauuucgcagguuaacgagaaaaucaaucagagccucgcguuuauccggaaguccgaugaacuguuacacaacguaaaugucgggaagucaacgacaaacauuaugauaaccacuaucauuaucgugauuaucguuauacugcuacuccugaucgccgugggacuuuucuuguacugcaaagcacgcugaggacuaguaauaaggaaacuguaugaaugucugugggcaggaagugaagagauccuucuguaaagguuuuuggaauuaugucugcugaauaauaaacuuuuuugaaauaauaaaucugguagaaaaaugagaucuaaaaaaaaaaaaaaaaaaaaaaaaaaaaaaaaaaaaaaaaaaaaaaaaaaaaaaaaaaaaaaaaugcaucccccccccccccccccccccccccccccccaaaggcucuuuucagagccaccagaauu

SEQ ID NO: 13648 - RNA, 1885 nt, Artificial Sequence
  mRNA product Design b-4 comprising derived and/or modified sequence from HRSV(Memphis-37)__AIY60640.1__F-del_DSCav1_mut0 (opt4)
gggagagucccgcagucggcguccagcggcucugcuuguucgugugugugucguugcaggccuuauucaagcuuaccauggagcugcccauccugaagaccaacgccaucaccaccauccuggccgccgugacccugugcuucgccagcagccagaacaucaccgaggaguucuaccagagcaccugcagcgccgugagcaagggcuaccugagcgcccugagaaccggcugguacaccagcgugaucaccaucgagcugagcaacaucaaggagaacaagugcaacggcaccgacgccaaggugaagcugaucaagcaggagcuggacaaguacaagaacgccgugaccgagcugcagcugcugaugcagagcacccccgccgccggcagcggcagcgccaucgccagcggcaucgccgugugcaaggugcugcaccuggagggcgaggugaacaagaucaagaacgcccugcugagcaccaacaaggccguggugagccugagcaacggcgugagcgugcugaccuucaaggugcuggaccugaagaacuacaucgacaagcagcugcugcccauccugaacaagcagagcugcagcaucagcaacaucgagaccgugaucgaguuccagcagaagaacaacagacugcuggagaucaccagagaguucagcgugaacgccggcgugaccacccccgugagcaccuacaugcugaccaacagcgagcugcugagccugaucaacgacaugcccaucaccaacgaccagaagaagcugaugagcaacaacgugcagaucgugagacagcagagcuacagcaucaugugcaucaucaaggaggaggugcuggccuacguggugcagcugccccuguacggcgugaucgacacccccugcuggaagcugcacaccagcccccugugcaccaccaacaccaaggagggcagcaacaucugccugaccagaaccgacagaggcugguacugcgacaacgccggcagcgugagcuucuucccccaggccgagaccugcaaggugcagagcaacagaguguucugcgacaccaugaacagcagaacccugcccagcgaggugaaccugugcaacaucgacaucuucaaccccaaguacgacugcaagaucaugaccagcaagaccgacgugagcagcagcgugaucaccagccugggcgccaucgugagcugcuacggcaagaccaagugcaccgccagcaacaagaacagaggcaucaucaagaccuucagcaacggcugcgacuacgugagcaacaagggcguggacaccgugagcgugggcaacacccuguacuacgugaacaagcaggagggcaagagccuguacgugaagggcgagcccaucaucaacuucuacgacccccugguguuccccagcgacgaguucgacgccagcaucagccaggugaacgagaagaucaaccagagccuggccuucaucagaaagagcgacgagcugcugcacaacgugaacgugggcaagagcaccaccaacaucaugaucaccaccaucaucaucgugaucaucgugauccugcugcugcugaucgccgugggccuguuccuguacugcaaggccagaugaggacuaguaauaaggaaacuguaugaaugucugugggcaggaagugaagagauccuucuguaaagguuuuuggaauuaugucugcugaauaauaaacuuuuuugaaauaauaaaucugguagaaaaaugagaucuaaaaaaaaaaaaaaaaaaaaaaaaaaaaaaaaaaaaaaaaaaaaaaaaaaaaaaaaaaaaaaaaugcaucccccccccccccccccccccccccccccccaaaggcucuuuucagagccaccagaauu

SEQ ID NO: 13649 - RNA, 1885 nt, Artificial Sequence
  mRNA product Design b-4 comprising derived and/or modified sequence from HRSV(Memphis-37)__AIY60640.1__F-del_DSCav1_mut0 (opt5)
gggagagucccgcagucggcguccagcggcucugcuuguucgugugugugucguugcaggccuuauucaagcuuaccauggagcugcccauccucaagaccaacgccauuacaacgauccuggcugccgugacccuuugcuucgcgagcucccagaauauuacagaagaguuuuaccaaucuaccuguagcgcugucuccaaaggcuaucugucugcccucagaacagggugguacaccagcguuaucacaauugaacuguccaacaucaaggagaauaaaugcaacggaaccgacgccaaggugaaacuuaucaagcaggaacuggauaaguauaaaaaugcugugacggagcuccagcugcugaugcagucuaccccugccgcuggcagcggguccgccauugcgagcggaaucgccgucuguaaggugcuccaccuggagggcgaaguuaacaaaauuaagaaugcccuucugucuacaaacaaagcuguggucucccucagcaauggggugucuguucugaccuucaaggugcuugaccugaagaacuacaucgauaaacaacuccugccgauucugaauaagcaguccugcagcaucucuaacauugagacagucaucgaauuucagcagaaaaauaaccggcuccuggagaucacccgcgaguucuccgugaaugcuggagugacgacacccgucagcaccuauaugcuuacaaacuccgaacugcucucucugauuaacgacaugccuaucaccaaugaucaaaagaaacuuaugagcaacaauguucagauugugagacagcaguccuacagcaucauguguauuaucaaggaggaagugcuggccuaugucgugcaacucccccuguacggcguuaucgacaccccuugcuggaaacugcauacaucuccccucuguacgaccaacacaaaggagggcuccaauauuugccugacccggacagaucgcgggugguacugugacaacgcgggaagcgugagcuuuuucccucaggccgaaaccugcaagguccagucuaauagaguguuuugugauacgaugaacuccagaacacugccgucugagguuaaucucugcaacaucgacauuuucaaucccaaauaugauugcaagaucaugaccagcaaaaccgacguguccagcucugucauuacaucccugggcgcuaucgugagcuguuacgggaagaccaaaugcacagccucuaacaagaaucggggaaucauuaagacguuuuccaacggcugugauuaugucagcaauaaagggguggacaccguuuccgugggaaacacacuuuacuaugucaacaagcaagagggcaaaucucuguacgugaagggcgaaccuaucauuaauuucuaugacccccucguuuuuccuagcgaugaguucgacgcuuccaucucucaggugaacgaaaagauuaaucagagccuggccuuuauccgcaaguccgaugagcugcuccacaacgucaauguggggaaaagcaccacaaacauuaugaucaccacgaucauuaucgugauuaucguuauucugcuucugcucaucgccgucggacuguuccuguacugcaaagcuagaugaggacuaguaauaaggaaacuguaugaaugucugugggcaggaagugaagagauccuucuguaaagguuuuuggaauuaugucugcugaauaauaaacuuuuuugaaauaauaaaucugguagaaaaaugagaucuaaaaaaaaaaaaaaaaaaaaaaaaaaaaaaaaaaaaaaaaaaaaaaaaaaaaaaaaaaaaaaaaugcaucccccccccccccccccccccccccccccccaaaggcucuuuucagagccaccagaauu

SEQ ID NO: 13650 - RNA, 1885 nt, Artificial Sequence
  mRNA product Design b-4 comprising derived and/or modified sequence from HRSV(Memphis-37)__AIY60640.1__F-del_DSCav1_mut0 (opt6)
gggagagucccgcagucggcguccagcggcucugcuuguucgugugugugucguugcaggccuuauucaagcuuaccauggaacucccaauacuuaaaacaaacgcaaucacaacaauacuagcugcagucacacuaugcuucgccucaucacaaaauauaacagaagaauuuuaucaaucaacaugcuccgcaguaucaaaaggauaucucucugcauuacgaacagguugguacaccucgguaauaacaauagaauuaucaaacauaaaagaaaauaaaugcaauggaaccgaugccaaaguaaaacuaaucaaacaagaacuugacaaauacaaaaacgcaguaacagaacuacaacuauuaaugcaaucaacaccagcagcagguucaggcuccgcaaucgcuucaggaauagccguuuguaaaguacuacacuuagaaggagaaguaaauaaaauaaaaaacgccuuacuaucaacaaacaaagcaguagucucccuuuccaacggaguaucagucuuaacuuuuaaaguacucgacuuaaaaaauuacaucgacaaacaacuacuacccauucuaaauaaacaaucaugcucaauaucaaacaucgaaacaguaaucgaauuucaacaaaaaaauaauagauuacuagaaauaacacgagaauuuuccguaaaugccggaguaacgaccccagucucaacauacauguuaacaaacucagaauuacuaucacucauuaacgauaugccaauaacaaaugaccaaaaaaaacuaaugucaaacaacguccaaauaguacgacaacaaucauacucuaucauguguauaauaaaagaagaaguuuuagcauacguaguacaacuaccacuuuacggagucauagacaccccaugcuggaaacuacacacaucacccuuauguacaacaaacaccaaagaagggucuaacauaugucucacuagaacagaucgaggcugguacugcgacaacgcaggaucaguuagcuuuuucccucaagccgaaaccuguaaaguacaauccaaucgaguauuuugcgacacuaugaacucuagaaccuuacccuccgaaguaaaccuauguaacauagacauauuuaaucccaaauaugauugcaaaaucaugacauccaaaacagauguaucaagcucuguaauaaccucacuaggagcaauaguuucaugcuaugguaaaacaaaaugcaccgccucaaacaaaaauagagggauaaucaaaaccuucucaaauggaugcgacuacguaucaaauaaaggaguagacaccgucuccguaggaaacacacuauacuacguaaacaaacaagaaggaaaaucacuauacguaaaaggagaaccaaucauaaacuucuacgacccacuuguuuucccaucagaugaauuugaugccuccauaucacaaguaaacgaaaaaauaaaccaaucucuagccuucaucagaaaauccgacgaacuuuuacacaacguaaacguagguaaaucaacaaccaacaucaugauaacaacaauaauaauaguaauaauuguaauacuuuuacuacuuaucgccguaggccuauucuuauauuguaaagcaagaugaggacuaguaauaaggaaacuguaugaaugucugugggcaggaagugaagagauccuucuguaaagguuuuuggaauuaugucugcugaauaauaaacuuuuuugaaauaauaaaucugguagaaaaaugagaucuaaaaaaaaaaaaaaaaaaaaaaaaaaaaaaaaaaaaaaaaaaaaaaaaaaaaaaaaaaaaaaaaugcaucccccccccccccccccccccccccccccccaaaggcucuuuucagagccaccagaauu

SEQ ID NO: 13651 - RNA, 1885 nt, Artificial Sequence
  mRNA product Design b-4 comprising derived and/or modified sequence from HRSV(Memphis-37)__AIY60640.1__F-del_DSCav1_mut0 (opt11)
gggagagucccgcagucggcguccagcggcucugcuuguucgugugugugucguugcaggccuuauucaagcuuaccauggaacuaccaauccucaaaaccaacgccaucacuacaauccuagccgcgguaacccugugcuucgccuccucacaaaacaucacagaagaauuuuaccaaucaaccugcuccgccguauccaaaggauaccugagcgcccugagaaccggcugguacaccuccgucaucaccauagaacucuccaacaucaaagaaaacaaaugcaacgguacggacgccaaaguuaaacucaucaaacaagaacuugacaaauacaagaacgccgucacagaacugcaacuccucaugcaauccacccccgccgccggcuccggcuccgccauagccuccggcaucgccgucugcaaagucuuacaccuagaaggcgaagucaacaaaaucaaaaacgcacuacuuuccacaaacaaagccgucgucucacucuccaacggcguauccguccucaccuucaaaguacuugaccucaaaaacuacaucgacaaacaacuacuccccauccugaacaaacaauccugcucaaucuccaacaucgaaaccguaaucgaguuccaacagaaaaauaaucgccuccuggagaucacccgcgaguucuccgucaaugcaggagucacaaccccaguaucaaccuacaugcucaccaacuccgaacuccugucgcucaucaacgacaugcccaucacaaacgaccaaaagaaacucauguccaacaacguacaaaucgucagacaacaauccuauucuauaaugugcaucaucaaagaagaaguccucgccuacgucguacaacucccccucuacggcguuaucgacacccccugcuggaaacuccacaccucaccccucugcaccaccaacacaaaagaaggcuccaacaucugccucacucggaccgaccgcggcugguacugcgacaaugccggcagcgucuccuucuucccacaagccgaaaccugcaaaguccaguccaaccgcguauucugcgacacuaugaacuccagaacccuccccuccgaaguaaaccucugcaacaucgacaucuucaacccaaaauacgacugcaaaaucaugaccucaaaaaccgacgucagcucgucagucauaaccagccucggagccauagucucaugcuacggaaaaaccaaaugcaccgccagcaacaaaaaccgcggcauaauaaaaacauucuccaacggcugcgacuauguauccaacaaaggagucgauaccgucuccguaggcaacacccuauacuacgucaacaaacaagaaggcaaaucccucuacgucaaaggugaaccaaucaucaacuucuacgacccucucgucuuccccuccgaugaguucgacgccucaaucagccaaguaaacgaaaagauaaaccaaucacucgccuucauccgcaaauccgacgaacuucuucacaacgucaacgucggcaaaucuaccaccaacauaaugauaaccaccaucaucaucgucaucaucguaauacuccuccuucucaucgccgucggccuauuccuauacugcaaagcccgcuagggacuaguaauaaggaaacuguaugaaugucugugggcaggaagugaagagauccuucuguaaagguuuuuggaauuaugucugcugaauaauaaacuuuuuugaaauaauaaaucugguagaaaaaugagaucuaaaaaaaaaaaaaaaaaaaaaaaaaaaaaaaaaaaaaaaaaaaaaaaaaaaaaaaaaaaaaaaaugcaucccccccccccccccccccccccccccccccaaaggcucuuuucagagccaccagaauu

SEQ ID NO: 13652 - RNA, 1947 nt, Artificial Sequence
  mRNA product Design b-5 comprising derived and/or modified sequence from HRSV(Memphis-37)__AIY60640.1__F-del_DSCav1_mut0 (opt1)
gggagacuccugucgggcggaaguaggaggaguagaguuuaaaaacaguacucuuuuuccgguucgggacguaguugaagcaacgacaagccggauaaccgcucuugagacaggaagcuuaccauggagcugcccauccucaagaccaacgccaucaccacgauccuggccgcggugacccugugcuucgccagcucccagaacaucaccgaggaguucuaccagagcacgugcuccgccgucagcaagggcuaccucuccgcccugcgcaccgggugguacaccagcgugaucaccaucgagcuguccaacaucaaggagaacaagugcaacggcaccgacgccaaggugaagcucaucaagcaggagcuggacaaguacaagaacgcggucacggagcugcagcuccugaugcagagcaccccggccgccggcuccgggagcgcgaucgccuccggcaucgccgucugcaaggugcugcaccucgagggcgaggugaacaagaucaagaacgcccugcuguccaccaacaaggccgucgugagccucuccaacggggugagcguccugaccuucaaggugcuggaccucaagaacuacaucgacaagcagcugcugcccauccugaacaagcagagcugcuccaucagcaacaucgagaccgucaucgaguuccagcagaagaacaaccgccuccuggagaucacgcgggaguucagcgugaacgcgggcgugaccacccccgucuccaccuacaugcugacgaacagcgagcuccugucccugaucaacgacaugccgaucaccaacgaccagaagaagcucaugagcaacaacgugcagaucgugcgccagcaguccuacagcaucaugugcaucaucaaggaggagguccuggccuacguggugcagcugccccucuacggggucaucgacacccccugcuggaagcugcacaccagcccccugugcacgaccaacaccaaggagggcuccaacaucugccucacccggacggaccgcgggugguacugcgacaacgccggcagcguguccuucuucccgcaggccgagaccugcaagguccagagcaaccggguguucugcgacaccaugaacucccggacccugcccagcgaggugaaccucugcaacaucgacaucuucaaccccaaguacgacugcaagaucaugacguccaagaccgacgucagcuccagcgugaucaccucccugggcgccaucgugagcugcuacgggaagaccaagugcacggcgagcaacaagaaccgcggcaucaucaagaccuucuccaacgggugcgacuacgucagcaacaagggcguggacaccguguccgucggcaacacccuguacuacgugaacaagcaggagggcaagagccucuacgugaagggggagcccaucaucaacuucuacgacccgcuggucuuccccuccgacgaguucgacgccagcaucucccaggugaacgagaagaucaaccagagccuggccuucauccggaaguccgacgagcuccugcacaacgugaacgucggcaagagcaccacgaacaucaugaucaccaccaucaucaucgugaucaucgugauccugcugcuccugaucgccgucgggcuguuccucuacugcaaggcccgcugaggacuaguacuggcugcaucucccuuuccucuguccuccauccuucucccaggauggugaagggggaccugguacccagugauccccaccccaggauccuaaaucaugacuuaccugcuaauaaaaacucauuggaaaagugagaagaucuaaaaaaaaaaaaaaaaaaaaaaaaaaaaaaaaaaaaaaaaaaaaaaaaaaaaaaaaaaaaaaaaugcaucccccccccccccccccccccccccccccccaaaggcucuuuucagagccaccagaauu

SEQ ID NO: 13653 - RNA, 1947 nt, Artificial Sequence
  mRNA product Design b-5 comprising derived and/or modified sequence from HRSV(Memphis-37)__AIY60640.1__F-del_DSCav1_mut0 (opt1)
gggagacuccugucgggcggaaguaggaggaguagaguuuaaaaacaguacucuuuuuccgguucgggacguaguugaagcaacgacaagccggauaaccgcucuugagacaggaagcuuaccauggagcugcccauccucaagaccaacgccaucaccacgauccuggccgcggugacccugugcuucgccagcucccagaacaucaccgaggaguucuaccagagcacgugcuccgccgucagcaagggcuaccucuccgcccugcgcaccgggugguacaccagcgugaucaccaucgagcuguccaacaucaaggagaacaagugcaacggcaccgacgccaaggugaagcucaucaagcaggagcuggacaaguacaagaacgcggucacggagcugcagcuccugaugcagagcaccccggccgccggguccggcagcgccaucgcguccgggaucgccgugugcaaggugcugcaccucgagggcgaggucaacaagaucaagaacgcccugcugagcaccaacaaggccguggugucccucagcaacggcgucuccgugcugaccuucaaggugcuggaccucaagaacuacaucgacaagcagcugcugcccauccucaacaagcagagcugcuccaucagcaacaucgagacggucaucgaguuccagcagaagaacaaccggcugcuggagaucacccgcgaguucuccgugaacgccggggugaccacccccgucagcacguacaugcucaccaacagcgagcugcugucccucaucaacgacaugcccaucaccaacgaccagaagaagcugaugagcaacaacgugcagaucgugcggcagcaguccuacagcaucaugugcaucaucaaggaggagguccuggcguacguggugcagcucccgcuguacggcgucaucgacacccccugcuggaagcugcacacgagcccccucugcaccaccaacaccaaggagggguccaacaucugccugacgcgcaccgaccggggcugguacugcgacaacgccggguccgugagcuucuucccccaggccgagaccugcaaggugcaguccaaccgcgucuucugcgacaccaugaacagccggacgcucccguccgaggugaaccugugcaacaucgacaucuucaaccccaaguacgacugcaagaucaugaccagcaagaccgacgucuccagcuccgugaucaccagccugggcgccaucguguccugcuacggcaagacgaagugcaccgccagcaacaagaaccgggggaucaucaagaccuucuccaacggcugcgacuacgucagcaacaaggggguggacaccgugagcgucggcaacacgcucuacuacgugaacaagcaggagggcaagucccuguacgugaagggggagcccaucaucaacuucuacgacccccuggucuucccgagcgacgaguucgacgcguccaucagccaggugaacgagaagaucaaccagucccucgccuucauccgcaagagcgacgagcugcugcacaacgugaacgucggcaaguccaccaccaacaucaugaucaccaccaucaucaucgugaucaucgugauccuccugcugcucaucgccgucgggcuguuccuguacugcaaggcccggugaggacuaguacuggcugcaucucccuuuccucuguccuccauccuucucccaggauggugaagggggaccugguacccagugauccccaccccaggauccuaaaucaugacuuaccugcuaauaaaaacucauuggaaaagugagaagaucuaaaaaaaaaaaaaaaaaaaaaaaaaaaaaaaaaaaaaaaaaaaaaaaaaaaaaaaaaaaaaaaaugcaucccccccccccccccccccccccccccccccaaaggcucuuuucagagccaccagaauu

SEQ ID NO: 13654 - RNA, 1947 nt, Artificial Sequence
  mRNA product Design b-5 comprising derived and/or modified sequence from HRSV(Memphis-37)__AIY60640.1__F-del_DSCav1_mut0 (opt2)
gggagacuccugucgggcggaaguaggaggaguagaguuuaaaaacaguacucuuuuuccgguucgggacguaguugaagcaacgacaagccggauaaccgcucuugagacaggaagcuuaccauggagcuccccauccucaagaccaacgccaucaccaccauccucgccgccgucacccucugcuucgccuccucccagaacaucaccgaggaguucuaccaguccaccugcuccgccgucuccaagggcuaccucuccgcccuccgcaccggcugguacaccuccgucaucaccaucgagcucuccaacaucaaggagaacaagugcaacggcaccgacgccaaggucaagcucaucaagcaggagcucgacaaguacaagaacgccgucaccgagcuccagcuccucaugcaguccacccccgccgccggcuccggcuccgccaucgccuccggcaucgccgucugcaagguccuccaccucgagggcgaggucaacaagaucaagaacgcccuccucuccaccaacaaggccgucgucucccucuccaacggcgucuccguccucaccuucaagguccucgaccucaagaacuacaucgacaagcagcuccuccccauccucaacaagcaguccugcuccaucuccaacaucgagaccgucaucgaguuccagcagaagaacaaccgccuccucgagaucacccgcgaguucuccgucaacgccggcgucaccacccccgucuccaccuacaugcucaccaacuccgagcuccucucccucaucaacgacaugcccaucaccaacgaccagaagaagcucauguccaacaacguccagaucguccgccagcaguccuacuccaucaugugcaucaucaaggaggagguccucgccuacgucguccagcucccccucuacggcgucaucgacacccccugcuggaagcuccacaccuccccccucugcaccaccaacaccaaggagggcuccaacaucugccucacccgcaccgaccgcggcugguacugcgacaacgccggcuccgucuccuucuucccccaggccgagaccugcaagguccaguccaaccgcgucuucugcgacaccaugaacucccgcacccuccccuccgaggucaaccucugcaacaucgacaucuucaaccccaaguacgacugcaagaucaugaccuccaagaccgacgucuccuccuccgucaucaccucccucggcgccaucgucuccugcuacggcaagaccaagugcaccgccuccaacaagaaccgcggcaucaucaagaccuucuccaacggcugcgacuacgucuccaacaagggcgucgacaccgucuccgucggcaacacccucuacuacgucaacaagcaggagggcaagucccucuacgucaagggcgagcccaucaucaacuucuacgacccccucgucuuccccuccgacgaguucgacgccuccaucucccaggucaacgagaagaucaaccagucccucgccuucauccgcaaguccgacgagcuccuccacaacgucaacgucggcaaguccaccaccaacaucaugaucaccaccaucaucaucgucaucaucgucauccuccuccuccucaucgccgucggccucuuccucuacugcaaggcccgcugaggacuaguacuggcugcaucucccuuuccucuguccuccauccuucucccaggauggugaagggggaccugguacccagugauccccaccccaggauccuaaaucaugacuuaccugcuaauaaaaacucauuggaaaagugagaagaucuaaaaaaaaaaaaaaaaaaaaaaaaaaaaaaaaaaaaaaaaaaaaaaaaaaaaaaaaaaaaaaaaugcaucccccccccccccccccccccccccccccccaaaggcucuuuucagagccaccagaauu

SEQ ID NO: 13655 - RNA, 1947 nt, Artificial Sequence
  mRNA product Design b-5 comprising derived and/or modified sequence from HRSV(Memphis-37)__AIY60640.1__F-del_DSCav1_mut0 (opt3)
gggagacuccugucgggcggaaguaggaggaguagaguuuaaaaacaguacucuuuuuccgguucgggacguaguugaagcaacgacaagccggauaaccgcucuugagacaggaagcuuaccauggagcugcccauccucaagaccaacgccauuacaacuauacuugcugcagugacgcugugcuucgccagcucccagaauaucaccgaagaguuuuaccaaucuacauguucagcggucaguaaaggcuauuugagcgcuuuaagaacugggugguacaccuccguuauuacaaucgaacugucuaacauuaaggagaauaaaugcaacggaaccgacgccaaggugaaacuaaucaagcaggaacucgauaaguauaaaaaugcaguaacugagcugcagcuucugaugcagucgaccccugccgcugguucaggcagcgcaauagccagugggaucgcuguguguaaggucuugcaccucgagggagaagugaacaaaauuaagaaugcccugcuguccacaaacaaagcgguugugucucucagcaauggcgucuccguguuaacguucaagguacuggaccuuaagaacuacaucgauaaacaauugcugccaauucuaaauaagcagucaugcaguaucagcaacauagagacuguuauugaauuucagcagaaaaauaacaggcuccuggagaucacccgggaguucucugugaaugccggugucacaacuccgguguccaccuauaugcuuacaaacucagaacuguugagccucauuaacgacaugcccaucaccaaugaucaaaagaaacugaugaguaacaaugugcagaucguccgccagcagucuuacuccauuauguguauaaucaaggaggaaguuuuagcauaugugguacaacugccucucuacggggugauugacacgccaugcuggaaacuucauacuagcccccuguguacaaccaacacuaaggagggaucgaauaucugcuugacacgaaccgaucguggcugguacugugacaacgcuggcucugucuccuuuuucccucaggccgaaacgugcaaggugcagucaaauagaguguuuugugauaccaugaacaguagaacacugccaagcgaggugaaucucugcaacauagacauuuucaaucccaaauaugauugcaagaucaugacuuccaaaaccgacgucucuagcucagugaucacaagucugggggcaauuguauccuguuacggaaagacuaaaugcaccgcuagcaacaagaauagggguaucauuaagacauuuucuaacggcugugauuauguuucaaauaaagggguggacaccgucagugugggaaacacucuuuacuaugucaacaagcaagagggcaaaagccuguacgugaagggugaaccuauaaucaauuucuaugacccauugguuuuuccguccgaugaguucgacgccucuauuucgcagguuaacgagaaaaucaaucagagccucgcguuuauccggaaguccgaugaacuguuacacaacguaaaugucgggaagucaacgacaaacauuaugauaaccacuaucauuaucgugauuaucguuauacugcuacuccugaucgccgugggacuuuucuuguacugcaaagcacgcugaggacuaguacuggcugcaucucccuuuccucuguccuccauccuucucccaggauggugaagggggaccugguacccagugauccccaccccaggauccuaaaucaugacuuaccugcuaauaaaaacucauuggaaaagugagaagaucuaaaaaaaaaaaaaaaaaaaaaaaaaaaaaaaaaaaaaaaaaaaaaaaaaaaaaaaaaaaaaaaaugcaucccccccccccccccccccccccccccccccaaaggcucuuuucagagccaccagaauu

SEQ ID NO: 13656 - RNA, 1947 nt, Artificial Sequence
  mRNA product Design b-5 comprising derived and/or modified sequence from HRSV(Memphis-37)__AIY60640.1__F-del_DSCav1_mut0 (opt4)
gggagacuccugucgggcggaaguaggaggaguagaguuuaaaaacaguacucuuuuuccgguucgggacguaguugaagcaacgacaagccggauaaccgcucuugagacaggaagcuuaccauggagcugcccauccugaagaccaacgccaucaccaccauccuggccgccgugacccugugcuucgccagcagccagaacaucaccgaggaguucuaccagagcaccugcagcgccgugagcaagggcuaccugagcgcccugagaaccggcugguacaccagcgugaucaccaucgagcugagcaacaucaaggagaacaagugcaacggcaccgacgccaaggugaagcugaucaagcaggagcuggacaaguacaagaacgccgugaccgagcugcagcugcugaugcagagcacccccgccgccggcagcggcagcgccaucgccagcggcaucgccgugugcaaggugcugcaccuggagggcgaggugaacaagaucaagaacgcccugcugagcaccaacaaggccguggugagccugagcaacggcgugagcgugcugaccuucaaggugcuggaccugaagaacuacaucgacaagcagcugcugcccauccugaacaagcagagcugcagcaucagcaacaucgagaccgugaucgaguuccagcagaagaacaacagacugcuggagaucaccagagaguucagcgugaacgccggcgugaccacccccgugagcaccuacaugcugaccaacagcgagcugcugagccugaucaacgacaugcccaucaccaacgaccagaagaagcugaugagcaacaacgugcagaucgugagacagcagagcuacagcaucaugugcaucaucaaggaggaggugcuggccuacguggugcagcugccccuguacggcgugaucgacacccccugcuggaagcugcacaccagcccccugugcaccaccaacaccaaggagggcagcaacaucugccugaccagaaccgacagaggcugguacugcgacaacgccggcagcgugagcuucuucccccaggccgagaccugcaaggugcagagcaacagaguguucugcgacaccaugaacagcagaacccugcccagcgaggugaaccugugcaacaucgacaucuucaaccccaaguacgacugcaagaucaugaccagcaagaccgacgugagcagcagcgugaucaccagccugggcgccaucgugagcugcuacggcaagaccaagugcaccgccagcaacaagaacagaggcaucaucaagaccuucagcaacggcugcgacuacgugagcaacaagggcguggacaccgugagcgugggcaacacccuguacuacgugaacaagcaggagggcaagagccuguacgugaagggcgagcccaucaucaacuucuacgacccccugguguuccccagcgacgaguucgacgccagcaucagccaggugaacgagaagaucaaccagagccuggccuucaucagaaagagcgacgagcugcugcacaacgugaacgugggcaagagcaccaccaacaucaugaucaccaccaucaucaucgugaucaucgugauccugcugcugcugaucgccgugggccuguuccuguacugcaaggccagaugaggacuaguacuggcugcaucucccuuuccucuguccuccauccuucucccaggauggugaagggggaccugguacccagugauccccaccccaggauccuaaaucaugacuuaccugcuaauaaaaacucauuggaaaagugagaagaucuaaaaaaaaaaaaaaaaaaaaaaaaaaaaaaaaaaaaaaaaaaaaaaaaaaaaaaaaaaaaaaaaugcaucccccccccccccccccccccccccccccccaaaggcucuuuucagagccaccagaauu

SEQ ID NO: 13657 - RNA, 1947 nt, Artificial Sequence
  mRNA product Design b-5 comprising derived and/or modified sequence from HRSV(Memphis-37)__AIY60640.1__F-del_DSCav1_mut0 (opt5)
gggagacuccugucgggcggaaguaggaggaguagaguuuaaaaacaguacucuuuuuccgguucgggacguaguugaagcaacgacaagccggauaaccgcucuugagacaggaagcuuaccauggagcugcccauccucaagaccaacgccauuacaacgauccuggcugccgugacccuuugcuucgcgagcucccagaauauuacagaagaguuuuaccaaucuaccuguagcgcugucuccaaaggcuaucugucugcccucagaacagggugguacaccagcguuaucacaauugaacuguccaacaucaaggagaauaaaugcaacggaaccgacgccaaggugaaacuuaucaagcaggaacuggauaaguauaaaaaugcugugacggagcuccagcugcugaugcagucuaccccugccgcuggcagcggguccgccauugcgagcggaaucgccgucuguaaggugcuccaccuggagggcgaaguuaacaaaauuaagaaugcccuucugucuacaaacaaagcuguggucucccucagcaauggggugucuguucugaccuucaaggugcuugaccugaagaacuacaucgauaaacaacuccugccgauucugaauaagcaguccugcagcaucucuaacauugagacagucaucgaauuucagcagaaaaauaaccggcuccuggagaucacccgcgaguucuccgugaaugcuggagugacgacacccgucagcaccuauaugcuuacaaacuccgaacugcucucucugauuaacgacaugccuaucaccaaugaucaaaagaaacuuaugagcaacaauguucagauugugagacagcaguccuacagcaucauguguauuaucaaggaggaagugcuggccuaugucgugcaacucccccuguacggcguuaucgacaccccuugcuggaaacugcauacaucuccccucuguacgaccaacacaaaggagggcuccaauauuugccugacccggacagaucgcgggugguacugugacaacgcgggaagcgugagcuuuuucccucaggccgaaaccugcaagguccagucuaauagaguguuuugugauacgaugaacuccagaacacugccgucugagguuaaucucugcaacaucgacauuuucaaucccaaauaugauugcaagaucaugaccagcaaaaccgacguguccagcucugucauuacaucccugggcgcuaucgugagcuguuacgggaagaccaaaugcacagccucuaacaagaaucggggaaucauuaagacguuuuccaacggcugugauuaugucagcaauaaagggguggacaccguuuccgugggaaacacacuuuacuaugucaacaagcaagagggcaaaucucuguacgugaagggcgaaccuaucauuaauuucuaugacccccucguuuuuccuagcgaugaguucgacgcuuccaucucucaggugaacgaaaagauuaaucagagccuggccuuuauccgcaaguccgaugagcugcuccacaacgucaauguggggaaaagcaccacaaacauuaugaucaccacgaucauuaucgugauuaucguuauucugcuucugcucaucgccgucggacuguuccuguacugcaaagcuagaugaggacuaguacuggcugcaucucccuuuccucuguccuccauccuucucccaggauggugaagggggaccugguacccagugauccccaccccaggauccuaaaucaugacuuaccugcuaauaaaaacucauuggaaaagugagaagaucuaaaaaaaaaaaaaaaaaaaaaaaaaaaaaaaaaaaaaaaaaaaaaaaaaaaaaaaaaaaaaaaaugcaucccccccccccccccccccccccccccccccaaaggcucuuuucagagccaccagaauu

SEQ ID NO: 13658 - RNA, 1947 nt, Artificial Sequence
  mRNA product Design b-5 comprising derived and/or modified sequence from HRSV(Memphis-37)__AIY60640.1__F-del_DSCav1_mut0 (opt6)
gggagacuccugucgggcggaaguaggaggaguagaguuuaaaaacaguacucuuuuuccgguucgggacguaguugaagcaacgacaagccggauaaccgcucuugagacaggaagcuuaccauggaacucccaauacuuaaaacaaacgcaaucacaacaauacuagcugcagucacacuaugcuucgccucaucacaaaauauaacagaagaauuuuaucaaucaacaugcuccgcaguaucaaaaggauaucucucugcauuacgaacagguugguacaccucgguaauaacaauagaauuaucaaacauaaaagaaaauaaaugcaauggaaccgaugccaaaguaaaacuaaucaaacaagaacuugacaaauacaaaaacgcaguaacagaacuacaacuauuaaugcaaucaacaccagcagcagguucaggcuccgcaaucgcuucaggaauagccguuuguaaaguacuacacuuagaaggagaaguaaauaaaauaaaaaacgccuuacuaucaacaaacaaagcaguagucucccuuuccaacggaguaucagucuuaacuuuuaaaguacucgacuuaaaaaauuacaucgacaaacaacuacuacccauucuaaauaaacaaucaugcucaauaucaaacaucgaaacaguaaucgaauuucaacaaaaaaauaauagauuacuagaaauaacacgagaauuuuccguaaaugccggaguaacgaccccagucucaacauacauguuaacaaacucagaauuacuaucacucauuaacgauaugccaauaacaaaugaccaaaaaaaacuaaugucaaacaacguccaaauaguacgacaacaaucauacucuaucauguguauaauaaaagaagaaguuuuagcauacguaguacaacuaccacuuuacggagucauagacaccccaugcuggaaacuacacacaucacccuuauguacaacaaacaccaaagaagggucuaacauaugucucacuagaacagaucgaggcugguacugcgacaacgcaggaucaguuagcuuuuucccucaagccgaaaccuguaaaguacaauccaaucgaguauuuugcgacacuaugaacucuagaaccuuacccuccgaaguaaaccuauguaacauagacauauuuaaucccaaauaugauugcaaaaucaugacauccaaaacagauguaucaagcucuguaauaaccucacuaggagcaauaguuucaugcuaugguaaaacaaaaugcaccgccucaaacaaaaauagagggauaaucaaaaccuucucaaauggaugcgacuacguaucaaauaaaggaguagacaccgucuccguaggaaacacacuauacuacguaaacaaacaagaaggaaaaucacuauacguaaaaggagaaccaaucauaaacuucuacgacccacuuguuuucccaucagaugaauuugaugccuccauaucacaaguaaacgaaaaaauaaaccaaucucuagccuucaucagaaaauccgacgaacuuuuacacaacguaaacguagguaaaucaacaaccaacaucaugauaacaacaauaauaauaguaauaauuguaauacuuuuacuacuuaucgccguaggccuauucuuauauuguaaagcaagaugaggacuaguacuggcugcaucucccuuuccucuguccuccauccuucucccaggauggugaagggggaccugguacccagugauccccaccccaggauccuaaaucaugacuuaccugcuaauaaaaacucauuggaaaagugagaagaucuaaaaaaaaaaaaaaaaaaaaaaaaaaaaaaaaaaaaaaaaaaaaaaaaaaaaaaaaaaaaaaaaugcaucccccccccccccccccccccccccccccccaaaggcucuuuucagagccaccagaauu

SEQ ID NO: 13659 - RNA, 1947 nt, Artificial Sequence
  mRNA product Design b-5 comprising derived and/or modified sequence from HRSV(Memphis-37)__AIY60640.1__F-del_DSCav1_mut0 (opt11)
gggagacuccugucgggcggaaguaggaggaguagaguuuaaaaacaguacucuuuuuccgguucgggacguaguugaagcaacgacaagccggauaaccgcucuugagacaggaagcuuaccauggaacuaccaauccucaaaaccaacgccaucacuacaauccuagccgcgguaacccugugcuucgccuccucacaaaacaucacagaagaauuuuaccaaucaaccugcuccgccguauccaaaggauaccugagcgcccugagaaccggcugguacaccuccgucaucaccauagaacucuccaacaucaaagaaaacaaaugcaacgguacggacgccaaaguuaaacucaucaaacaagaacuugacaaauacaagaacgccgucacagaacugcaacuccucaugcaauccacccccgccgccggcuccggcuccgccauagccuccggcaucgccgucugcaaagucuuacaccuagaaggcgaagucaacaaaaucaaaaacgcacuacuuuccacaaacaaagccgucgucucacucuccaacggcguauccguccucaccuucaaaguacuugaccucaaaaacuacaucgacaaacaacuacuccccauccugaacaaacaauccugcucaaucuccaacaucgaaaccguaaucgaguuccaacagaaaaauaaucgccuccuggagaucacccgcgaguucuccgucaaugcaggagucacaaccccaguaucaaccuacaugcucaccaacuccgaacuccugucgcucaucaacgacaugcccaucacaaacgaccaaaagaaacucauguccaacaacguacaaaucgucagacaacaauccuauucuauaaugugcaucaucaaagaagaaguccucgccuacgucguacaacucccccucuacggcguuaucgacacccccugcuggaaacuccacaccucaccccucugcaccaccaacacaaaagaaggcuccaacaucugccucacucggaccgaccgcggcugguacugcgacaaugccggcagcgucuccuucuucccacaagccgaaaccugcaaaguccaguccaaccgcguauucugcgacacuaugaacuccagaacccuccccuccgaaguaaaccucugcaacaucgacaucuucaacccaaaauacgacugcaaaaucaugaccucaaaaaccgacgucagcucgucagucauaaccagccucggagccauagucucaugcuacggaaaaaccaaaugcaccgccagcaacaaaaaccgcggcauaauaaaaacauucuccaacggcugcgacuauguauccaacaaaggagucgauaccgucuccguaggcaacacccuauacuacgucaacaaacaagaaggcaaaucccucuacgucaaaggugaaccaaucaucaacuucuacgacccucucgucuuccccuccgaugaguucgacgccucaaucagccaaguaaacgaaaagauaaaccaaucacucgccuucauccgcaaauccgacgaacuucuucacaacgucaacgucggcaaaucuaccaccaacauaaugauaaccaccaucaucaucgucaucaucguaauacuccuccuucucaucgccgucggccuauuccuauacugcaaagcccgcuagggacuaguacuggcugcaucucccuuuccucuguccuccauccuucucccaggauggugaagggggaccugguacccagugauccccaccccaggauccuaaaucaugacuuaccugcuaauaaaaacucauuggaaaagugagaagaucuaaaaaaaaaaaaaaaaaaaaaaaaaaaaaaaaaaaaaaaaaaaaaaaaaaaaaaaaaaaaaaaaugcaucccccccccccccccccccccccccccccccaaaggcucuuuucagagccaccagaauu

SEQ ID NO: 13660 - RNA, 1853 nt, Artificial Sequence
  mRNA product Design c-1 comprising derived and/or modified sequence from HRSV(Memphis-37)__AIY60640.1__F-del_DSCav1_mut0 (opt1)
gggagaguccgcucagccagguugcagaagcggcuuagcguguguccuaaucuucucucugcguguagguaggccugugccgcaaacaagcuuaccauggagcugcccauccucaagaccaacgccaucaccacgauccuggccgcggugacccugugcuucgccagcucccagaacaucaccgaggaguucuaccagagcacgugcuccgccgucagcaagggcuaccucuccgcccugcgcaccgggugguacaccagcgugaucaccaucgagcuguccaacaucaaggagaacaagugcaacggcaccgacgccaaggugaagcucaucaagcaggagcuggacaaguacaagaacgcggucacggagcugcagcuccugaugcagagcaccccggccgccggcuccgggagcgcgaucgccuccggcaucgccgucugcaaggugcugcaccucgagggcgaggugaacaagaucaagaacgcccugcuguccaccaacaaggccgucgugagccucuccaacggggugagcguccugaccuucaaggugcuggaccucaagaacuacaucgacaagcagcugcugcccauccugaacaagcagagcugcuccaucagcaacaucgagaccgucaucgaguuccagcagaagaacaaccgccuccuggagaucacgcgggaguucagcgugaacgcgggcgugaccacccccgucuccaccuacaugcugacgaacagcgagcuccugucccugaucaacgacaugccgaucaccaacgaccagaagaagcucaugagcaacaacgugcagaucgugcgccagcaguccuacagcaucaugugcaucaucaaggaggagguccuggccuacguggugcagcugccccucuacggggucaucgacacccccugcuggaagcugcacaccagcccccugugcacgaccaacaccaaggagggcuccaacaucugccucacccggacggaccgcgggugguacugcgacaacgccggcagcguguccuucuucccgcaggccgagaccugcaagguccagagcaaccggguguucugcgacaccaugaacucccggacccugcccagcgaggugaaccucugcaacaucgacaucuucaaccccaaguacgacugcaagaucaugacguccaagaccgacgucagcuccagcgugaucaccucccugggcgccaucgugagcugcuacgggaagaccaagugcacggcgagcaacaagaaccgcggcaucaucaagaccuucuccaacgggugcgacuacgucagcaacaagggcguggacaccguguccgucggcaacacccuguacuacgugaacaagcaggagggcaagagccucuacgugaagggggagcccaucaucaacuucuacgacccgcuggucuuccccuccgacgaguucgacgccagcaucucccaggugaacgagaagaucaaccagagccuggccuucauccggaaguccgacgagcuccugcacaacgugaacgucggcaagagcaccacgaacaucaugaucaccaccaucaucaucgugaucaucgugauccugcugcuccugaucgccgucgggcuguuccucuacugcaaggcccgcugaggacuaguguccaccugucccuccugggcugcuggauugucucguuuuccugccaaauaaacaggaucagcgcuuuacagaucuaaaaaaaaaaaaaaaaaaaaaaaaaaaaaaaaaaaaaaaaaaaaaaaaaaaaaaaaaaaaaaaaugcaucccccccccccccccccccccccccccccccaaaggcucuuuucagagccaccagaauu

SEQ ID NO: 13661 - RNA, 1853 nt, Artificial Sequence
  mRNA product Design c-1 comprising derived and/or modified sequence from HRSV(Memphis-37)__AIY60640.1__F-del_DSCav1_mut0 (opt1)
gggagaguccgcucagccagguugcagaagcggcuuagcguguguccuaaucuucucucugcguguagguaggccugugccgcaaacaagcuuaccauggagcugcccauccucaagaccaacgccaucaccacgauccuggccgcggugacccugugcuucgccagcucccagaacaucaccgaggaguucuaccagagcacgugcuccgccgucagcaagggcuaccucuccgcccugcgcaccgggugguacaccagcgugaucaccaucgagcuguccaacaucaaggagaacaagugcaacggcaccgacgccaaggugaagcucaucaagcaggagcuggacaaguacaagaacgcggucacggagcugcagcuccugaugcagagcaccccggccgccggguccggcagcgccaucgcguccgggaucgccgugugcaaggugcugcaccucgagggcgaggucaacaagaucaagaacgcccugcugagcaccaacaaggccguggugucccucagcaacggcgucuccgugcugaccuucaaggugcuggaccucaagaacuacaucgacaagcagcugcugcccauccucaacaagcagagcugcuccaucagcaacaucgagacggucaucgaguuccagcagaagaacaaccggcugcuggagaucacccgcgaguucuccgugaacgccggggugaccacccccgucagcacguacaugcucaccaacagcgagcugcugucccucaucaacgacaugcccaucaccaacgaccagaagaagcugaugagcaacaacgugcagaucgugcggcagcaguccuacagcaucaugugcaucaucaaggaggagguccuggcguacguggugcagcucccgcuguacggcgucaucgacacccccugcuggaagcugcacacgagcccccucugcaccaccaacaccaaggagggguccaacaucugccugacgcgcaccgaccggggcugguacugcgacaacgccggguccgugagcuucuucccccaggccgagaccugcaaggugcaguccaaccgcgucuucugcgacaccaugaacagccggacgcucccguccgaggugaaccugugcaacaucgacaucuucaaccccaaguacgacugcaagaucaugaccagcaagaccgacgucuccagcuccgugaucaccagccugggcgccaucguguccugcuacggcaagacgaagugcaccgccagcaacaagaaccgggggaucaucaagaccuucuccaacggcugcgacuacgucagcaacaaggggguggacaccgugagcgucggcaacacgcucuacuacgugaacaagcaggagggcaagucccuguacgugaagggggagcccaucaucaacuucuacgacccccuggucuucccgagcgacgaguucgacgcguccaucagccaggugaacgagaagaucaaccagucccucgccuucauccgcaagagcgacgagcugcugcacaacgugaacgucggcaaguccaccaccaacaucaugaucaccaccaucaucaucgugaucaucgugauccuccugcugcucaucgccgucgggcuguuccuguacugcaaggcccggugaggacuaguguccaccugucccuccugggcugcuggauugucucguuuuccugccaaauaaacaggaucagcgcuuuacagaucuaaaaaaaaaaaaaaaaaaaaaaaaaaaaaaaaaaaaaaaaaaaaaaaaaaaaaaaaaaaaaaaaugcaucccccccccccccccccccccccccccccccaaaggcucuuuucagagccaccagaauu

SEQ ID NO: 13662 - RNA, 1853 nt, Artificial Sequence
  mRNA product Design c-1 comprising derived and/or modified sequence from HRSV(Memphis-37)__AIY60640.1__F-del_DSCav1_mut0 (opt2)
gggagaguccgcucagccagguugcagaagcggcuuagcguguguccuaaucuucucucugcguguagguaggccugugccgcaaacaagcuuaccauggagcuccccauccucaagaccaacgccaucaccaccauccucgccgccgucacccucugcuucgccuccucccagaacaucaccgaggaguucuaccaguccaccugcuccgccgucuccaagggcuaccucuccgcccuccgcaccggcugguacaccuccgucaucaccaucgagcucuccaacaucaaggagaacaagugcaacggcaccgacgccaaggucaagcucaucaagcaggagcucgacaaguacaagaacgccgucaccgagcuccagcuccucaugcaguccacccccgccgccggcuccggcuccgccaucgccuccggcaucgccgucugcaagguccuccaccucgagggcgaggucaacaagaucaagaacgcccuccucuccaccaacaaggccgucgucucccucuccaacggcgucuccguccucaccuucaagguccucgaccucaagaacuacaucgacaagcagcuccuccccauccucaacaagcaguccugcuccaucuccaacaucgagaccgucaucgaguuccagcagaagaacaaccgccuccucgagaucacccgcgaguucuccgucaacgccggcgucaccacccccgucuccaccuacaugcucaccaacuccgagcuccucucccucaucaacgacaugcccaucaccaacgaccagaagaagcucauguccaacaacguccagaucguccgccagcaguccuacuccaucaugugcaucaucaaggaggagguccucgccuacgucguccagcucccccucuacggcgucaucgacacccccugcuggaagcuccacaccuccccccucugcaccaccaacaccaaggagggcuccaacaucugccucacccgcaccgaccgcggcugguacugcgacaacgccggcuccgucuccuucuucccccaggccgagaccugcaagguccaguccaaccgcgucuucugcgacaccaugaacucccgcacccuccccuccgaggucaaccucugcaacaucgacaucuucaaccccaaguacgacugcaagaucaugaccuccaagaccgacgucuccuccuccgucaucaccucccucggcgccaucgucuccugcuacggcaagaccaagugcaccgccuccaacaagaaccgcggcaucaucaagaccuucuccaacggcugcgacuacgucuccaacaagggcgucgacaccgucuccgucggcaacacccucuacuacgucaacaagcaggagggcaagucccucuacgucaagggcgagcccaucaucaacuucuacgacccccucgucuuccccuccgacgaguucgacgccuccaucucccaggucaacgagaagaucaaccagucccucgccuucauccgcaaguccgacgagcuccuccacaacgucaacgucggcaaguccaccaccaacaucaugaucaccaccaucaucaucgucaucaucgucauccuccuccuccucaucgccgucggccucuuccucuacugcaaggcccgcugaggacuaguguccaccugucccuccugggcugcuggauugucucguuuuccugccaaauaaacaggaucagcgcuuuacagaucuaaaaaaaaaaaaaaaaaaaaaaaaaaaaaaaaaaaaaaaaaaaaaaaaaaaaaaaaaaaaaaaaugcaucccccccccccccccccccccccccccccccaaaggcucuuuucagagccaccagaauu

SEQ ID NO: 13663 - RNA, 1853 nt, Artificial Sequence
  mRNA product Design c-1 comprising derived and/or modified sequence from HRSV(Memphis-37)__AIY60640.1__F-del_DSCav1_mut0 (opt3)
gggagaguccgcucagccagguugcagaagcggcuuagcguguguccuaaucuucucucugcguguagguaggccugugccgcaaacaagcuuaccauggagcugcccauccucaagaccaacgccauuacaacuauacuugcugcagugacgcugugcuucgccagcucccagaauaucaccgaagaguuuuaccaaucuacauguucagcggucaguaaaggcuauuugagcgcuuuaagaacugggugguacaccuccguuauuacaaucgaacugucuaacauuaaggagaauaaaugcaacggaaccgacgccaaggugaaacuaaucaagcaggaacucgauaaguauaaaaaugcaguaacugagcugcagcuucugaugcagucgaccccugccgcugguucaggcagcgcaauagccagugggaucgcuguguguaaggucuugcaccucgagggagaagugaacaaaauuaagaaugcccugcuguccacaaacaaagcgguugugucucucagcaauggcgucuccguguuaacguucaagguacuggaccuuaagaacuacaucgauaaacaauugcugccaauucuaaauaagcagucaugcaguaucagcaacauagagacuguuauugaauuucagcagaaaaauaacaggcuccuggagaucacccgggaguucucugugaaugccggugucacaacuccgguguccaccuauaugcuuacaaacucagaacuguugagccucauuaacgacaugcccaucaccaaugaucaaaagaaacugaugaguaacaaugugcagaucguccgccagcagucuuacuccauuauguguauaaucaaggaggaaguuuuagcauaugugguacaacugccucucuacggggugauugacacgccaugcuggaaacuucauacuagcccccuguguacaaccaacacuaaggagggaucgaauaucugcuugacacgaaccgaucguggcugguacugugacaacgcuggcucugucuccuuuuucccucaggccgaaacgugcaaggugcagucaaauagaguguuuugugauaccaugaacaguagaacacugccaagcgaggugaaucucugcaacauagacauuuucaaucccaaauaugauugcaagaucaugacuuccaaaaccgacgucucuagcucagugaucacaagucugggggcaauuguauccuguuacggaaagacuaaaugcaccgcuagcaacaagaauagggguaucauuaagacauuuucuaacggcugugauuauguuucaaauaaagggguggacaccgucagugugggaaacacucuuuacuaugucaacaagcaagagggcaaaagccuguacgugaagggugaaccuauaaucaauuucuaugacccauugguuuuuccguccgaugaguucgacgccucuauuucgcagguuaacgagaaaaucaaucagagccucgcguuuauccggaaguccgaugaacuguuacacaacguaaaugucgggaagucaacgacaaacauuaugauaaccacuaucauuaucgugauuaucguuauacugcuacuccugaucgccgugggacuuuucuuguacugcaaagcacgcugaggacuaguguccaccugucccuccugggcugcuggauugucucguuuuccugccaaauaaacaggaucagcgcuuuacagaucuaaaaaaaaaaaaaaaaaaaaaaaaaaaaaaaaaaaaaaaaaaaaaaaaaaaaaaaaaaaaaaaaugcaucccccccccccccccccccccccccccccccaaaggcucuuuucagagccaccagaauu

SEQ ID NO: 13664 - RNA, 1853 nt, Artificial Sequence
  mRNA product Design c-1 comprising derived and/or modified sequence from HRSV(Memphis-37)__AIY60640.1__F-del_DSCav1_mut0 (opt4)
gggagaguccgcucagccagguugcagaagcggcuuagcguguguccuaaucuucucucugcguguagguaggccugugccgcaaacaagcuuaccauggagcugcccauccugaagaccaacgccaucaccaccauccuggccgccgugacccugugcuucgccagcagccagaacaucaccgaggaguucuaccagagcaccugcagcgccgugagcaagggcuaccugagcgcccugagaaccggcugguacaccagcgugaucaccaucgagcugagcaacaucaaggagaacaagugcaacggcaccgacgccaaggugaagcugaucaagcaggagcuggacaaguacaagaacgccgugaccgagcugcagcugcugaugcagagcacccccgccgccggcagcggcagcgccaucgccagcggcaucgccgugugcaaggugcugcaccuggagggcgaggugaacaagaucaagaacgcccugcugagcaccaacaaggccguggugagccugagcaacggcgugagcgugcugaccuucaaggugcuggaccugaagaacuacaucgacaagcagcugcugcccauccugaacaagcagagcugcagcaucagcaacaucgagaccgugaucgaguuccagcagaagaacaacagacugcuggagaucaccagagaguucagcgugaacgccggcgugaccacccccgugagcaccuacaugcugaccaacagcgagcugcugagccugaucaacgacaugcccaucaccaacgaccagaagaagcugaugagcaacaacgugcagaucgugagacagcagagcuacagcaucaugugcaucaucaaggaggaggugcuggccuacguggugcagcugccccuguacggcgugaucgacacccccugcuggaagcugcacaccagcccccugugcaccaccaacaccaaggagggcagcaacaucugccugaccagaaccgacagaggcugguacugcgacaacgccggcagcgugagcuucuucccccaggccgagaccugcaaggugcagagcaacagaguguucugcgacaccaugaacagcagaacccugcccagcgaggugaaccugugcaacaucgacaucuucaaccccaaguacgacugcaagaucaugaccagcaagaccgacgugagcagcagcgugaucaccagccugggcgccaucgugagcugcuacggcaagaccaagugcaccgccagcaacaagaacagaggcaucaucaagaccuucagcaacggcugcgacuacgugagcaacaagggcguggacaccgugagcgugggcaacacccuguacuacgugaacaagcaggagggcaagagccuguacgugaagggcgagcccaucaucaacuucuacgacccccugguguuccccagcgacgaguucgacgccagcaucagccaggugaacgagaagaucaaccagagccuggccuucaucagaaagagcgacgagcugcugcacaacgugaacgugggcaagagcaccaccaacaucaugaucaccaccaucaucaucgugaucaucgugauccugcugcugcugaucgccgugggccuguuccuguacugcaaggccagaugaggacuaguguccaccugucccuccugggcugcuggauugucucguuuuccugccaaauaaacaggaucagcgcuuuacagaucuaaaaaaaaaaaaaaaaaaaaaaaaaaaaaaaaaaaaaaaaaaaaaaaaaaaaaaaaaaaaaaaaugcaucccccccccccccccccccccccccccccccaaaggcucuuuucagagccaccagaauu

SEQ ID NO: 13665 - RNA, 1853 nt, Artificial Sequence
  mRNA product Design c-1 comprising derived and/or modified sequence from HRSV(Memphis-37)__AIY60640.1__F-del_DSCav1_mut0 (opt5)
gggagaguccgcucagccagguugcagaagcggcuuagcguguguccuaaucuucucucugcguguagguaggccugugccgcaaacaagcuuaccauggagcugcccauccucaagaccaacgccauuacaacgauccuggcugccgugacccuuugcuucgcgagcucccagaauauuacagaagaguuuuaccaaucuaccuguagcgcugucuccaaaggcuaucugucugcccucagaacagggugguacaccagcguuaucacaauugaacuguccaacaucaaggagaauaaaugcaacggaaccgacgccaaggugaaacuuaucaagcaggaacuggauaaguauaaaaaugcugugacggagcuccagcugcugaugcagucuaccccugccgcuggcagcggguccgccauugcgagcggaaucgccgucuguaaggugcuccaccuggagggcgaaguuaacaaaauuaagaaugcccuucugucuacaaacaaagcuguggucucccucagcaauggggugucuguucugaccuucaaggugcuugaccugaagaacuacaucgauaaacaacuccugccgauucugaauaagcaguccugcagcaucucuaacauugagacagucaucgaauuucagcagaaaaauaaccggcuccuggagaucacccgcgaguucuccgugaaugcuggagugacgacacccgucagcaccuauaugcuuacaaacuccgaacugcucucucugauuaacgacaugccuaucaccaaugaucaaaagaaacuuaugagcaacaauguucagauugugagacagcaguccuacagcaucauguguauuaucaaggaggaagugcuggccuaugucgugcaacucccccuguacggcguuaucgacaccccuugcuggaaacugcauacaucuccccucuguacgaccaacacaaaggagggcuccaauauuugccugacccggacagaucgcgggugguacugugacaacgcgggaagcgugagcuuuuucccucaggccgaaaccugcaagguccagucuaauagaguguuuugugauacgaugaacuccagaacacugccgucugagguuaaucucugcaacaucgacauuuucaaucccaaauaugauugcaagaucaugaccagcaaaaccgacguguccagcucugucauuacaucccugggcgcuaucgugagcuguuacgggaagaccaaaugcacagccucuaacaagaaucggggaaucauuaagacguuuuccaacggcugugauuaugucagcaauaaagggguggacaccguuuccgugggaaacacacuuuacuaugucaacaagcaagagggcaaaucucuguacgugaagggcgaaccuaucauuaauuucuaugacccccucguuuuuccuagcgaugaguucgacgcuuccaucucucaggugaacgaaaagauuaaucagagccuggccuuuauccgcaaguccgaugagcugcuccacaacgucaauguggggaaaagcaccacaaacauuaugaucaccacgaucauuaucgugauuaucguuauucugcuucugcucaucgccgucggacuguuccuguacugcaaagcuagaugaggacuaguguccaccugucccuccugggcugcuggauugucucguuuuccugccaaauaaacaggaucagcgcuuuacagaucuaaaaaaaaaaaaaaaaaaaaaaaaaaaaaaaaaaaaaaaaaaaaaaaaaaaaaaaaaaaaaaaaugcaucccccccccccccccccccccccccccccccaaaggcucuuuucagagccaccagaauu

SEQ ID NO: 13666 - RNA, 1853 nt, Artificial Sequence
  mRNA product Design c-1 comprising derived and/or modified sequence from HRSV(Memphis-37)__AIY60640.1__F-del_DSCav1_mut0 (opt6)
gggagaguccgcucagccagguugcagaagcggcuuagcguguguccuaaucuucucucugcguguagguaggccugugccgcaaacaagcuuaccauggaacucccaauacuuaaaacaaacgcaaucacaacaauacuagcugcagucacacuaugcuucgccucaucacaaaauauaacagaagaauuuuaucaaucaacaugcuccgcaguaucaaaaggauaucucucugcauuacgaacagguugguacaccucgguaauaacaauagaauuaucaaacauaaaagaaaauaaaugcaauggaaccgaugccaaaguaaaacuaaucaaacaagaacuugacaaauacaaaaacgcaguaacagaacuacaacuauuaaugcaaucaacaccagcagcagguucaggcuccgcaaucgcuucaggaauagccguuuguaaaguacuacacuuagaaggagaaguaaauaaaauaaaaaacgccuuacuaucaacaaacaaagcaguagucucccuuuccaacggaguaucagucuuaacuuuuaaaguacucgacuuaaaaaauuacaucgacaaacaacuacuacccauucuaaauaaacaaucaugcucaauaucaaacaucgaaacaguaaucgaauuucaacaaaaaaauaauagauuacuagaaauaacacgagaauuuuccguaaaugccggaguaacgaccccagucucaacauacauguuaacaaacucagaauuacuaucacucauuaacgauaugccaauaacaaaugaccaaaaaaaacuaaugucaaacaacguccaaauaguacgacaacaaucauacucuaucauguguauaauaaaagaagaaguuuuagcauacguaguacaacuaccacuuuacggagucauagacaccccaugcuggaaacuacacacaucacccuuauguacaacaaacaccaaagaagggucuaacauaugucucacuagaacagaucgaggcugguacugcgacaacgcaggaucaguuagcuuuuucccucaagccgaaaccuguaaaguacaauccaaucgaguauuuugcgacacuaugaacucuagaaccuuacccuccgaaguaaaccuauguaacauagacauauuuaaucccaaauaugauugcaaaaucaugacauccaaaacagauguaucaagcucuguaauaaccucacuaggagcaauaguuucaugcuaugguaaaacaaaaugcaccgccucaaacaaaaauagagggauaaucaaaaccuucucaaauggaugcgacuacguaucaaauaaaggaguagacaccgucuccguaggaaacacacuauacuacguaaacaaacaagaaggaaaaucacuauacguaaaaggagaaccaaucauaaacuucuacgacccacuuguuuucccaucagaugaauuugaugccuccauaucacaaguaaacgaaaaaauaaaccaaucucuagccuucaucagaaaauccgacgaacuuuuacacaacguaaacguagguaaaucaacaaccaacaucaugauaacaacaauaauaauaguaauaauuguaauacuuuuacuacuuaucgccguaggccuauucuuauauuguaaagcaagaugaggacuaguguccaccugucccuccugggcugcuggauugucucguuuuccugccaaauaaacaggaucagcgcuuuacagaucuaaaaaaaaaaaaaaaaaaaaaaaaaaaaaaaaaaaaaaaaaaaaaaaaaaaaaaaaaaaaaaaaugcaucccccccccccccccccccccccccccccccaaaggcucuuuucagagccaccagaauu

SEQ ID NO: 13667 - RNA, 1853 nt, Artificial Sequence
  mRNA product Design c-1 comprising derived and/or modified sequence from HRSV(Memphis-37)__AIY60640.1__F-del_DSCav1_mut0 (opt11)
gggagaguccgcucagccagguugcagaagcggcuuagcguguguccuaaucuucucucugcguguagguaggccugugccgcaaacaagcuuaccauggaacuaccaauccucaaaaccaacgccaucacuacaauccuagccgcgguaacccugugcuucgccuccucacaaaacaucacagaagaauuuuaccaaucaaccugcuccgccguauccaaaggauaccugagcgcccugagaaccggcugguacaccuccgucaucaccauagaacucuccaacaucaaagaaaacaaaugcaacgguacggacgccaaaguuaaacucaucaaacaagaacuugacaaauacaagaacgccgucacagaacugcaacuccucaugcaauccacccccgccgccggcuccggcuccgccauagccuccggcaucgccgucugcaaagucuuacaccuagaaggcgaagucaacaaaaucaaaaacgcacuacuuuccacaaacaaagccgucgucucacucuccaacggcguauccguccucaccuucaaaguacuugaccucaaaaacuacaucgacaaacaacuacuccccauccugaacaaacaauccugcucaaucuccaacaucgaaaccguaaucgaguuccaacagaaaaauaaucgccuccuggagaucacccgcgaguucuccgucaaugcaggagucacaaccccaguaucaaccuacaugcucaccaacuccgaacuccugucgcucaucaacgacaugcccaucacaaacgaccaaaagaaacucauguccaacaacguacaaaucgucagacaacaauccuauucuauaaugugcaucaucaaagaagaaguccucgccuacgucguacaacucccccucuacggcguuaucgacacccccugcuggaaacuccacaccucaccccucugcaccaccaacacaaaagaaggcuccaacaucugccucacucggaccgaccgcggcugguacugcgacaaugccggcagcgucuccuucuucccacaagccgaaaccugcaaaguccaguccaaccgcguauucugcgacacuaugaacuccagaacccuccccuccgaaguaaaccucugcaacaucgacaucuucaacccaaaauacgacugcaaaaucaugaccucaaaaaccgacgucagcucgucagucauaaccagccucggagccauagucucaugcuacggaaaaaccaaaugcaccgccagcaacaaaaaccgcggcauaauaaaaacauucuccaacggcugcgacuauguauccaacaaaggagucgauaccgucuccguaggcaacacccuauacuacgucaacaaacaagaaggcaaaucccucuacgucaaaggugaaccaaucaucaacuucuacgacccucucgucuuccccuccgaugaguucgacgccucaaucagccaaguaaacgaaaagauaaaccaaucacucgccuucauccgcaaauccgacgaacuucuucacaacgucaacgucggcaaaucuaccaccaacauaaugauaaccaccaucaucaucgucaucaucguaauacuccuccuucucaucgccgucggccuauuccuauacugcaaagcccgcuagggacuaguguccaccugucccuccugggcugcuggauugucucguuuuccugccaaauaaacaggaucagcgcuuuacagaucuaaaaaaaaaaaaaaaaaaaaaaaaaaaaaaaaaaaaaaaaaaaaaaaaaaaaaaaaaaaaaaaaugcaucccccccccccccccccccccccccccccccaaaggcucuuuucagagccaccagaauu

SEQ ID NO: 13668 - RNA, 1943 nt, Artificial Sequence
  mRNA product Design c-2 comprising derived and/or modified sequence from HRSV(Memphis-37)__AIY60640.1__F-del_DSCav1_mut0 (opt1)
gggagacuccugucgggcggaaguaggaggaguagaguuuaaaaacaguacucuuuuuccgguucgggacguaguugaagcaacgacaagccggauaaccgcucuugagacaggaagcuuaccauggagcugcccauccucaagaccaacgccaucaccacgauccuggccgcggugacccugugcuucgccagcucccagaacaucaccgaggaguucuaccagagcacgugcuccgccgucagcaagggcuaccucuccgcccugcgcaccgggugguacaccagcgugaucaccaucgagcuguccaacaucaaggagaacaagugcaacggcaccgacgccaaggugaagcucaucaagcaggagcuggacaaguacaagaacgcggucacggagcugcagcuccugaugcagagcaccccggccgccggcuccgggagcgcgaucgccuccggcaucgccgucugcaaggugcugcaccucgagggcgaggugaacaagaucaagaacgcccugcuguccaccaacaaggccgucgugagccucuccaacggggugagcguccugaccuucaaggugcuggaccucaagaacuacaucgacaagcagcugcugcccauccugaacaagcagagcugcuccaucagcaacaucgagaccgucaucgaguuccagcagaagaacaaccgccuccuggagaucacgcgggaguucagcgugaacgcgggcgugaccacccccgucuccaccuacaugcugacgaacagcgagcuccugucccugaucaacgacaugccgaucaccaacgaccagaagaagcucaugagcaacaacgugcagaucgugcgccagcaguccuacagcaucaugugcaucaucaaggaggagguccuggccuacguggugcagcugccccucuacggggucaucgacacccccugcuggaagcugcacaccagcccccugugcacgaccaacaccaaggagggcuccaacaucugccucacccggacggaccgcgggugguacugcgacaacgccggcagcguguccuucuucccgcaggccgagaccugcaagguccagagcaaccggguguucugcgacaccaugaacucccggacccugcccagcgaggugaaccucugcaacaucgacaucuucaaccccaaguacgacugcaagaucaugacguccaagaccgacgucagcuccagcgugaucaccucccugggcgccaucgugagcugcuacgggaagaccaagugcacggcgagcaacaagaaccgcggcaucaucaagaccuucuccaacgggugcgacuacgucagcaacaagggcguggacaccguguccgucggcaacacccuguacuacgugaacaagcaggagggcaagagccucuacgugaagggggagcccaucaucaacuucuacgacccgcuggucuuccccuccgacgaguucgacgccagcaucucccaggugaacgagaagaucaaccagagccuggccuucauccggaaguccgacgagcuccugcacaacgugaacgucggcaagagcaccacgaacaucaugaucaccaccaucaucaucgugaucaucgugauccugcugcuccugaucgccgucgggcuguuccucuacugcaaggcccgcugaggacuaguggaagcauuuuccuggcugauuaaaagaaauuacucagcuauggucaucuguuccuguuagaaggcuaugcagcauauuauauacuaugcgcauguuaugaaaugcauaauaaaaaauuuuaaaaaaucuaaaagaucuaaaaaaaaaaaaaaaaaaaaaaaaaaaaaaaaaaaaaaaaaaaaaaaaaaaaaaaaaaaaaaaaugcaucccccccccccccccccccccccccccccccaaaggcucuuuucagagccaccagaauu

SEQ ID NO: 13669 - RNA, 1943 nt, Artificial Sequence
  mRNA product Design c-2 comprising derived and/or modified sequence from HRSV(Memphis-37)__AIY60640.1__F-del_DSCav1_mut0 (opt1)
gggagacuccugucgggcggaaguaggaggaguagaguuuaaaaacaguacucuuuuuccgguucgggacguaguugaagcaacgacaagccggauaaccgcucuugagacaggaagcuuaccauggagcugcccauccucaagaccaacgccaucaccacgauccuggccgcggugacccugugcuucgccagcucccagaacaucaccgaggaguucuaccagagcacgugcuccgccgucagcaagggcuaccucuccgcccugcgcaccgggugguacaccagcgugaucaccaucgagcuguccaacaucaaggagaacaagugcaacggcaccgacgccaaggugaagcucaucaagcaggagcuggacaaguacaagaacgcggucacggagcugcagcuccugaugcagagcaccccggccgccggguccggcagcgccaucgcguccgggaucgccgugugcaaggugcugcaccucgagggcgaggucaacaagaucaagaacgcccugcugagcaccaacaaggccguggugucccucagcaacggcgucuccgugcugaccuucaaggugcuggaccucaagaacuacaucgacaagcagcugcugcccauccucaacaagcagagcugcuccaucagcaacaucgagacggucaucgaguuccagcagaagaacaaccggcugcuggagaucacccgcgaguucuccgugaacgccggggugaccacccccgucagcacguacaugcucaccaacagcgagcugcugucccucaucaacgacaugcccaucaccaacgaccagaagaagcugaugagcaacaacgugcagaucgugcggcagcaguccuacagcaucaugugcaucaucaaggaggagguccuggcguacguggugcagcucccgcuguacggcgucaucgacacccccugcuggaagcugcacacgagcccccucugcaccaccaacaccaaggagggguccaacaucugccugacgcgcaccgaccggggcugguacugcgacaacgccggguccgugagcuucuucccccaggccgagaccugcaaggugcaguccaaccgcgucuucugcgacaccaugaacagccggacgcucccguccgaggugaaccugugcaacaucgacaucuucaaccccaaguacgacugcaagaucaugaccagcaagaccgacgucuccagcuccgugaucaccagccugggcgccaucguguccugcuacggcaagacgaagugcaccgccagcaacaagaaccgggggaucaucaagaccuucuccaacggcugcgacuacgucagcaacaaggggguggacaccgugagcgucggcaacacgcucuacuacgugaacaagcaggagggcaagucccuguacgugaagggggagcccaucaucaacuucuacgacccccuggucuucccgagcgacgaguucgacgcguccaucagccaggugaacgagaagaucaaccagucccucgccuucauccgcaagagcgacgagcugcugcacaacgugaacgucggcaaguccaccaccaacaucaugaucaccaccaucaucaucgugaucaucgugauccuccugcugcucaucgccgucgggcuguuccuguacugcaaggcccggugaggacuaguggaagcauuuuccuggcugauuaaaagaaauuacucagcuauggucaucuguuccuguuagaaggcuaugcagcauauuauauacuaugcgcauguuaugaaaugcauaauaaaaaauuuuaaaaaaucuaaaagaucuaaaaaaaaaaaaaaaaaaaaaaaaaaaaaaaaaaaaaaaaaaaaaaaaaaaaaaaaaaaaaaaaugcaucccccccccccccccccccccccccccccccaaaggcucuuuucagagccaccagaauu

SEQ ID NO: 13670 - RNA, 1943 nt, Artificial Sequence
  mRNA product Design c-2 comprising derived and/or modified sequence from HRSV(Memphis-37)__AIY60640.1__F-del_DSCav1_mut0 (opt2)
gggagacuccugucgggcggaaguaggaggaguagaguuuaaaaacaguacucuuuuuccgguucgggacguaguugaagcaacgacaagccggauaaccgcucuugagacaggaagcuuaccauggagcuccccauccucaagaccaacgccaucaccaccauccucgccgccgucacccucugcuucgccuccucccagaacaucaccgaggaguucuaccaguccaccugcuccgccgucuccaagggcuaccucuccgcccuccgcaccggcugguacaccuccgucaucaccaucgagcucuccaacaucaaggagaacaagugcaacggcaccgacgccaaggucaagcucaucaagcaggagcucgacaaguacaagaacgccgucaccgagcuccagcuccucaugcaguccacccccgccgccggcuccggcuccgccaucgccuccggcaucgccgucugcaagguccuccaccucgagggcgaggucaacaagaucaagaacgcccuccucuccaccaacaaggccgucgucucccucuccaacggcgucuccguccucaccuucaagguccucgaccucaagaacuacaucgacaagcagcuccuccccauccucaacaagcaguccugcuccaucuccaacaucgagaccgucaucgaguuccagcagaagaacaaccgccuccucgagaucacccgcgaguucuccgucaacgccggcgucaccacccccgucuccaccuacaugcucaccaacuccgagcuccucucccucaucaacgacaugcccaucaccaacgaccagaagaagcucauguccaacaacguccagaucguccgccagcaguccuacuccaucaugugcaucaucaaggaggagguccucgccuacgucguccagcucccccucuacggcgucaucgacacccccugcuggaagcuccacaccuccccccucugcaccaccaacaccaaggagggcuccaacaucugccucacccgcaccgaccgcggcugguacugcgacaacgccggcuccgucuccuucuucccccaggccgagaccugcaagguccaguccaaccgcgucuucugcgacaccaugaacucccgcacccuccccuccgaggucaaccucugcaacaucgacaucuucaaccccaaguacgacugcaagaucaugaccuccaagaccgacgucuccuccuccgucaucaccucccucggcgccaucgucuccugcuacggcaagaccaagugcaccgccuccaacaagaaccgcggcaucaucaagaccuucuccaacggcugcgacuacgucuccaacaagggcgucgacaccgucuccgucggcaacacccucuacuacgucaacaagcaggagggcaagucccucuacgucaagggcgagcccaucaucaacuucuacgacccccucgucuuccccuccgacgaguucgacgccuccaucucccaggucaacgagaagaucaaccagucccucgccuucauccgcaaguccgacgagcuccuccacaacgucaacgucggcaaguccaccaccaacaucaugaucaccaccaucaucaucgucaucaucgucauccuccuccuccucaucgccgucggccucuuccucuacugcaaggcccgcugaggacuaguggaagcauuuuccuggcugauuaaaagaaauuacucagcuauggucaucuguuccuguuagaaggcuaugcagcauauuauauacuaugcgcauguuaugaaaugcauaauaaaaaauuuuaaaaaaucuaaaagaucuaaaaaaaaaaaaaaaaaaaaaaaaaaaaaaaaaaaaaaaaaaaaaaaaaaaaaaaaaaaaaaaaugcaucccccccccccccccccccccccccccccccaaaggcucuuuucagagccaccagaauu

SEQ ID NO: 13671 - RNA, 1943 nt, Artificial Sequence
  mRNA product Design c-2 comprising derived and/or modified sequence from HRSV(Memphis-37)__AIY60640.1__F-del_DSCav1_mut0 (opt3)
gggagacuccugucgggcggaaguaggaggaguagaguuuaaaaacaguacucuuuuuccgguucgggacguaguugaagcaacgacaagccggauaaccgcucuugagacaggaagcuuaccauggagcugcccauccucaagaccaacgccauuacaacuauacuugcugcagugacgcugugcuucgccagcucccagaauaucaccgaagaguuuuaccaaucuacauguucagcggucaguaaaggcuauuugagcgcuuuaagaacugggugguacaccuccguuauuacaaucgaacugucuaacauuaaggagaauaaaugcaacggaaccgacgccaaggugaaacuaaucaagcaggaacucgauaaguauaaaaaugcaguaacugagcugcagcuucugaugcagucgaccccugccgcugguucaggcagcgcaauagccagugggaucgcuguguguaaggucuugcaccucgagggagaagugaacaaaauuaagaaugcccugcuguccacaaacaaagcgguugugucucucagcaauggcgucuccguguuaacguucaagguacuggaccuuaagaacuacaucgauaaacaauugcugccaauucuaaauaagcagucaugcaguaucagcaacauagagacuguuauugaauuucagcagaaaaauaacaggcuccuggagaucacccgggaguucucugugaaugccggugucacaacuccgguguccaccuauaugcuuacaaacucagaacuguugagccucauuaacgacaugcccaucaccaaugaucaaaagaaacugaugaguaacaaugugcagaucguccgccagcagucuuacuccauuauguguauaaucaaggaggaaguuuuagcauaugugguacaacugccucucuacggggugauugacacgccaugcuggaaacuucauacuagcccccuguguacaaccaacacuaaggagggaucgaauaucugcuugacacgaaccgaucguggcugguacugugacaacgcuggcucugucuccuuuuucccucaggccgaaacgugcaaggugcagucaaauagaguguuuugugauaccaugaacaguagaacacugccaagcgaggugaaucucugcaacauagacauuuucaaucccaaauaugauugcaagaucaugacuuccaaaaccgacgucucuagcucagugaucacaagucugggggcaauuguauccuguuacggaaagacuaaaugcaccgcuagcaacaagaauagggguaucauuaagacauuuucuaacggcugugauuauguuucaaauaaagggguggacaccgucagugugggaaacacucuuuacuaugucaacaagcaagagggcaaaagccuguacgugaagggugaaccuauaaucaauuucuaugacccauugguuuuuccguccgaugaguucgacgccucuauuucgcagguuaacgagaaaaucaaucagagccucgcguuuauccggaaguccgaugaacuguuacacaacguaaaugucgggaagucaacgacaaacauuaugauaaccacuaucauuaucgugauuaucguuauacugcuacuccugaucgccgugggacuuuucuuguacugcaaagcacgcugaggacuaguggaagcauuuuccuggcugauuaaaagaaauuacucagcuauggucaucuguuccuguuagaaggcuaugcagcauauuauauacuaugcgcauguuaugaaaugcauaauaaaaaauuuuaaaaaaucuaaaagaucuaaaaaaaaaaaaaaaaaaaaaaaaaaaaaaaaaaaaaaaaaaaaaaaaaaaaaaaaaaaaaaaaugcaucccccccccccccccccccccccccccccccaaaggcucuuuucagagccaccagaauu

SEQ ID NO: 13672 - RNA, 1943 nt, Artificial Sequence
  mRNA product Design c-2 comprising derived and/or modified sequence from HRSV(Memphis-37)__AIY60640.1__F-del_DSCav1_mut0 (opt4)
gggagacuccugucgggcggaaguaggaggaguagaguuuaaaaacaguacucuuuuuccgguucgggacguaguugaagcaacgacaagccggauaaccgcucuugagacaggaagcuuaccauggagcugcccauccugaagaccaacgccaucaccaccauccuggccgccgugacccugugcuucgccagcagccagaacaucaccgaggaguucuaccagagcaccugcagcgccgugagcaagggcuaccugagcgcccugagaaccggcugguacaccagcgugaucaccaucgagcugagcaacaucaaggagaacaagugcaacggcaccgacgccaaggugaagcugaucaagcaggagcuggacaaguacaagaacgccgugaccgagcugcagcugcugaugcagagcacccccgccgccggcagcggcagcgccaucgccagcggcaucgccgugugcaaggugcugcaccuggagggcgaggugaacaagaucaagaacgcccugcugagcaccaacaaggccguggugagccugagcaacggcgugagcgugcugaccuucaaggugcuggaccugaagaacuacaucgacaagcagcugcugcccauccugaacaagcagagcugcagcaucagcaacaucgagaccgugaucgaguuccagcagaagaacaacagacugcuggagaucaccagagaguucagcgugaacgccggcgugaccacccccgugagcaccuacaugcugaccaacagcgagcugcugagccugaucaacgacaugcccaucaccaacgaccagaagaagcugaugagcaacaacgugcagaucgugagacagcagagcuacagcaucaugugcaucaucaaggaggaggugcuggccuacguggugcagcugccccuguacggcgugaucgacacccccugcuggaagcugcacaccagcccccugugcaccaccaacaccaaggagggcagcaacaucugccugaccagaaccgacagaggcugguacugcgacaacgccggcagcgugagcuucuucccccaggccgagaccugcaaggugcagagcaacagaguguucugcgacaccaugaacagcagaacccugcccagcgaggugaaccugugcaacaucgacaucuucaaccccaaguacgacugcaagaucaugaccagcaagaccgacgugagcagcagcgugaucaccagccugggcgccaucgugagcugcuacggcaagaccaagugcaccgccagcaacaagaacagaggcaucaucaagaccuucagcaacggcugcgacuacgugagcaacaagggcguggacaccgugagcgugggcaacacccuguacuacgugaacaagcaggagggcaagagccuguacgugaagggcgagcccaucaucaacuucuacgacccccugguguuccccagcgacgaguucgacgccagcaucagccaggugaacgagaagaucaaccagagccuggccuucaucagaaagagcgacgagcugcugcacaacgugaacgugggcaagagcaccaccaacaucaugaucaccaccaucaucaucgugaucaucgugauccugcugcugcugaucgccgugggccuguuccuguacugcaaggccagaugaggacuaguggaagcauuuuccuggcugauuaaaagaaauuacucagcuauggucaucuguuccuguuagaaggcuaugcagcauauuauauacuaugcgcauguuaugaaaugcauaauaaaaaauuuuaaaaaaucuaaaagaucuaaaaaaaaaaaaaaaaaaaaaaaaaaaaaaaaaaaaaaaaaaaaaaaaaaaaaaaaaaaaaaaaugcaucccccccccccccccccccccccccccccccaaaggcucuuuucagagccaccagaauu

SEQ ID NO: 13673 - RNA, 1943 nt, Artificial Sequence
  mRNA product Design c-2 comprising derived and/or modified sequence from HRSV(Memphis-37)__AIY60640.1__F-del_DSCav1_mut0 (opt5)
gggagacuccugucgggcggaaguaggaggaguagaguuuaaaaacaguacucuuuuuccgguucgggacguaguugaagcaacgacaagccggauaaccgcucuugagacaggaagcuuaccauggagcugcccauccucaagaccaacgccauuacaacgauccuggcugccgugacccuuugcuucgcgagcucccagaauauuacagaagaguuuuaccaaucuaccuguagcgcugucuccaaaggcuaucugucugcccucagaacagggugguacaccagcguuaucacaauugaacuguccaacaucaaggagaauaaaugcaacggaaccgacgccaaggugaaacuuaucaagcaggaacuggauaaguauaaaaaugcugugacggagcuccagcugcugaugcagucuaccccugccgcuggcagcggguccgccauugcgagcggaaucgccgucuguaaggugcuccaccuggagggcgaaguuaacaaaauuaagaaugcccuucugucuacaaacaaagcuguggucucccucagcaauggggugucuguucugaccuucaaggugcuugaccugaagaacuacaucgauaaacaacuccugccgauucugaauaagcaguccugcagcaucucuaacauugagacagucaucgaauuucagcagaaaaauaaccggcuccuggagaucacccgcgaguucuccgugaaugcuggagugacgacacccgucagcaccuauaugcuuacaaacuccgaacugcucucucugauuaacgacaugccuaucaccaaugaucaaaagaaacuuaugagcaacaauguucagauugugagacagcaguccuacagcaucauguguauuaucaaggaggaagugcuggccuaugucgugcaacucccccuguacggcguuaucgacaccccuugcuggaaacugcauacaucuccccucuguacgaccaacacaaaggagggcuccaauauuugccugacccggacagaucgcgggugguacugugacaacgcgggaagcgugagcuuuuucccucaggccgaaaccugcaagguccagucuaauagaguguuuugugauacgaugaacuccagaacacugccgucugagguuaaucucugcaacaucgacauuuucaaucccaaauaugauugcaagaucaugaccagcaaaaccgacguguccagcucugucauuacaucccugggcgcuaucgugagcuguuacgggaagaccaaaugcacagccucuaacaagaaucggggaaucauuaagacguuuuccaacggcugugauuaugucagcaauaaagggguggacaccguuuccgugggaaacacacuuuacuaugucaacaagcaagagggcaaaucucuguacgugaagggcgaaccuaucauuaauuucuaugacccccucguuuuuccuagcgaugaguucgacgcuuccaucucucaggugaacgaaaagauuaaucagagccuggccuuuauccgcaaguccgaugagcugcuccacaacgucaauguggggaaaagcaccacaaacauuaugaucaccacgaucauuaucgugauuaucguuauucugcuucugcucaucgccgucggacuguuccuguacugcaaagcuagaugaggacuaguggaagcauuuuccuggcugauuaaaagaaauuacucagcuauggucaucuguuccuguuagaaggcuaugcagcauauuauauacuaugcgcauguuaugaaaugcauaauaaaaaauuuuaaaaaaucuaaaagaucuaaaaaaaaaaaaaaaaaaaaaaaaaaaaaaaaaaaaaaaaaaaaaaaaaaaaaaaaaaaaaaaaugcaucccccccccccccccccccccccccccccccaaaggcucuuuucagagccaccagaauu

SEQ ID NO: 13674 - RNA, 1943 nt, Artificial Sequence
  mRNA product Design c-2 comprising derived and/or modified sequence from HRSV(Memphis-37)__AIY60640.1__F-del_DSCav1_mut0 (opt6)
gggagacuccugucgggcggaaguaggaggaguagaguuuaaaaacaguacucuuuuuccgguucgggacguaguugaagcaacgacaagccggauaaccgcucuugagacaggaagcuuaccauggaacucccaauacuuaaaacaaacgcaaucacaacaauacuagcugcagucacacuaugcuucgccucaucacaaaauauaacagaagaauuuuaucaaucaacaugcuccgcaguaucaaaaggauaucucucugcauuacgaacagguugguacaccucgguaauaacaauagaauuaucaaacauaaaagaaaauaaaugcaauggaaccgaugccaaaguaaaacuaaucaaacaagaacuugacaaauacaaaaacgcaguaacagaacuacaacuauuaaugcaaucaacaccagcagcagguucaggcuccgcaaucgcuucaggaauagccguuuguaaaguacuacacuuagaaggagaaguaaauaaaauaaaaaacgccuuacuaucaacaaacaaagcaguagucucccuuuccaacggaguaucagucuuaacuuuuaaaguacucgacuuaaaaaauuacaucgacaaacaacuacuacccauucuaaauaaacaaucaugcucaauaucaaacaucgaaacaguaaucgaauuucaacaaaaaaauaauagauuacuagaaauaacacgagaauuuuccguaaaugccggaguaacgaccccagucucaacauacauguuaacaaacucagaauuacuaucacucauuaacgauaugccaauaacaaaugaccaaaaaaaacuaaugucaaacaacguccaaauaguacgacaacaaucauacucuaucauguguauaauaaaagaagaaguuuuagcauacguaguacaacuaccacuuuacggagucauagacaccccaugcuggaaacuacacacaucacccuuauguacaacaaacaccaaagaagggucuaacauaugucucacuagaacagaucgaggcugguacugcgacaacgcaggaucaguuagcuuuuucccucaagccgaaaccuguaaaguacaauccaaucgaguauuuugcgacacuaugaacucuagaaccuuacccuccgaaguaaaccuauguaacauagacauauuuaaucccaaauaugauugcaaaaucaugacauccaaaacagauguaucaagcucuguaauaaccucacuaggagcaauaguuucaugcuaugguaaaacaaaaugcaccgccucaaacaaaaauagagggauaaucaaaaccuucucaaauggaugcgacuacguaucaaauaaaggaguagacaccgucuccguaggaaacacacuauacuacguaaacaaacaagaaggaaaaucacuauacguaaaaggagaaccaaucauaaacuucuacgacccacuuguuuucccaucagaugaauuugaugccuccauaucacaaguaaacgaaaaaauaaaccaaucucuagccuucaucagaaaauccgacgaacuuuuacacaacguaaacguagguaaaucaacaaccaacaucaugauaacaacaauaauaauaguaauaauuguaauacuuuuacuacuuaucgccguaggccuauucuuauauuguaaagcaagaugaggacuaguggaagcauuuuccuggcugauuaaaagaaauuacucagcuauggucaucuguuccuguuagaaggcuaugcagcauauuauauacuaugcgcauguuaugaaaugcauaauaaaaaauuuuaaaaaaucuaaaagaucuaaaaaaaaaaaaaaaaaaaaaaaaaaaaaaaaaaaaaaaaaaaaaaaaaaaaaaaaaaaaaaaaugcaucccccccccccccccccccccccccccccccaaaggcucuuuucagagccaccagaauu

SEQ ID NO: 13675 - RNA, 1943 nt, Artificial Sequence
  mRNA product Design c-2 comprising derived and/or modified sequence from HRSV(Memphis-37)__AIY60640.1__F-del_DSCav1_mut0 (opt11)
gggagacuccugucgggcggaaguaggaggaguagaguuuaaaaacaguacucuuuuuccgguucgggacguaguugaagcaacgacaagccggauaaccgcucuugagacaggaagcuuaccauggaacuaccaauccucaaaaccaacgccaucacuacaauccuagccgcgguaacccugugcuucgccuccucacaaaacaucacagaagaauuuuaccaaucaaccugcuccgccguauccaaaggauaccugagcgcccugagaaccggcugguacaccuccgucaucaccauagaacucuccaacaucaaagaaaacaaaugcaacgguacggacgccaaaguuaaacucaucaaacaagaacuugacaaauacaagaacgccgucacagaacugcaacuccucaugcaauccacccccgccgccggcuccggcuccgccauagccuccggcaucgccgucugcaaagucuuacaccuagaaggcgaagucaacaaaaucaaaaacgcacuacuuuccacaaacaaagccgucgucucacucuccaacggcguauccguccucaccuucaaaguacuugaccucaaaaacuacaucgacaaacaacuacuccccauccugaacaaacaauccugcucaaucuccaacaucgaaaccguaaucgaguuccaacagaaaaauaaucgccuccuggagaucacccgcgaguucuccgucaaugcaggagucacaaccccaguaucaaccuacaugcucaccaacuccgaacuccugucgcucaucaacgacaugcccaucacaaacgaccaaaagaaacucauguccaacaacguacaaaucgucagacaacaauccuauucuauaaugugcaucaucaaagaagaaguccucgccuacgucguacaacucccccucuacggcguuaucgacacccccugcuggaaacuccacaccucaccccucugcaccaccaacacaaaagaaggcuccaacaucugccucacucggaccgaccgcggcugguacugcgacaaugccggcagcgucuccuucuucccacaagccgaaaccugcaaaguccaguccaaccgcguauucugcgacacuaugaacuccagaacccuccccuccgaaguaaaccucugcaacaucgacaucuucaacccaaaauacgacugcaaaaucaugaccucaaaaaccgacgucagcucgucagucauaaccagccucggagccauagucucaugcuacggaaaaaccaaaugcaccgccagcaacaaaaaccgcggcauaauaaaaacauucuccaacggcugcgacuauguauccaacaaaggagucgauaccgucuccguaggcaacacccuauacuacgucaacaaacaagaaggcaaaucccucuacgucaaaggugaaccaaucaucaacuucuacgacccucucgucuuccccuccgaugaguucgacgccucaaucagccaaguaaacgaaaagauaaaccaaucacucgccuucauccgcaaauccgacgaacuucuucacaacgucaacgucggcaaaucuaccaccaacauaaugauaaccaccaucaucaucgucaucaucguaauacuccuccuucucaucgccgucggccuauuccuauacugcaaagcccgcuagggacuaguggaagcauuuuccuggcugauuaaaagaaauuacucagcuauggucaucuguuccuguuagaaggcuaugcagcauauuauauacuaugcgcauguuaugaaaugcauaauaaaaaauuuuaaaaaaucuaaaagaucuaaaaaaaaaaaaaaaaaaaaaaaaaaaaaaaaaaaaaaaaaaaaaaaaaaaaaaaaaaaaaaaaugcaucccccccccccccccccccccccccccccccaaaggcucuuuucagagccaccagaauu

SEQ ID NO: 13676 - RNA, 1920 nt, Artificial Sequence
  mRNA product Design c-3 comprising derived and/or modified sequence from HRSV(Memphis-37)__AIY60640.1__F-del_DSCav1_mut0 (opt1)
gggagaguccgcucagccagguugcagaagcggcuuagcguguguccuaaucuucucucugcguguagguaggccugugccgcaaacaagcuuaccauggagcugcccauccucaagaccaacgccaucaccacgauccuggccgcggugacccugugcuucgccagcucccagaacaucaccgaggaguucuaccagagcacgugcuccgccgucagcaagggcuaccucuccgcccugcgcaccgggugguacaccagcgugaucaccaucgagcuguccaacaucaaggagaacaagugcaacggcaccgacgccaaggugaagcucaucaagcaggagcuggacaaguacaagaacgcggucacggagcugcagcuccugaugcagagcaccccggccgccggcuccgggagcgcgaucgccuccggcaucgccgucugcaaggugcugcaccucgagggcgaggugaacaagaucaagaacgcccugcuguccaccaacaaggccgucgugagccucuccaacggggugagcguccugaccuucaaggugcuggaccucaagaacuacaucgacaagcagcugcugcccauccugaacaagcagagcugcuccaucagcaacaucgagaccgucaucgaguuccagcagaagaacaaccgccuccuggagaucacgcgggaguucagcgugaacgcgggcgugaccacccccgucuccaccuacaugcugacgaacagcgagcuccugucccugaucaacgacaugccgaucaccaacgaccagaagaagcucaugagcaacaacgugcagaucgugcgccagcaguccuacagcaucaugugcaucaucaaggaggagguccuggccuacguggugcagcugccccucuacggggucaucgacacccccugcuggaagcugcacaccagcccccugugcacgaccaacaccaaggagggcuccaacaucugccucacccggacggaccgcgggugguacugcgacaacgccggcagcguguccuucuucccgcaggccgagaccugcaagguccagagcaaccggguguucugcgacaccaugaacucccggacccugcccagcgaggugaaccucugcaacaucgacaucuucaaccccaaguacgacugcaagaucaugacguccaagaccgacgucagcuccagcgugaucaccucccugggcgccaucgugagcugcuacgggaagaccaagugcacggcgagcaacaagaaccgcggcaucaucaagaccuucuccaacgggugcgacuacgucagcaacaagggcguggacaccguguccgucggcaacacccuguacuacgugaacaagcaggagggcaagagccucuacgugaagggggagcccaucaucaacuucuacgacccgcuggucuuccccuccgacgaguucgacgccagcaucucccaggugaacgagaagaucaaccagagccuggccuucauccggaaguccgacgagcuccugcacaacgugaacgucggcaagagcaccacgaacaucaugaucaccaccaucaucaucgugaucaucgugauccugcugcuccugaucgccgucgggcuguuccucuacugcaaggcccgcugaggacuaguacuggcugcaucucccuuuccucuguccuccauccuucucccaggauggugaagggggaccugguacccagugauccccaccccaggauccuaaaucaugacuuaccugcuaauaaaaacucauuggaaaagugagaagaucuaaaaaaaaaaaaaaaaaaaaaaaaaaaaaaaaaaaaaaaaaaaaaaaaaaaaaaaaaaaaaaaaugcaucccccccccccccccccccccccccccccccaaaggcucuuuucagagccaccagaauu

SEQ ID NO: 13677 - RNA, 1920 nt, Artificial Sequence
  mRNA product Design c-3 comprising derived and/or modified sequence from HRSV(Memphis-37)__AIY60640.1__F-del_DSCav1_mut0 (opt1)
gggagaguccgcucagccagguugcagaagcggcuuagcguguguccuaaucuucucucugcguguagguaggccugugccgcaaacaagcuuaccauggagcugcccauccucaagaccaacgccaucaccacgauccuggccgcggugacccugugcuucgccagcucccagaacaucaccgaggaguucuaccagagcacgugcuccgccgucagcaagggcuaccucuccgcccugcgcaccgggugguacaccagcgugaucaccaucgagcuguccaacaucaaggagaacaagugcaacggcaccgacgccaaggugaagcucaucaagcaggagcuggacaaguacaagaacgcggucacggagcugcagcuccugaugcagagcaccccggccgccggguccggcagcgccaucgcguccgggaucgccgugugcaaggugcugcaccucgagggcgaggucaacaagaucaagaacgcccugcugagcaccaacaaggccguggugucccucagcaacggcgucuccgugcugaccuucaaggugcuggaccucaagaacuacaucgacaagcagcugcugcccauccucaacaagcagagcugcuccaucagcaacaucgagacggucaucgaguuccagcagaagaacaaccggcugcuggagaucacccgcgaguucuccgugaacgccggggugaccacccccgucagcacguacaugcucaccaacagcgagcugcugucccucaucaacgacaugcccaucaccaacgaccagaagaagcugaugagcaacaacgugcagaucgugcggcagcaguccuacagcaucaugugcaucaucaaggaggagguccuggcguacguggugcagcucccgcuguacggcgucaucgacacccccugcuggaagcugcacacgagcccccucugcaccaccaacaccaaggagggguccaacaucugccugacgcgcaccgaccggggcugguacugcgacaacgccggguccgugagcuucuucccccaggccgagaccugcaaggugcaguccaaccgcgucuucugcgacaccaugaacagccggacgcucccguccgaggugaaccugugcaacaucgacaucuucaaccccaaguacgacugcaagaucaugaccagcaagaccgacgucuccagcuccgugaucaccagccugggcgccaucguguccugcuacggcaagacgaagugcaccgccagcaacaagaaccgggggaucaucaagaccuucuccaacggcugcgacuacgucagcaacaaggggguggacaccgugagcgucggcaacacgcucuacuacgugaacaagcaggagggcaagucccuguacgugaagggggagcccaucaucaacuucuacgacccccuggucuucccgagcgacgaguucgacgcguccaucagccaggugaacgagaagaucaaccagucccucgccuucauccgcaagagcgacgagcugcugcacaacgugaacgucggcaaguccaccaccaacaucaugaucaccaccaucaucaucgugaucaucgugauccuccugcugcucaucgccgucgggcuguuccuguacugcaaggcccggugaggacuaguacuggcugcaucucccuuuccucuguccuccauccuucucccaggauggugaagggggaccugguacccagugauccccaccccaggauccuaaaucaugacuuaccugcuaauaaaaacucauuggaaaagugagaagaucuaaaaaaaaaaaaaaaaaaaaaaaaaaaaaaaaaaaaaaaaaaaaaaaaaaaaaaaaaaaaaaaaugcaucccccccccccccccccccccccccccccccaaaggcucuuuucagagccaccagaauu

SEQ ID NO: 13678 - RNA, 1920 nt, Artificial Sequence
  mRNA product Design c-3 comprising derived and/or modified sequence from HRSV(Memphis-37)__AIY60640.1__F-del_DSCav1_mut0 (opt2)
gggagaguccgcucagccagguugcagaagcggcuuagcguguguccuaaucuucucucugcguguagguaggccugugccgcaaacaagcuuaccauggagcuccccauccucaagaccaacgccaucaccaccauccucgccgccgucacccucugcuucgccuccucccagaacaucaccgaggaguucuaccaguccaccugcuccgccgucuccaagggcuaccucuccgcccuccgcaccggcugguacaccuccgucaucaccaucgagcucuccaacaucaaggagaacaagugcaacggcaccgacgccaaggucaagcucaucaagcaggagcucgacaaguacaagaacgccgucaccgagcuccagcuccucaugcaguccacccccgccgccggcuccggcuccgccaucgccuccggcaucgccgucugcaagguccuccaccucgagggcgaggucaacaagaucaagaacgcccuccucuccaccaacaaggccgucgucucccucuccaacggcgucuccguccucaccuucaagguccucgaccucaagaacuacaucgacaagcagcuccuccccauccucaacaagcaguccugcuccaucuccaacaucgagaccgucaucgaguuccagcagaagaacaaccgccuccucgagaucacccgcgaguucuccgucaacgccggcgucaccacccccgucuccaccuacaugcucaccaacuccgagcuccucucccucaucaacgacaugcccaucaccaacgaccagaagaagcucauguccaacaacguccagaucguccgccagcaguccuacuccaucaugugcaucaucaaggaggagguccucgccuacgucguccagcucccccucuacggcgucaucgacacccccugcuggaagcuccacaccuccccccucugcaccaccaacaccaaggagggcuccaacaucugccucacccgcaccgaccgcggcugguacugcgacaacgccggcuccgucuccuucuucccccaggccgagaccugcaagguccaguccaaccgcgucuucugcgacaccaugaacucccgcacccuccccuccgaggucaaccucugcaacaucgacaucuucaaccccaaguacgacugcaagaucaugaccuccaagaccgacgucuccuccuccgucaucaccucccucggcgccaucgucuccugcuacggcaagaccaagugcaccgccuccaacaagaaccgcggcaucaucaagaccuucuccaacggcugcgacuacgucuccaacaagggcgucgacaccgucuccgucggcaacacccucuacuacgucaacaagcaggagggcaagucccucuacgucaagggcgagcccaucaucaacuucuacgacccccucgucuuccccuccgacgaguucgacgccuccaucucccaggucaacgagaagaucaaccagucccucgccuucauccgcaaguccgacgagcuccuccacaacgucaacgucggcaaguccaccaccaacaucaugaucaccaccaucaucaucgucaucaucgucauccuccuccuccucaucgccgucggccucuuccucuacugcaaggcccgcugaggacuaguacuggcugcaucucccuuuccucuguccuccauccuucucccaggauggugaagggggaccugguacccagugauccccaccccaggauccuaaaucaugacuuaccugcuaauaaaaacucauuggaaaagugagaagaucuaaaaaaaaaaaaaaaaaaaaaaaaaaaaaaaaaaaaaaaaaaaaaaaaaaaaaaaaaaaaaaaaugcaucccccccccccccccccccccccccccccccaaaggcucuuuucagagccaccagaauu

SEQ ID NO: 13679 - RNA, 1920 nt, Artificial Sequence
  mRNA product Design c-3 comprising derived and/or modified sequence from HRSV(Memphis-37)__AIY60640.1__F-del_DSCav1_mut0 (opt3)
gggagaguccgcucagccagguugcagaagcggcuuagcguguguccuaaucuucucucugcguguagguaggccugugccgcaaacaagcuuaccauggagcugcccauccucaagaccaacgccauuacaacuauacuugcugcagugacgcugugcuucgccagcucccagaauaucaccgaagaguuuuaccaaucuacauguucagcggucaguaaaggcuauuugagcgcuuuaagaacugggugguacaccuccguuauuacaaucgaacugucuaacauuaaggagaauaaaugcaacggaaccgacgccaaggugaaacuaaucaagcaggaacucgauaaguauaaaaaugcaguaacugagcugcagcuucugaugcagucgaccccugccgcugguucaggcagcgcaauagccagugggaucgcuguguguaaggucuugcaccucgagggagaagugaacaaaauuaagaaugcccugcuguccacaaacaaagcgguugugucucucagcaauggcgucuccguguuaacguucaagguacuggaccuuaagaacuacaucgauaaacaauugcugccaauucuaaauaagcagucaugcaguaucagcaacauagagacuguuauugaauuucagcagaaaaauaacaggcuccuggagaucacccgggaguucucugugaaugccggugucacaacuccgguguccaccuauaugcuuacaaacucagaacuguugagccucauuaacgacaugcccaucaccaaugaucaaaagaaacugaugaguaacaaugugcagaucguccgccagcagucuuacuccauuauguguauaaucaaggaggaaguuuuagcauaugugguacaacugccucucuacggggugauugacacgccaugcuggaaacuucauacuagcccccuguguacaaccaacacuaaggagggaucgaauaucugcuugacacgaaccgaucguggcugguacugugacaacgcuggcucugucuccuuuuucccucaggccgaaacgugcaaggugcagucaaauagaguguuuugugauaccaugaacaguagaacacugccaagcgaggugaaucucugcaacauagacauuuucaaucccaaauaugauugcaagaucaugacuuccaaaaccgacgucucuagcucagugaucacaagucugggggcaauuguauccuguuacggaaagacuaaaugcaccgcuagcaacaagaauagggguaucauuaagacauuuucuaacggcugugauuauguuucaaauaaagggguggacaccgucagugugggaaacacucuuuacuaugucaacaagcaagagggcaaaagccuguacgugaagggugaaccuauaaucaauuucuaugacccauugguuuuuccguccgaugaguucgacgccucuauuucgcagguuaacgagaaaaucaaucagagccucgcguuuauccggaaguccgaugaacuguuacacaacguaaaugucgggaagucaacgacaaacauuaugauaaccacuaucauuaucgugauuaucguuauacugcuacuccugaucgccgugggacuuuucuuguacugcaaagcacgcugaggacuaguacuggcugcaucucccuuuccucuguccuccauccuucucccaggauggugaagggggaccugguacccagugauccccaccccaggauccuaaaucaugacuuaccugcuaauaaaaacucauuggaaaagugagaagaucuaaaaaaaaaaaaaaaaaaaaaaaaaaaaaaaaaaaaaaaaaaaaaaaaaaaaaaaaaaaaaaaaugcaucccccccccccccccccccccccccccccccaaaggcucuuuucagagccaccagaauu

SEQ ID NO: 13680 - RNA, 1920 nt, Artificial Sequence
  mRNA product Design c-3 comprising derived and/or modified sequence from HRSV(Memphis-37)__AIY60640.1__F-del_DSCav1_mut0 (opt4)
gggagaguccgcucagccagguugcagaagcggcuuagcguguguccuaaucuucucucugcguguagguaggccugugccgcaaacaagcuuaccauggagcugcccauccugaagaccaacgccaucaccaccauccuggccgccgugacccugugcuucgccagcagccagaacaucaccgaggaguucuaccagagcaccugcagcgccgugagcaagggcuaccugagcgcccugagaaccggcugguacaccagcgugaucaccaucgagcugagcaacaucaaggagaacaagugcaacggcaccgacgccaaggugaagcugaucaagcaggagcuggacaaguacaagaacgccgugaccgagcugcagcugcugaugcagagcacccccgccgccggcagcggcagcgccaucgccagcggcaucgccgugugcaaggugcugcaccuggagggcgaggugaacaagaucaagaacgcccugcugagcaccaacaaggccguggugagccugagcaacggcgugagcgugcugaccuucaaggugcuggaccugaagaacuacaucgacaagcagcugcugcccauccugaacaagcagagcugcagcaucagcaacaucgagaccgugaucgaguuccagcagaagaacaacagacugcuggagaucaccagagaguucagcgugaacgccggcgugaccacccccgugagcaccuacaugcugaccaacagcgagcugcugagccugaucaacgacaugcccaucaccaacgaccagaagaagcugaugagcaacaacgugcagaucgugagacagcagagcuacagcaucaugugcaucaucaaggaggaggugcuggccuacguggugcagcugccccuguacggcgugaucgacacccccugcuggaagcugcacaccagcccccugugcaccaccaacaccaaggagggcagcaacaucugccugaccagaaccgacagaggcugguacugcgacaacgccggcagcgugagcuucuucccccaggccgagaccugcaaggugcagagcaacagaguguucugcgacaccaugaacagcagaacccugcccagcgaggugaaccugugcaacaucgacaucuucaaccccaaguacgacugcaagaucaugaccagcaagaccgacgugagcagcagcgugaucaccagccugggcgccaucgugagcugcuacggcaagaccaagugcaccgccagcaacaagaacagaggcaucaucaagaccuucagcaacggcugcgacuacgugagcaacaagggcguggacaccgugagcgugggcaacacccuguacuacgugaacaagcaggagggcaagagccuguacgugaagggcgagcccaucaucaacuucuacgacccccugguguuccccagcgacgaguucgacgccagcaucagccaggugaacgagaagaucaaccagagccuggccuucaucagaaagagcgacgagcugcugcacaacgugaacgugggcaagagcaccaccaacaucaugaucaccaccaucaucaucgugaucaucgugauccugcugcugcugaucgccgugggccuguuccuguacugcaaggccagaugaggacuaguacuggcugcaucucccuuuccucuguccuccauccuucucccaggauggugaagggggaccugguacccagugauccccaccccaggauccuaaaucaugacuuaccugcuaauaaaaacucauuggaaaagugagaagaucuaaaaaaaaaaaaaaaaaaaaaaaaaaaaaaaaaaaaaaaaaaaaaaaaaaaaaaaaaaaaaaaaugcaucccccccccccccccccccccccccccccccaaaggcucuuuucagagccaccagaauu

SEQ ID NO: 13681 - RNA, 1920 nt, Artificial Sequence
  mRNA product Design c-3 comprising derived and/or modified sequence from HRSV(Memphis-37)__AIY60640.1__F-del_DSCav1_mut0 (opt5)
gggagaguccgcucagccagguugcagaagcggcuuagcguguguccuaaucuucucucugcguguagguaggccugugccgcaaacaagcuuaccauggagcugcccauccucaagaccaacgccauuacaacgauccuggcugccgugacccuuugcuucgcgagcucccagaauauuacagaagaguuuuaccaaucuaccuguagcgcugucuccaaaggcuaucugucugcccucagaacagggugguacaccagcguuaucacaauugaacuguccaacaucaaggagaauaaaugcaacggaaccgacgccaaggugaaacuuaucaagcaggaacuggauaaguauaaaaaugcugugacggagcuccagcugcugaugcagucuaccccugccgcuggcagcggguccgccauugcgagcggaaucgccgucuguaaggugcuccaccuggagggcgaaguuaacaaaauuaagaaugcccuucugucuacaaacaaagcuguggucucccucagcaauggggugucuguucugaccuucaaggugcuugaccugaagaacuacaucgauaaacaacuccugccgauucugaauaagcaguccugcagcaucucuaacauugagacagucaucgaauuucagcagaaaaauaaccggcuccuggagaucacccgcgaguucuccgugaaugcuggagugacgacacccgucagcaccuauaugcuuacaaacuccgaacugcucucucugauuaacgacaugccuaucaccaaugaucaaaagaaacuuaugagcaacaauguucagauugugagacagcaguccuacagcaucauguguauuaucaaggaggaagugcuggccuaugucgugcaacucccccuguacggcguuaucgacaccccuugcuggaaacugcauacaucuccccucuguacgaccaacacaaaggagggcuccaauauuugccugacccggacagaucgcgggugguacugugacaacgcgggaagcgugagcuuuuucccucaggccgaaaccugcaagguccagucuaauagaguguuuugugauacgaugaacuccagaacacugccgucugagguuaaucucugcaacaucgacauuuucaaucccaaauaugauugcaagaucaugaccagcaaaaccgacguguccagcucugucauuacaucccugggcgcuaucgugagcuguuacgggaagaccaaaugcacagccucuaacaagaaucggggaaucauuaagacguuuuccaacggcugugauuaugucagcaauaaagggguggacaccguuuccgugggaaacacacuuuacuaugucaacaagcaagagggcaaaucucuguacgugaagggcgaaccuaucauuaauuucuaugacccccucguuuuuccuagcgaugaguucgacgcuuccaucucucaggugaacgaaaagauuaaucagagccuggccuuuauccgcaaguccgaugagcugcuccacaacgucaauguggggaaaagcaccacaaacauuaugaucaccacgaucauuaucgugauuaucguuauucugcuucugcucaucgccgucggacuguuccuguacugcaaagcuagaugaggacuaguacuggcugcaucucccuuuccucuguccuccauccuucucccaggauggugaagggggaccugguacccagugauccccaccccaggauccuaaaucaugacuuaccugcuaauaaaaacucauuggaaaagugagaagaucuaaaaaaaaaaaaaaaaaaaaaaaaaaaaaaaaaaaaaaaaaaaaaaaaaaaaaaaaaaaaaaaaugcaucccccccccccccccccccccccccccccccaaaggcucuuuucagagccaccagaauu

SEQ ID NO: 13682 - RNA, 1920 nt, Artificial Sequence
  mRNA product Design c-3 comprising derived and/or modified sequence from HRSV(Memphis-37)__AIY60640.1__F-del_DSCav1_mut0 (opt6)
gggagaguccgcucagccagguugcagaagcggcuuagcguguguccuaaucuucucucugcguguagguaggccugugccgcaaacaagcuuaccauggaacucccaauacuuaaaacaaacgcaaucacaacaauacuagcugcagucacacuaugcuucgccucaucacaaaauauaacagaagaauuuuaucaaucaacaugcuccgcaguaucaaaaggauaucucucugcauuacgaacagguugguacaccucgguaauaacaauagaauuaucaaacauaaaagaaaauaaaugcaauggaaccgaugccaaaguaaaacuaaucaaacaagaacuugacaaauacaaaaacgcaguaacagaacuacaacuauuaaugcaaucaacaccagcagcagguucaggcuccgcaaucgcuucaggaauagccguuuguaaaguacuacacuuagaaggagaaguaaauaaaauaaaaaacgccuuacuaucaacaaacaaagcaguagucucccuuuccaacggaguaucagucuuaacuuuuaaaguacucgacuuaaaaaauuacaucgacaaacaacuacuacccauucuaaauaaacaaucaugcucaauaucaaacaucgaaacaguaaucgaauuucaacaaaaaaauaauagauuacuagaaauaacacgagaauuuuccguaaaugccggaguaacgaccccagucucaacauacauguuaacaaacucagaauuacuaucacucauuaacgauaugccaauaacaaaugaccaaaaaaaacuaaugucaaacaacguccaaauaguacgacaacaaucauacucuaucauguguauaauaaaagaagaaguuuuagcauacguaguacaacuaccacuuuacggagucauagacaccccaugcuggaaacuacacacaucacccuuauguacaacaaacaccaaagaagggucuaacauaugucucacuagaacagaucgaggcugguacugcgacaacgcaggaucaguuagcuuuuucccucaagccgaaaccuguaaaguacaauccaaucgaguauuuugcgacacuaugaacucuagaaccuuacccuccgaaguaaaccuauguaacauagacauauuuaaucccaaauaugauugcaaaaucaugacauccaaaacagauguaucaagcucuguaauaaccucacuaggagcaauaguuucaugcuaugguaaaacaaaaugcaccgccucaaacaaaaauagagggauaaucaaaaccuucucaaauggaugcgacuacguaucaaauaaaggaguagacaccgucuccguaggaaacacacuauacuacguaaacaaacaagaaggaaaaucacuauacguaaaaggagaaccaaucauaaacuucuacgacccacuuguuuucccaucagaugaauuugaugccuccauaucacaaguaaacgaaaaaauaaaccaaucucuagccuucaucagaaaauccgacgaacuuuuacacaacguaaacguagguaaaucaacaaccaacaucaugauaacaacaauaauaauaguaauaauuguaauacuuuuacuacuuaucgccguaggccuauucuuauauuguaaagcaagaugaggacuaguacuggcugcaucucccuuuccucuguccuccauccuucucccaggauggugaagggggaccugguacccagugauccccaccccaggauccuaaaucaugacuuaccugcuaauaaaaacucauuggaaaagugagaagaucuaaaaaaaaaaaaaaaaaaaaaaaaaaaaaaaaaaaaaaaaaaaaaaaaaaaaaaaaaaaaaaaaugcaucccccccccccccccccccccccccccccccaaaggcucuuuucagagccaccagaauu

SEQ ID NO: 13683 - RNA, 1920 nt, Artificial Sequence
  mRNA product Design c-3 comprising derived and/or modified sequence from HRSV(Memphis-37)__AIY60640.1__F-del_DSCav1_mut0 (opt11)
gggagaguccgcucagccagguugcagaagcggcuuagcguguguccuaaucuucucucugcguguagguaggccugugccgcaaacaagcuuaccauggaacuaccaauccucaaaaccaacgccaucacuacaauccuagccgcgguaacccugugcuucgccuccucacaaaacaucacagaagaauuuuaccaaucaaccugcuccgccguauccaaaggauaccugagcgcccugagaaccggcugguacaccuccgucaucaccauagaacucuccaacaucaaagaaaacaaaugcaacgguacggacgccaaaguuaaacucaucaaacaagaacuugacaaauacaagaacgccgucacagaacugcaacuccucaugcaauccacccccgccgccggcuccggcuccgccauagccuccggcaucgccgucugcaaagucuuacaccuagaaggcgaagucaacaaaaucaaaaacgcacuacuuuccacaaacaaagccgucgucucacucuccaacggcguauccguccucaccuucaaaguacuugaccucaaaaacuacaucgacaaacaacuacuccccauccugaacaaacaauccugcucaaucuccaacaucgaaaccguaaucgaguuccaacagaaaaauaaucgccuccuggagaucacccgcgaguucuccgucaaugcaggagucacaaccccaguaucaaccuacaugcucaccaacuccgaacuccugucgcucaucaacgacaugcccaucacaaacgaccaaaagaaacucauguccaacaacguacaaaucgucagacaacaauccuauucuauaaugugcaucaucaaagaagaaguccucgccuacgucguacaacucccccucuacggcguuaucgacacccccugcuggaaacuccacaccucaccccucugcaccaccaacacaaaagaaggcuccaacaucugccucacucggaccgaccgcggcugguacugcgacaaugccggcagcgucuccuucuucccacaagccgaaaccugcaaaguccaguccaaccgcguauucugcgacacuaugaacuccagaacccuccccuccgaaguaaaccucugcaacaucgacaucuucaacccaaaauacgacugcaaaaucaugaccucaaaaaccgacgucagcucgucagucauaaccagccucggagccauagucucaugcuacggaaaaaccaaaugcaccgccagcaacaaaaaccgcggcauaauaaaaacauucuccaacggcugcgacuauguauccaacaaaggagucgauaccgucuccguaggcaacacccuauacuacgucaacaaacaagaaggcaaaucccucuacgucaaaggugaaccaaucaucaacuucuacgacccucucgucuuccccuccgaugaguucgacgccucaaucagccaaguaaacgaaaagauaaaccaaucacucgccuucauccgcaaauccgacgaacuucuucacaacgucaacgucggcaaaucuaccaccaacauaaugauaaccaccaucaucaucgucaucaucguaauacuccuccuucucaucgccgucggccuauuccuauacugcaaagcccgcuagggacuaguacuggcugcaucucccuuuccucuguccuccauccuucucccaggauggugaagggggaccugguacccagugauccccaccccaggauccuaaaucaugacuuaccugcuaauaaaaacucauuggaaaagugagaagaucuaaaaaaaaaaaaaaaaaaaaaaaaaaaaaaaaaaaaaaaaaaaaaaaaaaaaaaaaaaaaaaaaugcaucccccccccccccccccccccccccccccccaaaggcucuuuucagagccaccagaauu

SEQ ID NO: 13684 - RNA, 1916 nt, Artificial Sequence
  mRNA product Design c-4 comprising derived and/or modified sequence from HRSV(Memphis-37)__AIY60640.1__F-del_DSCav1_mut0 (opt1)
gggagaguccgcucagccagguugcagaagcggcuuagcguguguccuaaucuucucucugcguguagguaggccugugccgcaaacaagcuuaccauggagcugcccauccucaagaccaacgccaucaccacgauccuggccgcggugacccugugcuucgccagcucccagaacaucaccgaggaguucuaccagagcacgugcuccgccgucagcaagggcuaccucuccgcccugcgcaccgggugguacaccagcgugaucaccaucgagcuguccaacaucaaggagaacaagugcaacggcaccgacgccaaggugaagcucaucaagcaggagcuggacaaguacaagaacgcggucacggagcugcagcuccugaugcagagcaccccggccgccggcuccgggagcgcgaucgccuccggcaucgccgucugcaaggugcugcaccucgagggcgaggugaacaagaucaagaacgcccugcuguccaccaacaaggccgucgugagccucuccaacggggugagcguccugaccuucaaggugcuggaccucaagaacuacaucgacaagcagcugcugcccauccugaacaagcagagcugcuccaucagcaacaucgagaccgucaucgaguuccagcagaagaacaaccgccuccuggagaucacgcgggaguucagcgugaacgcgggcgugaccacccccgucuccaccuacaugcugacgaacagcgagcuccugucccugaucaacgacaugccgaucaccaacgaccagaagaagcucaugagcaacaacgugcagaucgugcgccagcaguccuacagcaucaugugcaucaucaaggaggagguccuggccuacguggugcagcugccccucuacggggucaucgacacccccugcuggaagcugcacaccagcccccugugcacgaccaacaccaaggagggcuccaacaucugccucacccggacggaccgcgggugguacugcgacaacgccggcagcguguccuucuucccgcaggccgagaccugcaagguccagagcaaccggguguucugcgacaccaugaacucccggacccugcccagcgaggugaaccucugcaacaucgacaucuucaaccccaaguacgacugcaagaucaugacguccaagaccgacgucagcuccagcgugaucaccucccugggcgccaucgugagcugcuacgggaagaccaagugcacggcgagcaacaagaaccgcggcaucaucaagaccuucuccaacgggugcgacuacgucagcaacaagggcguggacaccguguccgucggcaacacccuguacuacgugaacaagcaggagggcaagagccucuacgugaagggggagcccaucaucaacuucuacgacccgcuggucuuccccuccgacgaguucgacgccagcaucucccaggugaacgagaagaucaaccagagccuggccuucauccggaaguccgacgagcuccugcacaacgugaacgucggcaagagcaccacgaacaucaugaucaccaccaucaucaucgugaucaucgugauccugcugcuccugaucgccgucgggcuguuccucuacugcaaggcccgcugaggacuaguggaagcauuuuccuggcugauuaaaagaaauuacucagcuauggucaucuguuccuguuagaaggcuaugcagcauauuauauacuaugcgcauguuaugaaaugcauaauaaaaaauuuuaaaaaaucuaaaagaucuaaaaaaaaaaaaaaaaaaaaaaaaaaaaaaaaaaaaaaaaaaaaaaaaaaaaaaaaaaaaaaaaugcaucccccccccccccccccccccccccccccccaaaggcucuuuucagagccaccagaauu

SEQ ID NO: 13685 - RNA, 1916 nt, Artificial Sequence
  mRNA product Design c-4 comprising derived and/or modified sequence from HRSV(Memphis-37)__AIY60640.1__F-del_DSCav1_mut0 (opt1)
gggagaguccgcucagccagguugcagaagcggcuuagcguguguccuaaucuucucucugcguguagguaggccugugccgcaaacaagcuuaccauggagcugcccauccucaagaccaacgccaucaccacgauccuggccgcggugacccugugcuucgccagcucccagaacaucaccgaggaguucuaccagagcacgugcuccgccgucagcaagggcuaccucuccgcccugcgcaccgggugguacaccagcgugaucaccaucgagcuguccaacaucaaggagaacaagugcaacggcaccgacgccaaggugaagcucaucaagcaggagcuggacaaguacaagaacgcggucacggagcugcagcuccugaugcagagcaccccggccgccggguccggcagcgccaucgcguccgggaucgccgugugcaaggugcugcaccucgagggcgaggucaacaagaucaagaacgcccugcugagcaccaacaaggccguggugucccucagcaacggcgucuccgugcugaccuucaaggugcuggaccucaagaacuacaucgacaagcagcugcugcccauccucaacaagcagagcugcuccaucagcaacaucgagacggucaucgaguuccagcagaagaacaaccggcugcuggagaucacccgcgaguucuccgugaacgccggggugaccacccccgucagcacguacaugcucaccaacagcgagcugcugucccucaucaacgacaugcccaucaccaacgaccagaagaagcugaugagcaacaacgugcagaucgugcggcagcaguccuacagcaucaugugcaucaucaaggaggagguccuggcguacguggugcagcucccgcuguacggcgucaucgacacccccugcuggaagcugcacacgagcccccucugcaccaccaacaccaaggagggguccaacaucugccugacgcgcaccgaccggggcugguacugcgacaacgccggguccgugagcuucuucccccaggccgagaccugcaaggugcaguccaaccgcgucuucugcgacaccaugaacagccggacgcucccguccgaggugaaccugugcaacaucgacaucuucaaccccaaguacgacugcaagaucaugaccagcaagaccgacgucuccagcuccgugaucaccagccugggcgccaucguguccugcuacggcaagacgaagugcaccgccagcaacaagaaccgggggaucaucaagaccuucuccaacggcugcgacuacgucagcaacaaggggguggacaccgugagcgucggcaacacgcucuacuacgugaacaagcaggagggcaagucccuguacgugaagggggagcccaucaucaacuucuacgacccccuggucuucccgagcgacgaguucgacgcguccaucagccaggugaacgagaagaucaaccagucccucgccuucauccgcaagagcgacgagcugcugcacaacgugaacgucggcaaguccaccaccaacaucaugaucaccaccaucaucaucgugaucaucgugauccuccugcugcucaucgccgucgggcuguuccuguacugcaaggcccggugaggacuaguggaagcauuuuccuggcugauuaaaagaaauuacucagcuauggucaucuguuccuguuagaaggcuaugcagcauauuauauacuaugcgcauguuaugaaaugcauaauaaaaaauuuuaaaaaaucuaaaagaucuaaaaaaaaaaaaaaaaaaaaaaaaaaaaaaaaaaaaaaaaaaaaaaaaaaaaaaaaaaaaaaaaugcaucccccccccccccccccccccccccccccccaaaggcucuuuucagagccaccagaauu

SEQ ID NO: 13686 - RNA, 1916 nt, Artificial Sequence
  mRNA product Design c-4 comprising derived and/or modified sequence from HRSV(Memphis-37)__AIY60640.1__F-del_DSCav1_mut0 (opt2)
gggagaguccgcucagccagguugcagaagcggcuuagcguguguccuaaucuucucucugcguguagguaggccugugccgcaaacaagcuuaccauggagcuccccauccucaagaccaacgccaucaccaccauccucgccgccgucacccucugcuucgccuccucccagaacaucaccgaggaguucuaccaguccaccugcuccgccgucuccaagggcuaccucuccgcccuccgcaccggcugguacaccuccgucaucaccaucgagcucuccaacaucaaggagaacaagugcaacggcaccgacgccaaggucaagcucaucaagcaggagcucgacaaguacaagaacgccgucaccgagcuccagcuccucaugcaguccacccccgccgccggcuccggcuccgccaucgccuccggcaucgccgucugcaagguccuccaccucgagggcgaggucaacaagaucaagaacgcccuccucuccaccaacaaggccgucgucucccucuccaacggcgucuccguccucaccuucaagguccucgaccucaagaacuacaucgacaagcagcuccuccccauccucaacaagcaguccugcuccaucuccaacaucgagaccgucaucgaguuccagcagaagaacaaccgccuccucgagaucacccgcgaguucuccgucaacgccggcgucaccacccccgucuccaccuacaugcucaccaacuccgagcuccucucccucaucaacgacaugcccaucaccaacgaccagaagaagcucauguccaacaacguccagaucguccgccagcaguccuacuccaucaugugcaucaucaaggaggagguccucgccuacgucguccagcucccccucuacggcgucaucgacacccccugcuggaagcuccacaccuccccccucugcaccaccaacaccaaggagggcuccaacaucugccucacccgcaccgaccgcggcugguacugcgacaacgccggcuccgucuccuucuucccccaggccgagaccugcaagguccaguccaaccgcgucuucugcgacaccaugaacucccgcacccuccccuccgaggucaaccucugcaacaucgacaucuucaaccccaaguacgacugcaagaucaugaccuccaagaccgacgucuccuccuccgucaucaccucccucggcgccaucgucuccugcuacggcaagaccaagugcaccgccuccaacaagaaccgcggcaucaucaagaccuucuccaacggcugcgacuacgucuccaacaagggcgucgacaccgucuccgucggcaacacccucuacuacgucaacaagcaggagggcaagucccucuacgucaagggcgagcccaucaucaacuucuacgacccccucgucuuccccuccgacgaguucgacgccuccaucucccaggucaacgagaagaucaaccagucccucgccuucauccgcaaguccgacgagcuccuccacaacgucaacgucggcaaguccaccaccaacaucaugaucaccaccaucaucaucgucaucaucgucauccuccuccuccucaucgccgucggccucuuccucuacugcaaggcccgcugaggacuaguggaagcauuuuccuggcugauuaaaagaaauuacucagcuauggucaucuguuccuguuagaaggcuaugcagcauauuauauacuaugcgcauguuaugaaaugcauaauaaaaaauuuuaaaaaaucuaaaagaucuaaaaaaaaaaaaaaaaaaaaaaaaaaaaaaaaaaaaaaaaaaaaaaaaaaaaaaaaaaaaaaaaugcaucccccccccccccccccccccccccccccccaaaggcucuuuucagagccaccagaauu

SEQ ID NO: 13687 - RNA, 1916 nt, Artificial Sequence
  mRNA product Design c-4 comprising derived and/or modified sequence from HRSV(Memphis-37)__AIY60640.1__F-del_DSCav1_mut0 (opt3)
gggagaguccgcucagccagguugcagaagcggcuuagcguguguccuaaucuucucucugcguguagguaggccugugccgcaaacaagcuuaccauggagcugcccauccucaagaccaacgccauuacaacuauacuugcugcagugacgcugugcuucgccagcucccagaauaucaccgaagaguuuuaccaaucuacauguucagcggucaguaaaggcuauuugagcgcuuuaagaacugggugguacaccuccguuauuacaaucgaacugucuaacauuaaggagaauaaaugcaacggaaccgacgccaaggugaaacuaaucaagcaggaacucgauaaguauaaaaaugcaguaacugagcugcagcuucugaugcagucgaccccugccgcugguucaggcagcgcaauagccagugggaucgcuguguguaaggucuugcaccucgagggagaagugaacaaaauuaagaaugcccugcuguccacaaacaaagcgguugugucucucagcaauggcgucuccguguuaacguucaagguacuggaccuuaagaacuacaucgauaaacaauugcugccaauucuaaauaagcagucaugcaguaucagcaacauagagacuguuauugaauuucagcagaaaaauaacaggcuccuggagaucacccgggaguucucugugaaugccggugucacaacuccgguguccaccuauaugcuuacaaacucagaacuguugagccucauuaacgacaugcccaucaccaaugaucaaaagaaacugaugaguaacaaugugcagaucguccgccagcagucuuacuccauuauguguauaaucaaggaggaaguuuuagcauaugugguacaacugccucucuacggggugauugacacgccaugcuggaaacuucauacuagcccccuguguacaaccaacacuaaggagggaucgaauaucugcuugacacgaaccgaucguggcugguacugugacaacgcuggcucugucuccuuuuucccucaggccgaaacgugcaaggugcagucaaauagaguguuuugugauaccaugaacaguagaacacugccaagcgaggugaaucucugcaacauagacauuuucaaucccaaauaugauugcaagaucaugacuuccaaaaccgacgucucuagcucagugaucacaagucugggggcaauuguauccuguuacggaaagacuaaaugcaccgcuagcaacaagaauagggguaucauuaagacauuuucuaacggcugugauuauguuucaaauaaagggguggacaccgucagugugggaaacacucuuuacuaugucaacaagcaagagggcaaaagccuguacgugaagggugaaccuauaaucaauuucuaugacccauugguuuuuccguccgaugaguucgacgccucuauuucgcagguuaacgagaaaaucaaucagagccucgcguuuauccggaaguccgaugaacuguuacacaacguaaaugucgggaagucaacgacaaacauuaugauaaccacuaucauuaucgugauuaucguuauacugcuacuccugaucgccgugggacuuuucuuguacugcaaagcacgcugaggacuaguggaagcauuuuccuggcugauuaaaagaaauuacucagcuauggucaucuguuccuguuagaaggcuaugcagcauauuauauacuaugcgcauguuaugaaaugcauaauaaaaaauuuuaaaaaaucuaaaagaucuaaaaaaaaaaaaaaaaaaaaaaaaaaaaaaaaaaaaaaaaaaaaaaaaaaaaaaaaaaaaaaaaugcaucccccccccccccccccccccccccccccccaaaggcucuuuucagagccaccagaauu

SEQ ID NO: 13688 - RNA, 1916 nt, Artificial Sequence
  mRNA product Design c-4 comprising derived and/or modified sequence from HRSV(Memphis-37)__AIY60640.1__F-del_DSCav1_mut0 (opt4)
gggagaguccgcucagccagguugcagaagcggcuuagcguguguccuaaucuucucucugcguguagguaggccugugccgcaaacaagcuuaccauggagcugcccauccugaagaccaacgccaucaccaccauccuggccgccgugacccugugcuucgccagcagccagaacaucaccgaggaguucuaccagagcaccugcagcgccgugagcaagggcuaccugagcgcccugagaaccggcugguacaccagcgugaucaccaucgagcugagcaacaucaaggagaacaagugcaacggcaccgacgccaaggugaagcugaucaagcaggagcuggacaaguacaagaacgccgugaccgagcugcagcugcugaugcagagcacccccgccgccggcagcggcagcgccaucgccagcggcaucgccgugugcaaggugcugcaccuggagggcgaggugaacaagaucaagaacgcccugcugagcaccaacaaggccguggugagccugagcaacggcgugagcgugcugaccuucaaggugcuggaccugaagaacuacaucgacaagcagcugcugcccauccugaacaagcagagcugcagcaucagcaacaucgagaccgugaucgaguuccagcagaagaacaacagacugcuggagaucaccagagaguucagcgugaacgccggcgugaccacccccgugagcaccuacaugcugaccaacagcgagcugcugagccugaucaacgacaugcccaucaccaacgaccagaagaagcugaugagcaacaacgugcagaucgugagacagcagagcuacagcaucaugugcaucaucaaggaggaggugcuggccuacguggugcagcugccccuguacggcgugaucgacacccccugcuggaagcugcacaccagcccccugugcaccaccaacaccaaggagggcagcaacaucugccugaccagaaccgacagaggcugguacugcgacaacgccggcagcgugagcuucuucccccaggccgagaccugcaaggugcagagcaacagaguguucugcgacaccaugaacagcagaacccugcccagcgaggugaaccugugcaacaucgacaucuucaaccccaaguacgacugcaagaucaugaccagcaagaccgacgugagcagcagcgugaucaccagccugggcgccaucgugagcugcuacggcaagaccaagugcaccgccagcaacaagaacagaggcaucaucaagaccuucagcaacggcugcgacuacgugagcaacaagggcguggacaccgugagcgugggcaacacccuguacuacgugaacaagcaggagggcaagagccuguacgugaagggcgagcccaucaucaacuucuacgacccccugguguuccccagcgacgaguucgacgccagcaucagccaggugaacgagaagaucaaccagagccuggccuucaucagaaagagcgacgagcugcugcacaacgugaacgugggcaagagcaccaccaacaucaugaucaccaccaucaucaucgugaucaucgugauccugcugcugcugaucgccgugggccuguuccuguacugcaaggccagaugaggacuaguggaagcauuuuccuggcugauuaaaagaaauuacucagcuauggucaucuguuccuguuagaaggcuaugcagcauauuauauacuaugcgcauguuaugaaaugcauaauaaaaaauuuuaaaaaaucuaaaagaucuaaaaaaaaaaaaaaaaaaaaaaaaaaaaaaaaaaaaaaaaaaaaaaaaaaaaaaaaaaaaaaaaugcaucccccccccccccccccccccccccccccccaaaggcucuuuucagagccaccagaauu

SEQ ID NO: 13689 - RNA, 1916 nt, Artificial Sequence
  mRNA product Design c-4 comprising derived and/or modified sequence from HRSV(Memphis-37)__AIY60640.1__F-del_DSCav1_mut0 (opt5)
gggagaguccgcucagccagguugcagaagcggcuuagcguguguccuaaucuucucucugcguguagguaggccugugccgcaaacaagcuuaccauggagcugcccauccucaagaccaacgccauuacaacgauccuggcugccgugacccuuugcuucgcgagcucccagaauauuacagaagaguuuuaccaaucuaccuguagcgcugucuccaaaggcuaucugucugcccucagaacagggugguacaccagcguuaucacaauugaacuguccaacaucaaggagaauaaaugcaacggaaccgacgccaaggugaaacuuaucaagcaggaacuggauaaguauaaaaaugcugugacggagcuccagcugcugaugcagucuaccccugccgcuggcagcggguccgccauugcgagcggaaucgccgucuguaaggugcuccaccuggagggcgaaguuaacaaaauuaagaaugcccuucugucuacaaacaaagcuguggucucccucagcaauggggugucuguucugaccuucaaggugcuugaccugaagaacuacaucgauaaacaacuccugccgauucugaauaagcaguccugcagcaucucuaacauugagacagucaucgaauuucagcagaaaaauaaccggcuccuggagaucacccgcgaguucuccgugaaugcuggagugacgacacccgucagcaccuauaugcuuacaaacuccgaacugcucucucugauuaacgacaugccuaucaccaaugaucaaaagaaacuuaugagcaacaauguucagauugugagacagcaguccuacagcaucauguguauuaucaaggaggaagugcuggccuaugucgugcaacucccccuguacggcguuaucgacaccccuugcuggaaacugcauacaucuccccucuguacgaccaacacaaaggagggcuccaauauuugccugacccggacagaucgcgggugguacugugacaacgcgggaagcgugagcuuuuucccucaggccgaaaccugcaagguccagucuaauagaguguuuugugauacgaugaacuccagaacacugccgucugagguuaaucucugcaacaucgacauuuucaaucccaaauaugauugcaagaucaugaccagcaaaaccgacguguccagcucugucauuacaucccugggcgcuaucgugagcuguuacgggaagaccaaaugcacagccucuaacaagaaucggggaaucauuaagacguuuuccaacggcugugauuaugucagcaauaaagggguggacaccguuuccgugggaaacacacuuuacuaugucaacaagcaagagggcaaaucucuguacgugaagggcgaaccuaucauuaauuucuaugacccccucguuuuuccuagcgaugaguucgacgcuuccaucucucaggugaacgaaaagauuaaucagagccuggccuuuauccgcaaguccgaugagcugcuccacaacgucaauguggggaaaagcaccacaaacauuaugaucaccacgaucauuaucgugauuaucguuauucugcuucugcucaucgccgucggacuguuccuguacugcaaagcuagaugaggacuaguggaagcauuuuccuggcugauuaaaagaaauuacucagcuauggucaucuguuccuguuagaaggcuaugcagcauauuauauacuaugcgcauguuaugaaaugcauaauaaaaaauuuuaaaaaaucuaaaagaucuaaaaaaaaaaaaaaaaaaaaaaaaaaaaaaaaaaaaaaaaaaaaaaaaaaaaaaaaaaaaaaaaugcaucccccccccccccccccccccccccccccccaaaggcucuuuucagagccaccagaauu

SEQ ID NO: 13690 - RNA, 1916 nt, Artificial Sequence
  mRNA product Design c-4 comprising derived and/or modified sequence from HRSV(Memphis-37)__AIY60640.1__F-del_DSCav1_mut0 (opt6)
gggagaguccgcucagccagguugcagaagcggcuuagcguguguccuaaucuucucucugcguguagguaggccugugccgcaaacaagcuuaccauggaacucccaauacuuaaaacaaacgcaaucacaacaauacuagcugcagucacacuaugcuucgccucaucacaaaauauaacagaagaauuuuaucaaucaacaugcuccgcaguaucaaaaggauaucucucugcauuacgaacagguugguacaccucgguaauaacaauagaauuaucaaacauaaaagaaaauaaaugcaauggaaccgaugccaaaguaaaacuaaucaaacaagaacuugacaaauacaaaaacgcaguaacagaacuacaacuauuaaugcaaucaacaccagcagcagguucaggcuccgcaaucgcuucaggaauagccguuuguaaaguacuacacuuagaaggagaaguaaauaaaauaaaaaacgccuuacuaucaacaaacaaagcaguagucucccuuuccaacggaguaucagucuuaacuuuuaaaguacucgacuuaaaaaauuacaucgacaaacaacuacuacccauucuaaauaaacaaucaugcucaauaucaaacaucgaaacaguaaucgaauuucaacaaaaaaauaauagauuacuagaaauaacacgagaauuuuccguaaaugccggaguaacgaccccagucucaacauacauguuaacaaacucagaauuacuaucacucauuaacgauaugccaauaacaaaugaccaaaaaaaacuaaugucaaacaacguccaaauaguacgacaacaaucauacucuaucauguguauaauaaaagaagaaguuuuagcauacguaguacaacuaccacuuuacggagucauagacaccccaugcuggaaacuacacacaucacccuuauguacaacaaacaccaaagaagggucuaacauaugucucacuagaacagaucgaggcugguacugcgacaacgcaggaucaguuagcuuuuucccucaagccgaaaccuguaaaguacaauccaaucgaguauuuugcgacacuaugaacucuagaaccuuacccuccgaaguaaaccuauguaacauagacauauuuaaucccaaauaugauugcaaaaucaugacauccaaaacagauguaucaagcucuguaauaaccucacuaggagcaauaguuucaugcuaugguaaaacaaaaugcaccgccucaaacaaaaauagagggauaaucaaaaccuucucaaauggaugcgacuacguaucaaauaaaggaguagacaccgucuccguaggaaacacacuauacuacguaaacaaacaagaaggaaaaucacuauacguaaaaggagaaccaaucauaaacuucuacgacccacuuguuuucccaucagaugaauuugaugccuccauaucacaaguaaacgaaaaaauaaaccaaucucuagccuucaucagaaaauccgacgaacuuuuacacaacguaaacguagguaaaucaacaaccaacaucaugauaacaacaauaauaauaguaauaauuguaauacuuuuacuacuuaucgccguaggccuauucuuauauuguaaagcaagaugaggacuaguggaagcauuuuccuggcugauuaaaagaaauuacucagcuauggucaucuguuccuguuagaaggcuaugcagcauauuauauacuaugcgcauguuaugaaaugcauaauaaaaaauuuuaaaaaaucuaaaagaucuaaaaaaaaaaaaaaaaaaaaaaaaaaaaaaaaaaaaaaaaaaaaaaaaaaaaaaaaaaaaaaaaugcaucccccccccccccccccccccccccccccccaaaggcucuuuucagagccaccagaauu

SEQ ID NO: 13691 - RNA, 1916 nt, Artificial Sequence
  mRNA product Design c-4 comprising derived and/or modified sequence from HRSV(Memphis-37)__AIY60640.1__F-del_DSCav1_mut0 (opt11)
gggagaguccgcucagccagguugcagaagcggcuuagcguguguccuaaucuucucucugcguguagguaggccugugccgcaaacaagcuuaccauggaacuaccaauccucaaaaccaacgccaucacuacaauccuagccgcgguaacccugugcuucgccuccucacaaaacaucacagaagaauuuuaccaaucaaccugcuccgccguauccaaaggauaccugagcgcccugagaaccggcugguacaccuccgucaucaccauagaacucuccaacaucaaagaaaacaaaugcaacgguacggacgccaaaguuaaacucaucaaacaagaacuugacaaauacaagaacgccgucacagaacugcaacuccucaugcaauccacccccgccgccggcuccggcuccgccauagccuccggcaucgccgucugcaaagucuuacaccuagaaggcgaagucaacaaaaucaaaaacgcacuacuuuccacaaacaaagccgucgucucacucuccaacggcguauccguccucaccuucaaaguacuugaccucaaaaacuacaucgacaaacaacuacuccccauccugaacaaacaauccugcucaaucuccaacaucgaaaccguaaucgaguuccaacagaaaaauaaucgccuccuggagaucacccgcgaguucuccgucaaugcaggagucacaaccccaguaucaaccuacaugcucaccaacuccgaacuccugucgcucaucaacgacaugcccaucacaaacgaccaaaagaaacucauguccaacaacguacaaaucgucagacaacaauccuauucuauaaugugcaucaucaaagaagaaguccucgccuacgucguacaacucccccucuacggcguuaucgacacccccugcuggaaacuccacaccucaccccucugcaccaccaacacaaaagaaggcuccaacaucugccucacucggaccgaccgcggcugguacugcgacaaugccggcagcgucuccuucuucccacaagccgaaaccugcaaaguccaguccaaccgcguauucugcgacacuaugaacuccagaacccuccccuccgaaguaaaccucugcaacaucgacaucuucaacccaaaauacgacugcaaaaucaugaccucaaaaaccgacgucagcucgucagucauaaccagccucggagccauagucucaugcuacggaaaaaccaaaugcaccgccagcaacaaaaaccgcggcauaauaaaaacauucuccaacggcugcgacuauguauccaacaaaggagucgauaccgucuccguaggcaacacccuauacuacgucaacaaacaagaaggcaaaucccucuacgucaaaggugaaccaaucaucaacuucuacgacccucucgucuuccccuccgaugaguucgacgccucaaucagccaaguaaacgaaaagauaaaccaaucacucgccuucauccgcaaauccgacgaacuucuucacaacgucaacgucggcaaaucuaccaccaacauaaugauaaccaccaucaucaucgucaucaucguaauacuccuccuucucaucgccgucggccuauuccuauacugcaaagcccgcuagggacuaguggaagcauuuuccuggcugauuaaaagaaauuacucagcuauggucaucuguuccuguuagaaggcuaugcagcauauuauauacuaugcgcauguuaugaaaugcauaauaaaaaauuuuaaaaaaucuaaaagaucuaaaaaaaaaaaaaaaaaaaaaaaaaaaaaaaaaaaaaaaaaaaaaaaaaaaaaaaaaaaaaaaaugcaucccccccccccccccccccccccccccccccaaaggcucuuuucagagccaccagaauu

SEQ ID NO: 13692 - RNA, 1834 nt, Artificial Sequence
  mRNA product Design c-5 comprising derived and/or modified sequence from HRSV(Memphis-37)__AIY60640.1__F-del_DSCav1_mut0 (opt1)
gggagagcggcucggccauuuugucccagucaguccggaggcugcggcugcagaaguaccgccugcggaguaacugcaaagaagcuuaccauggagcugcccauccucaagaccaacgccaucaccacgauccuggccgcggugacccugugcuucgccagcucccagaacaucaccgaggaguucuaccagagcacgugcuccgccgucagcaagggcuaccucuccgcccugcgcaccgggugguacaccagcgugaucaccaucgagcuguccaacaucaaggagaacaagugcaacggcaccgacgccaaggugaagcucaucaagcaggagcuggacaaguacaagaacgcggucacggagcugcagcuccugaugcagagcaccccggccgccggcuccgggagcgcgaucgccuccggcaucgccgucugcaaggugcugcaccucgagggcgaggugaacaagaucaagaacgcccugcuguccaccaacaaggccgucgugagccucuccaacggggugagcguccugaccuucaaggugcuggaccucaagaacuacaucgacaagcagcugcugcccauccugaacaagcagagcugcuccaucagcaacaucgagaccgucaucgaguuccagcagaagaacaaccgccuccuggagaucacgcgggaguucagcgugaacgcgggcgugaccacccccgucuccaccuacaugcugacgaacagcgagcuccugucccugaucaacgacaugccgaucaccaacgaccagaagaagcucaugagcaacaacgugcagaucgugcgccagcaguccuacagcaucaugugcaucaucaaggaggagguccuggccuacguggugcagcugccccucuacggggucaucgacacccccugcuggaagcugcacaccagcccccugugcacgaccaacaccaaggagggcuccaacaucugccucacccggacggaccgcgggugguacugcgacaacgccggcagcguguccuucuucccgcaggccgagaccugcaagguccagagcaaccggguguucugcgacaccaugaacucccggacccugcccagcgaggugaaccucugcaacaucgacaucuucaaccccaaguacgacugcaagaucaugacguccaagaccgacgucagcuccagcgugaucaccucccugggcgccaucgugagcugcuacgggaagaccaagugcacggcgagcaacaagaaccgcggcaucaucaagaccuucuccaacgggugcgacuacgucagcaacaagggcguggacaccguguccgucggcaacacccuguacuacgugaacaagcaggagggcaagagccucuacgugaagggggagcccaucaucaacuucuacgacccgcuggucuuccccuccgacgaguucgacgccagcaucucccaggugaacgagaagaucaaccagagccuggccuucauccggaaguccgacgagcuccugcacaacgugaacgucggcaagagcaccacgaacaucaugaucaccaccaucaucaucgugaucaucgugauccugcugcuccugaucgccgucgggcuguuccucuacugcaaggcccgcugaggacuagucccuguucccagagcccacuuuuuuuucuuuuuuugaaauaaaauagccugucuuucagaucuaaaaaaaaaaaaaaaaaaaaaaaaaaaaaaaaaaaaaaaaaaaaaaaaaaaaaaaaaaaaaaaaugcaucccccccccccccccccccccccccccccccaaaggcucuuuucagagccaccagaauu

SEQ ID NO: 13693 - RNA, 1834 nt, Artificial Sequence
  mRNA product Design c-5 comprising derived and/or modified sequence from HRSV(Memphis-37)__AIY60640.1__F-del_DSCav1_mut0 (opt1)
gggagagcggcucggccauuuugucccagucaguccggaggcugcggcugcagaaguaccgccugcggaguaacugcaaagaagcuuaccauggagcugcccauccucaagaccaacgccaucaccacgauccuggccgcggugacccugugcuucgccagcucccagaacaucaccgaggaguucuaccagagcacgugcuccgccgucagcaagggcuaccucuccgcccugcgcaccgggugguacaccagcgugaucaccaucgagcuguccaacaucaaggagaacaagugcaacggcaccgacgccaaggugaagcucaucaagcaggagcuggacaaguacaagaacgcggucacggagcugcagcuccugaugcagagcaccccggccgccggguccggcagcgccaucgcguccgggaucgccgugugcaaggugcugcaccucgagggcgaggucaacaagaucaagaacgcccugcugagcaccaacaaggccguggugucccucagcaacggcgucuccgugcugaccuucaaggugcuggaccucaagaacuacaucgacaagcagcugcugcccauccucaacaagcagagcugcuccaucagcaacaucgagacggucaucgaguuccagcagaagaacaaccggcugcuggagaucacccgcgaguucuccgugaacgccggggugaccacccccgucagcacguacaugcucaccaacagcgagcugcugucccucaucaacgacaugcccaucaccaacgaccagaagaagcugaugagcaacaacgugcagaucgugcggcagcaguccuacagcaucaugugcaucaucaaggaggagguccuggcguacguggugcagcucccgcuguacggcgucaucgacacccccugcuggaagcugcacacgagcccccucugcaccaccaacaccaaggagggguccaacaucugccugacgcgcaccgaccggggcugguacugcgacaacgccggguccgugagcuucuucccccaggccgagaccugcaaggugcaguccaaccgcgucuucugcgacaccaugaacagccggacgcucccguccgaggugaaccugugcaacaucgacaucuucaaccccaaguacgacugcaagaucaugaccagcaagaccgacgucuccagcuccgugaucaccagccugggcgccaucguguccugcuacggcaagacgaagugcaccgccagcaacaagaaccgggggaucaucaagaccuucuccaacggcugcgacuacgucagcaacaaggggguggacaccgugagcgucggcaacacgcucuacuacgugaacaagcaggagggcaagucccuguacgugaagggggagcccaucaucaacuucuacgacccccuggucuucccgagcgacgaguucgacgcguccaucagccaggugaacgagaagaucaaccagucccucgccuucauccgcaagagcgacgagcugcugcacaacgugaacgucggcaaguccaccaccaacaucaugaucaccaccaucaucaucgugaucaucgugauccuccugcugcucaucgccgucgggcuguuccuguacugcaaggcccggugaggacuagucccuguucccagagcccacuuuuuuuucuuuuuuugaaauaaaauagccugucuuucagaucuaaaaaaaaaaaaaaaaaaaaaaaaaaaaaaaaaaaaaaaaaaaaaaaaaaaaaaaaaaaaaaaaugcaucccccccccccccccccccccccccccccccaaaggcucuuuucagagccaccagaauu

SEQ ID NO: 13694 - RNA, 1834 nt, Artificial Sequence
  mRNA product Design c-5 comprising derived and/or modified sequence from HRSV(Memphis-37)__AIY60640.1__F-del_DSCav1_mut0 (opt2)
gggagagcggcucggccauuuugucccagucaguccggaggcugcggcugcagaaguaccgccugcggaguaacugcaaagaagcuuaccauggagcuccccauccucaagaccaacgccaucaccaccauccucgccgccgucacccucugcuucgccuccucccagaacaucaccgaggaguucuaccaguccaccugcuccgccgucuccaagggcuaccucuccgcccuccgcaccggcugguacaccuccgucaucaccaucgagcucuccaacaucaaggagaacaagugcaacggcaccgacgccaaggucaagcucaucaagcaggagcucgacaaguacaagaacgccgucaccgagcuccagcuccucaugcaguccacccccgccgccggcuccggcuccgccaucgccuccggcaucgccgucugcaagguccuccaccucgagggcgaggucaacaagaucaagaacgcccuccucuccaccaacaaggccgucgucucccucuccaacggcgucuccguccucaccuucaagguccucgaccucaagaacuacaucgacaagcagcuccuccccauccucaacaagcaguccugcuccaucuccaacaucgagaccgucaucgaguuccagcagaagaacaaccgccuccucgagaucacccgcgaguucuccgucaacgccggcgucaccacccccgucuccaccuacaugcucaccaacuccgagcuccucucccucaucaacgacaugcccaucaccaacgaccagaagaagcucauguccaacaacguccagaucguccgccagcaguccuacuccaucaugugcaucaucaaggaggagguccucgccuacgucguccagcucccccucuacggcgucaucgacacccccugcuggaagcuccacaccuccccccucugcaccaccaacaccaaggagggcuccaacaucugccucacccgcaccgaccgcggcugguacugcgacaacgccggcuccgucuccuucuucccccaggccgagaccugcaagguccaguccaaccgcgucuucugcgacaccaugaacucccgcacccuccccuccgaggucaaccucugcaacaucgacaucuucaaccccaaguacgacugcaagaucaugaccuccaagaccgacgucuccuccuccgucaucaccucccucggcgccaucgucuccugcuacggcaagaccaagugcaccgccuccaacaagaaccgcggcaucaucaagaccuucuccaacggcugcgacuacgucuccaacaagggcgucgacaccgucuccgucggcaacacccucuacuacgucaacaagcaggagggcaagucccucuacgucaagggcgagcccaucaucaacuucuacgacccccucgucuuccccuccgacgaguucgacgccuccaucucccaggucaacgagaagaucaaccagucccucgccuucauccgcaaguccgacgagcuccuccacaacgucaacgucggcaaguccaccaccaacaucaugaucaccaccaucaucaucgucaucaucgucauccuccuccuccucaucgccgucggccucuuccucuacugcaaggcccgcugaggacuagucccuguucccagagcccacuuuuuuuucuuuuuuugaaauaaaauagccugucuuucagaucuaaaaaaaaaaaaaaaaaaaaaaaaaaaaaaaaaaaaaaaaaaaaaaaaaaaaaaaaaaaaaaaaugcaucccccccccccccccccccccccccccccccaaaggcucuuuucagagccaccagaauu

SEQ ID NO: 13695 - RNA, 1834 nt, Artificial Sequence
  mRNA product Design c-5 comprising derived and/or modified sequence from HRSV(Memphis-37)__AIY60640.1__F-del_DSCav1_mut0 (opt3)
gggagagcggcucggccauuuugucccagucaguccggaggcugcggcugcagaaguaccgccugcggaguaacugcaaagaagcuuaccauggagcugcccauccucaagaccaacgccauuacaacuauacuugcugcagugacgcugugcuucgccagcucccagaauaucaccgaagaguuuuaccaaucuacauguucagcggucaguaaaggcuauuugagcgcuuuaagaacugggugguacaccuccguuauuacaaucgaacugucuaacauuaaggagaauaaaugcaacggaaccgacgccaaggugaaacuaaucaagcaggaacucgauaaguauaaaaaugcaguaacugagcugcagcuucugaugcagucgaccccugccgcugguucaggcagcgcaauagccagugggaucgcuguguguaaggucuugcaccucgagggagaagugaacaaaauuaagaaugcccugcuguccacaaacaaagcgguugugucucucagcaauggcgucuccguguuaacguucaagguacuggaccuuaagaacuacaucgauaaacaauugcugccaauucuaaauaagcagucaugcaguaucagcaacauagagacuguuauugaauuucagcagaaaaauaacaggcuccuggagaucacccgggaguucucugugaaugccggugucacaacuccgguguccaccuauaugcuuacaaacucagaacuguugagccucauuaacgacaugcccaucaccaaugaucaaaagaaacugaugaguaacaaugugcagaucguccgccagcagucuuacuccauuauguguauaaucaaggaggaaguuuuagcauaugugguacaacugccucucuacggggugauugacacgccaugcuggaaacuucauacuagcccccuguguacaaccaacacuaaggagggaucgaauaucugcuugacacgaaccgaucguggcugguacugugacaacgcuggcucugucuccuuuuucccucaggccgaaacgugcaaggugcagucaaauagaguguuuugugauaccaugaacaguagaacacugccaagcgaggugaaucucugcaacauagacauuuucaaucccaaauaugauugcaagaucaugacuuccaaaaccgacgucucuagcucagugaucacaagucugggggcaauuguauccuguuacggaaagacuaaaugcaccgcuagcaacaagaauagggguaucauuaagacauuuucuaacggcugugauuauguuucaaauaaagggguggacaccgucagugugggaaacacucuuuacuaugucaacaagcaagagggcaaaagccuguacgugaagggugaaccuauaaucaauuucuaugacccauugguuuuuccguccgaugaguucgacgccucuauuucgcagguuaacgagaaaaucaaucagagccucgcguuuauccggaaguccgaugaacuguuacacaacguaaaugucgggaagucaacgacaaacauuaugauaaccacuaucauuaucgugauuaucguuauacugcuacuccugaucgccgugggacuuuucuuguacugcaaagcacgcugaggacuagucccuguucccagagcccacuuuuuuuucuuuuuuugaaauaaaauagccugucuuucagaucuaaaaaaaaaaaaaaaaaaaaaaaaaaaaaaaaaaaaaaaaaaaaaaaaaaaaaaaaaaaaaaaaugcaucccccccccccccccccccccccccccccccaaaggcucuuuucagagccaccagaauu

SEQ ID NO: 13696 - RNA, 1834 nt, Artificial Sequence
  mRNA product Design c-5 comprising derived and/or modified sequence from HRSV(Memphis-37)__AIY60640.1__F-del_DSCav1_mut0 (opt4)
gggagagcggcucggccauuuugucccagucaguccggaggcugcggcugcagaaguaccgccugcggaguaacugcaaagaagcuuaccauggagcugcccauccugaagaccaacgccaucaccaccauccuggccgccgugacccugugcuucgccagcagccagaacaucaccgaggaguucuaccagagcaccugcagcgccgugagcaagggcuaccugagcgcccugagaaccggcugguacaccagcgugaucaccaucgagcugagcaacaucaaggagaacaagugcaacggcaccgacgccaaggugaagcugaucaagcaggagcuggacaaguacaagaacgccgugaccgagcugcagcugcugaugcagagcacccccgccgccggcagcggcagcgccaucgccagcggcaucgccgugugcaaggugcugcaccuggagggcgaggugaacaagaucaagaacgcccugcugagcaccaacaaggccguggugagccugagcaacggcgugagcgugcugaccuucaaggugcuggaccugaagaacuacaucgacaagcagcugcugcccauccugaacaagcagagcugcagcaucagcaacaucgagaccgugaucgaguuccagcagaagaacaacagacugcuggagaucaccagagaguucagcgugaacgccggcgugaccacccccgugagcaccuacaugcugaccaacagcgagcugcugagccugaucaacgacaugcccaucaccaacgaccagaagaagcugaugagcaacaacgugcagaucgugagacagcagagcuacagcaucaugugcaucaucaaggaggaggugcuggccuacguggugcagcugccccuguacggcgugaucgacacccccugcuggaagcugcacaccagcccccugugcaccaccaacaccaaggagggcagcaacaucugccugaccagaaccgacagaggcugguacugcgacaacgccggcagcgugagcuucuucccccaggccgagaccugcaaggugcagagcaacagaguguucugcgacaccaugaacagcagaacccugcccagcgaggugaaccugugcaacaucgacaucuucaaccccaaguacgacugcaagaucaugaccagcaagaccgacgugagcagcagcgugaucaccagccugggcgccaucgugagcugcuacggcaagaccaagugcaccgccagcaacaagaacagaggcaucaucaagaccuucagcaacggcugcgacuacgugagcaacaagggcguggacaccgugagcgugggcaacacccuguacuacgugaacaagcaggagggcaagagccuguacgugaagggcgagcccaucaucaacuucuacgacccccugguguuccccagcgacgaguucgacgccagcaucagccaggugaacgagaagaucaaccagagccuggccuucaucagaaagagcgacgagcugcugcacaacgugaacgugggcaagagcaccaccaacaucaugaucaccaccaucaucaucgugaucaucgugauccugcugcugcugaucgccgugggccuguuccuguacugcaaggccagaugaggacuagucccuguucccagagcccacuuuuuuuucuuuuuuugaaauaaaauagccugucuuucagaucuaaaaaaaaaaaaaaaaaaaaaaaaaaaaaaaaaaaaaaaaaaaaaaaaaaaaaaaaaaaaaaaaugcaucccccccccccccccccccccccccccccccaaaggcucuuuucagagccaccagaauu

SEQ ID NO: 13697 - RNA, 1834 nt, Artificial Sequence
  mRNA product Design c-5 comprising derived and/or modified sequence from HRSV(Memphis-37)__AIY60640.1__F-del_DSCav1_mut0 (opt5)
gggagagcggcucggccauuuugucccagucaguccggaggcugcggcugcagaaguaccgccugcggaguaacugcaaagaagcuuaccauggagcugcccauccucaagaccaacgccauuacaacgauccuggcugccgugacccuuugcuucgcgagcucccagaauauuacagaagaguuuuaccaaucuaccuguagcgcugucuccaaaggcuaucugucugcccucagaacagggugguacaccagcguuaucacaauugaacuguccaacaucaaggagaauaaaugcaacggaaccgacgccaaggugaaacuuaucaagcaggaacuggauaaguauaaaaaugcugugacggagcuccagcugcugaugcagucuaccccugccgcuggcagcggguccgccauugcgagcggaaucgccgucuguaaggugcuccaccuggagggcgaaguuaacaaaauuaagaaugcccuucugucuacaaacaaagcuguggucucccucagcaauggggugucuguucugaccuucaaggugcuugaccugaagaacuacaucgauaaacaacuccugccgauucugaauaagcaguccugcagcaucucuaacauugagacagucaucgaauuucagcagaaaaauaaccggcuccuggagaucacccgcgaguucuccgugaaugcuggagugacgacacccgucagcaccuauaugcuuacaaacuccgaacugcucucucugauuaacgacaugccuaucaccaaugaucaaaagaaacuuaugagcaacaauguucagauugugagacagcaguccuacagcaucauguguauuaucaaggaggaagugcuggccuaugucgugcaacucccccuguacggcguuaucgacaccccuugcuggaaacugcauacaucuccccucuguacgaccaacacaaaggagggcuccaauauuugccugacccggacagaucgcgggugguacugugacaacgcgggaagcgugagcuuuuucccucaggccgaaaccugcaagguccagucuaauagaguguuuugugauacgaugaacuccagaacacugccgucugagguuaaucucugcaacaucgacauuuucaaucccaaauaugauugcaagaucaugaccagcaaaaccgacguguccagcucugucauuacaucccugggcgcuaucgugagcuguuacgggaagaccaaaugcacagccucuaacaagaaucggggaaucauuaagacguuuuccaacggcugugauuaugucagcaauaaagggguggacaccguuuccgugggaaacacacuuuacuaugucaacaagcaagagggcaaaucucuguacgugaagggcgaaccuaucauuaauuucuaugacccccucguuuuuccuagcgaugaguucgacgcuuccaucucucaggugaacgaaaagauuaaucagagccuggccuuuauccgcaaguccgaugagcugcuccacaacgucaauguggggaaaagcaccacaaacauuaugaucaccacgaucauuaucgugauuaucguuauucugcuucugcucaucgccgucggacuguuccuguacugcaaagcuagaugaggacuagucccuguucccagagcccacuuuuuuuucuuuuuuugaaauaaaauagccugucuuucagaucuaaaaaaaaaaaaaaaaaaaaaaaaaaaaaaaaaaaaaaaaaaaaaaaaaaaaaaaaaaaaaaaaugcaucccccccccccccccccccccccccccccccaaaggcucuuuucagagccaccagaauu

SEQ ID NO: 13698 - RNA, 1834 nt, Artificial Sequence
  mRNA product Design c-5 comprising derived and/or modified sequence from HRSV(Memphis-37)__AIY60640.1__F-del_DSCav1_mut0 (opt6)
gggagagcggcucggccauuuugucccagucaguccggaggcugcggcugcagaaguaccgccugcggaguaacugcaaagaagcuuaccauggaacucccaauacuuaaaacaaacgcaaucacaacaauacuagcugcagucacacuaugcuucgccucaucacaaaauauaacagaagaauuuuaucaaucaacaugcuccgcaguaucaaaaggauaucucucugcauuacgaacagguugguacaccucgguaauaacaauagaauuaucaaacauaaaagaaaauaaaugcaauggaaccgaugccaaaguaaaacuaaucaaacaagaacuugacaaauacaaaaacgcaguaacagaacuacaacuauuaaugcaaucaacaccagcagcagguucaggcuccgcaaucgcuucaggaauagccguuuguaaaguacuacacuuagaaggagaaguaaauaaaauaaaaaacgccuuacuaucaacaaacaaagcaguagucucccuuuccaacggaguaucagucuuaacuuuuaaaguacucgacuuaaaaaauuacaucgacaaacaacuacuacccauucuaaauaaacaaucaugcucaauaucaaacaucgaaacaguaaucgaauuucaacaaaaaaauaauagauuacuagaaauaacacgagaauuuuccguaaaugccggaguaacgaccccagucucaacauacauguuaacaaacucagaauuacuaucacucauuaacgauaugccaauaacaaaugaccaaaaaaaacuaaugucaaacaacguccaaauaguacgacaacaaucauacucuaucauguguauaauaaaagaagaaguuuuagcauacguaguacaacuaccacuuuacggagucauagacaccccaugcuggaaacuacacacaucacccuuauguacaacaaacaccaaagaagggucuaacauaugucucacuagaacagaucgaggcugguacugcgacaacgcaggaucaguuagcuuuuucccucaagccgaaaccuguaaaguacaauccaaucgaguauuuugcgacacuaugaacucuagaaccuuacccuccgaaguaaaccuauguaacauagacauauuuaaucccaaauaugauugcaaaaucaugacauccaaaacagauguaucaagcucuguaauaaccucacuaggagcaauaguuucaugcuaugguaaaacaaaaugcaccgccucaaacaaaaauagagggauaaucaaaaccuucucaaauggaugcgacuacguaucaaauaaaggaguagacaccgucuccguaggaaacacacuauacuacguaaacaaacaagaaggaaaaucacuauacguaaaaggagaaccaaucauaaacuucuacgacccacuuguuuucccaucagaugaauuugaugccuccauaucacaaguaaacgaaaaaauaaaccaaucucuagccuucaucagaaaauccgacgaacuuuuacacaacguaaacguagguaaaucaacaaccaacaucaugauaacaacaauaauaauaguaauaauuguaauacuuuuacuacuuaucgccguaggccuauucuuauauuguaaagcaagaugaggacuagucccuguucccagagcccacuuuuuuuucuuuuuuugaaauaaaauagccugucuuucagaucuaaaaaaaaaaaaaaaaaaaaaaaaaaaaaaaaaaaaaaaaaaaaaaaaaaaaaaaaaaaaaaaaugcaucccccccccccccccccccccccccccccccaaaggcucuuuucagagccaccagaauu

SEQ ID NO: 13699 - RNA, 1834 nt, Artificial Sequence
  mRNA product Design c-5 comprising derived and/or modified sequence from HRSV(Memphis-37)__AIY60640.1__F-del_DSCav1_mut0 (opt11)
gggagagcggcucggccauuuugucccagucaguccggaggcugcggcugcagaaguaccgccugcggaguaacugcaaagaagcuuaccauggaacuaccaauccucaaaaccaacgccaucacuacaauccuagccgcgguaacccugugcuucgccuccucacaaaacaucacagaagaauuuuaccaaucaaccugcuccgccguauccaaaggauaccugagcgcccugagaaccggcugguacaccuccgucaucaccauagaacucuccaacaucaaagaaaacaaaugcaacgguacggacgccaaaguuaaacucaucaaacaagaacuugacaaauacaagaacgccgucacagaacugcaacuccucaugcaauccacccccgccgccggcuccggcuccgccauagccuccggcaucgccgucugcaaagucuuacaccuagaaggcgaagucaacaaaaucaaaaacgcacuacuuuccacaaacaaagccgucgucucacucuccaacggcguauccguccucaccuucaaaguacuugaccucaaaaacuacaucgacaaacaacuacuccccauccugaacaaacaauccugcucaaucuccaacaucgaaaccguaaucgaguuccaacagaaaaauaaucgccuccuggagaucacccgcgaguucuccgucaaugcaggagucacaaccccaguaucaaccuacaugcucaccaacuccgaacuccugucgcucaucaacgacaugcccaucacaaacgaccaaaagaaacucauguccaacaacguacaaaucgucagacaacaauccuauucuauaaugugcaucaucaaagaagaaguccucgccuacgucguacaacucccccucuacggcguuaucgacacccccugcuggaaacuccacaccucaccccucugcaccaccaacacaaaagaaggcuccaacaucugccucacucggaccgaccgcggcugguacugcgacaaugccggcagcgucuccuucuucccacaagccgaaaccugcaaaguccaguccaaccgcguauucugcgacacuaugaacuccagaacccuccccuccgaaguaaaccucugcaacaucgacaucuucaacccaaaauacgacugcaaaaucaugaccucaaaaaccgacgucagcucgucagucauaaccagccucggagccauagucucaugcuacggaaaaaccaaaugcaccgccagcaacaaaaaccgcggcauaauaaaaacauucuccaacggcugcgacuauguauccaacaaaggagucgauaccgucuccguaggcaacacccuauacuacgucaacaaacaagaaggcaaaucccucuacgucaaaggugaaccaaucaucaacuucuacgacccucucgucuuccccuccgaugaguucgacgccucaaucagccaaguaaacgaaaagauaaaccaaucacucgccuucauccgcaaauccgacgaacuucuucacaacgucaacgucggcaaaucuaccaccaacauaaugauaaccaccaucaucaucgucaucaucguaauacuccuccuucucaucgccgucggccuauuccuauacugcaaagcccgcuagggacuagucccuguucccagagcccacuuuuuuuucuuuuuuugaaauaaaauagccugucuuucagaucuaaaaaaaaaaaaaaaaaaaaaaaaaaaaaaaaaaaaaaaaaaaaaaaaaaaaaaaaaaaaaaaaugcaucccccccccccccccccccccccccccccccaaaggcucuuuucagagccaccagaauu

SEQ ID NO: 13700 - RNA, 1843 nt, Artificial Sequence
  mRNA product Design d-1 comprising derived and/or modified sequence from HRSV(Memphis-37)__AIY60640.1__F-del_DSCav1_mut0 (opt1)
gggagacccgugacccggaaguuguacggcuacgcgacuuucccucccacaaacccucgcgcccuuccuuuccuacuugggcccggcagaaagcuuaccauggagcugcccauccucaagaccaacgccaucaccacgauccuggccgcggugacccugugcuucgccagcucccagaacaucaccgaggaguucuaccagagcacgugcuccgccgucagcaagggcuaccucuccgcccugcgcaccgggugguacaccagcgugaucaccaucgagcuguccaacaucaaggagaacaagugcaacggcaccgacgccaaggugaagcucaucaagcaggagcuggacaaguacaagaacgcggucacggagcugcagcuccugaugcagagcaccccggccgccggcuccgggagcgcgaucgccuccggcaucgccgucugcaaggugcugcaccucgagggcgaggugaacaagaucaagaacgcccugcuguccaccaacaaggccgucgugagccucuccaacggggugagcguccugaccuucaaggugcuggaccucaagaacuacaucgacaagcagcugcugcccauccugaacaagcagagcugcuccaucagcaacaucgagaccgucaucgaguuccagcagaagaacaaccgccuccuggagaucacgcgggaguucagcgugaacgcgggcgugaccacccccgucuccaccuacaugcugacgaacagcgagcuccugucccugaucaacgacaugccgaucaccaacgaccagaagaagcucaugagcaacaacgugcagaucgugcgccagcaguccuacagcaucaugugcaucaucaaggaggagguccuggccuacguggugcagcugccccucuacggggucaucgacacccccugcuggaagcugcacaccagcccccugugcacgaccaacaccaaggagggcuccaacaucugccucacccggacggaccgcgggugguacugcgacaacgccggcagcguguccuucuucccgcaggccgagaccugcaagguccagagcaaccggguguucugcgacaccaugaacucccggacccugcccagcgaggugaaccucugcaacaucgacaucuucaaccccaaguacgacugcaagaucaugacguccaagaccgacgucagcuccagcgugaucaccucccugggcgccaucgugagcugcuacgggaagaccaagugcacggcgagcaacaagaaccgcggcaucaucaagaccuucuccaacgggugcgacuacgucagcaacaagggcguggacaccguguccgucggcaacacccuguacuacgugaacaagcaggagggcaagagccucuacgugaagggggagcccaucaucaacuucuacgacccgcuggucuuccccuccgacgaguucgacgccagcaucucccaggugaacgagaagaucaaccagagccuggccuucauccggaaguccgacgagcuccugcacaacgugaacgucggcaagagcaccacgaacaucaugaucaccaccaucaucaucgugaucaucgugauccugcugcuccugaucgccgucgggcuguuccucuacugcaaggcccgcugaggacuagucccuguucccagagcccacuuuuuuuucuuuuuuugaaauaaaauagccugucuuucagaucuaaaaaaaaaaaaaaaaaaaaaaaaaaaaaaaaaaaaaaaaaaaaaaaaaaaaaaaaaaaaaaaaugcaucccccccccccccccccccccccccccccccaaaggcucuuuucagagccaccagaauu

SEQ ID NO: 13701 - RNA, 1843 nt, Artificial Sequence
  mRNA product Design d-1 comprising derived and/or modified sequence from HRSV(Memphis-37)__AIY60640.1__F-del_DSCav1_mut0 (opt1)
gggagacccgugacccggaaguuguacggcuacgcgacuuucccucccacaaacccucgcgcccuuccuuuccuacuugggcccggcagaaagcuuaccauggagcugcccauccucaagaccaacgccaucaccacgauccuggccgcggugacccugugcuucgccagcucccagaacaucaccgaggaguucuaccagagcacgugcuccgccgucagcaagggcuaccucuccgcccugcgcaccgggugguacaccagcgugaucaccaucgagcuguccaacaucaaggagaacaagugcaacggcaccgacgccaaggugaagcucaucaagcaggagcuggacaaguacaagaacgcggucacggagcugcagcuccugaugcagagcaccccggccgccggguccggcagcgccaucgcguccgggaucgccgugugcaaggugcugcaccucgagggcgaggucaacaagaucaagaacgcccugcugagcaccaacaaggccguggugucccucagcaacggcgucuccgugcugaccuucaaggugcuggaccucaagaacuacaucgacaagcagcugcugcccauccucaacaagcagagcugcuccaucagcaacaucgagacggucaucgaguuccagcagaagaacaaccggcugcuggagaucacccgcgaguucuccgugaacgccggggugaccacccccgucagcacguacaugcucaccaacagcgagcugcugucccucaucaacgacaugcccaucaccaacgaccagaagaagcugaugagcaacaacgugcagaucgugcggcagcaguccuacagcaucaugugcaucaucaaggaggagguccuggcguacguggugcagcucccgcuguacggcgucaucgacacccccugcuggaagcugcacacgagcccccucugcaccaccaacaccaaggagggguccaacaucugccugacgcgcaccgaccggggcugguacugcgacaacgccggguccgugagcuucuucccccaggccgagaccugcaaggugcaguccaaccgcgucuucugcgacaccaugaacagccggacgcucccguccgaggugaaccugugcaacaucgacaucuucaaccccaaguacgacugcaagaucaugaccagcaagaccgacgucuccagcuccgugaucaccagccugggcgccaucguguccugcuacggcaagacgaagugcaccgccagcaacaagaaccgggggaucaucaagaccuucuccaacggcugcgacuacgucagcaacaaggggguggacaccgugagcgucggcaacacgcucuacuacgugaacaagcaggagggcaagucccuguacgugaagggggagcccaucaucaacuucuacgacccccuggucuucccgagcgacgaguucgacgcguccaucagccaggugaacgagaagaucaaccagucccucgccuucauccgcaagagcgacgagcugcugcacaacgugaacgucggcaaguccaccaccaacaucaugaucaccaccaucaucaucgugaucaucgugauccuccugcugcucaucgccgucgggcuguuccuguacugcaaggcccggugaggacuagucccuguucccagagcccacuuuuuuuucuuuuuuugaaauaaaauagccugucuuucagaucuaaaaaaaaaaaaaaaaaaaaaaaaaaaaaaaaaaaaaaaaaaaaaaaaaaaaaaaaaaaaaaaaugcaucccccccccccccccccccccccccccccccaaaggcucuuuucagagccaccagaauu

SEQ ID NO: 13702 - RNA, 1843 nt, Artificial Sequence
  mRNA product Design d-1 comprising derived and/or modified sequence from HRSV(Memphis-37)__AIY60640.1__F-del_DSCav1_mut0 (opt2)
gggagacccgugacccggaaguuguacggcuacgcgacuuucccucccacaaacccucgcgcccuuccuuuccuacuugggcccggcagaaagcuuaccauggagcuccccauccucaagaccaacgccaucaccaccauccucgccgccgucacccucugcuucgccuccucccagaacaucaccgaggaguucuaccaguccaccugcuccgccgucuccaagggcuaccucuccgcccuccgcaccggcugguacaccuccgucaucaccaucgagcucuccaacaucaaggagaacaagugcaacggcaccgacgccaaggucaagcucaucaagcaggagcucgacaaguacaagaacgccgucaccgagcuccagcuccucaugcaguccacccccgccgccggcuccggcuccgccaucgccuccggcaucgccgucugcaagguccuccaccucgagggcgaggucaacaagaucaagaacgcccuccucuccaccaacaaggccgucgucucccucuccaacggcgucuccguccucaccuucaagguccucgaccucaagaacuacaucgacaagcagcuccuccccauccucaacaagcaguccugcuccaucuccaacaucgagaccgucaucgaguuccagcagaagaacaaccgccuccucgagaucacccgcgaguucuccgucaacgccggcgucaccacccccgucuccaccuacaugcucaccaacuccgagcuccucucccucaucaacgacaugcccaucaccaacgaccagaagaagcucauguccaacaacguccagaucguccgccagcaguccuacuccaucaugugcaucaucaaggaggagguccucgccuacgucguccagcucccccucuacggcgucaucgacacccccugcuggaagcuccacaccuccccccucugcaccaccaacaccaaggagggcuccaacaucugccucacccgcaccgaccgcggcugguacugcgacaacgccggcuccgucuccuucuucccccaggccgagaccugcaagguccaguccaaccgcgucuucugcgacaccaugaacucccgcacccuccccuccgaggucaaccucugcaacaucgacaucuucaaccccaaguacgacugcaagaucaugaccuccaagaccgacgucuccuccuccgucaucaccucccucggcgccaucgucuccugcuacggcaagaccaagugcaccgccuccaacaagaaccgcggcaucaucaagaccuucuccaacggcugcgacuacgucuccaacaagggcgucgacaccgucuccgucggcaacacccucuacuacgucaacaagcaggagggcaagucccucuacgucaagggcgagcccaucaucaacuucuacgacccccucgucuuccccuccgacgaguucgacgccuccaucucccaggucaacgagaagaucaaccagucccucgccuucauccgcaaguccgacgagcuccuccacaacgucaacgucggcaaguccaccaccaacaucaugaucaccaccaucaucaucgucaucaucgucauccuccuccuccucaucgccgucggccucuuccucuacugcaaggcccgcugaggacuagucccuguucccagagcccacuuuuuuuucuuuuuuugaaauaaaauagccugucuuucagaucuaaaaaaaaaaaaaaaaaaaaaaaaaaaaaaaaaaaaaaaaaaaaaaaaaaaaaaaaaaaaaaaaugcaucccccccccccccccccccccccccccccccaaaggcucuuuucagagccaccagaauu

SEQ ID NO: 13703 - RNA, 1843 nt, Artificial Sequence
  mRNA product Design d-1 comprising derived and/or modified sequence from HRSV(Memphis-37)__AIY60640.1__F-del_DSCav1_mut0 (opt3)
gggagacccgugacccggaaguuguacggcuacgcgacuuucccucccacaaacccucgcgcccuuccuuuccuacuugggcccggcagaaagcuuaccauggagcugcccauccucaagaccaacgccauuacaacuauacuugcugcagugacgcugugcuucgccagcucccagaauaucaccgaagaguuuuaccaaucuacauguucagcggucaguaaaggcuauuugagcgcuuuaagaacugggugguacaccuccguuauuacaaucgaacugucuaacauuaaggagaauaaaugcaacggaaccgacgccaaggugaaacuaaucaagcaggaacucgauaaguauaaaaaugcaguaacugagcugcagcuucugaugcagucgaccccugccgcugguucaggcagcgcaauagccagugggaucgcuguguguaaggucuugcaccucgagggagaagugaacaaaauuaagaaugcccugcuguccacaaacaaagcgguugugucucucagcaauggcgucuccguguuaacguucaagguacuggaccuuaagaacuacaucgauaaacaauugcugccaauucuaaauaagcagucaugcaguaucagcaacauagagacuguuauugaauuucagcagaaaaauaacaggcuccuggagaucacccgggaguucucugugaaugccggugucacaacuccgguguccaccuauaugcuuacaaacucagaacuguugagccucauuaacgacaugcccaucaccaaugaucaaaagaaacugaugaguaacaaugugcagaucguccgccagcagucuuacuccauuauguguauaaucaaggaggaaguuuuagcauaugugguacaacugccucucuacggggugauugacacgccaugcuggaaacuucauacuagcccccuguguacaaccaacacuaaggagggaucgaauaucugcuugacacgaaccgaucguggcugguacugugacaacgcuggcucugucuccuuuuucccucaggccgaaacgugcaaggugcagucaaauagaguguuuugugauaccaugaacaguagaacacugccaagcgaggugaaucucugcaacauagacauuuucaaucccaaauaugauugcaagaucaugacuuccaaaaccgacgucucuagcucagugaucacaagucugggggcaauuguauccuguuacggaaagacuaaaugcaccgcuagcaacaagaauagggguaucauuaagacauuuucuaacggcugugauuauguuucaaauaaagggguggacaccgucagugugggaaacacucuuuacuaugucaacaagcaagagggcaaaagccuguacgugaagggugaaccuauaaucaauuucuaugacccauugguuuuuccguccgaugaguucgacgccucuauuucgcagguuaacgagaaaaucaaucagagccucgcguuuauccggaaguccgaugaacuguuacacaacguaaaugucgggaagucaacgacaaacauuaugauaaccacuaucauuaucgugauuaucguuauacugcuacuccugaucgccgugggacuuuucuuguacugcaaagcacgcugaggacuagucccuguucccagagcccacuuuuuuuucuuuuuuugaaauaaaauagccugucuuucagaucuaaaaaaaaaaaaaaaaaaaaaaaaaaaaaaaaaaaaaaaaaaaaaaaaaaaaaaaaaaaaaaaaugcaucccccccccccccccccccccccccccccccaaaggcucuuuucagagccaccagaauu

SEQ ID NO: 13704 - RNA, 1843 nt, Artificial Sequence
  mRNA product Design d-1 comprising derived and/or modified sequence from HRSV(Memphis-37)__AIY60640.1__F-del_DSCav1_mut0 (opt4)
gggagacccgugacccggaaguuguacggcuacgcgacuuucccucccacaaacccucgcgcccuuccuuuccuacuugggcccggcagaaagcuuaccauggagcugcccauccugaagaccaacgccaucaccaccauccuggccgccgugacccugugcuucgccagcagccagaacaucaccgaggaguucuaccagagcaccugcagcgccgugagcaagggcuaccugagcgcccugagaaccggcugguacaccagcgugaucaccaucgagcugagcaacaucaaggagaacaagugcaacggcaccgacgccaaggugaagcugaucaagcaggagcuggacaaguacaagaacgccgugaccgagcugcagcugcugaugcagagcacccccgccgccggcagcggcagcgccaucgccagcggcaucgccgugugcaaggugcugcaccuggagggcgaggugaacaagaucaagaacgcccugcugagcaccaacaaggccguggugagccugagcaacggcgugagcgugcugaccuucaaggugcuggaccugaagaacuacaucgacaagcagcugcugcccauccugaacaagcagagcugcagcaucagcaacaucgagaccgugaucgaguuccagcagaagaacaacagacugcuggagaucaccagagaguucagcgugaacgccggcgugaccacccccgugagcaccuacaugcugaccaacagcgagcugcugagccugaucaacgacaugcccaucaccaacgaccagaagaagcugaugagcaacaacgugcagaucgugagacagcagagcuacagcaucaugugcaucaucaaggaggaggugcuggccuacguggugcagcugccccuguacggcgugaucgacacccccugcuggaagcugcacaccagcccccugugcaccaccaacaccaaggagggcagcaacaucugccugaccagaaccgacagaggcugguacugcgacaacgccggcagcgugagcuucuucccccaggccgagaccugcaaggugcagagcaacagaguguucugcgacaccaugaacagcagaacccugcccagcgaggugaaccugugcaacaucgacaucuucaaccccaaguacgacugcaagaucaugaccagcaagaccgacgugagcagcagcgugaucaccagccugggcgccaucgugagcugcuacggcaagaccaagugcaccgccagcaacaagaacagaggcaucaucaagaccuucagcaacggcugcgacuacgugagcaacaagggcguggacaccgugagcgugggcaacacccuguacuacgugaacaagcaggagggcaagagccuguacgugaagggcgagcccaucaucaacuucuacgacccccugguguuccccagcgacgaguucgacgccagcaucagccaggugaacgagaagaucaaccagagccuggccuucaucagaaagagcgacgagcugcugcacaacgugaacgugggcaagagcaccaccaacaucaugaucaccaccaucaucaucgugaucaucgugauccugcugcugcugaucgccgugggccuguuccuguacugcaaggccagaugaggacuagucccuguucccagagcccacuuuuuuuucuuuuuuugaaauaaaauagccugucuuucagaucuaaaaaaaaaaaaaaaaaaaaaaaaaaaaaaaaaaaaaaaaaaaaaaaaaaaaaaaaaaaaaaaaugcaucccccccccccccccccccccccccccccccaaaggcucuuuucagagccaccagaauu

SEQ ID NO: 13705 - RNA, 1843 nt, Artificial Sequence
  mRNA product Design d-1 comprising derived and/or modified sequence from HRSV(Memphis-37)__AIY60640.1__F-del_DSCav1_mut0 (opt5)
gggagacccgugacccggaaguuguacggcuacgcgacuuucccucccacaaacccucgcgcccuuccuuuccuacuugggcccggcagaaagcuuaccauggagcugcccauccucaagaccaacgccauuacaacgauccuggcugccgugacccuuugcuucgcgagcucccagaauauuacagaagaguuuuaccaaucuaccuguagcgcugucuccaaaggcuaucugucugcccucagaacagggugguacaccagcguuaucacaauugaacuguccaacaucaaggagaauaaaugcaacggaaccgacgccaaggugaaacuuaucaagcaggaacuggauaaguauaaaaaugcugugacggagcuccagcugcugaugcagucuaccccugccgcuggcagcggguccgccauugcgagcggaaucgccgucuguaaggugcuccaccuggagggcgaaguuaacaaaauuaagaaugcccuucugucuacaaacaaagcuguggucucccucagcaauggggugucuguucugaccuucaaggugcuugaccugaagaacuacaucgauaaacaacuccugccgauucugaauaagcaguccugcagcaucucuaacauugagacagucaucgaauuucagcagaaaaauaaccggcuccuggagaucacccgcgaguucuccgugaaugcuggagugacgacacccgucagcaccuauaugcuuacaaacuccgaacugcucucucugauuaacgacaugccuaucaccaaugaucaaaagaaacuuaugagcaacaauguucagauugugagacagcaguccuacagcaucauguguauuaucaaggaggaagugcuggccuaugucgugcaacucccccuguacggcguuaucgacaccccuugcuggaaacugcauacaucuccccucuguacgaccaacacaaaggagggcuccaauauuugccugacccggacagaucgcgggugguacugugacaacgcgggaagcgugagcuuuuucccucaggccgaaaccugcaagguccagucuaauagaguguuuugugauacgaugaacuccagaacacugccgucugagguuaaucucugcaacaucgacauuuucaaucccaaauaugauugcaagaucaugaccagcaaaaccgacguguccagcucugucauuacaucccugggcgcuaucgugagcuguuacgggaagaccaaaugcacagccucuaacaagaaucggggaaucauuaagacguuuuccaacggcugugauuaugucagcaauaaagggguggacaccguuuccgugggaaacacacuuuacuaugucaacaagcaagagggcaaaucucuguacgugaagggcgaaccuaucauuaauuucuaugacccccucguuuuuccuagcgaugaguucgacgcuuccaucucucaggugaacgaaaagauuaaucagagccuggccuuuauccgcaaguccgaugagcugcuccacaacgucaauguggggaaaagcaccacaaacauuaugaucaccacgaucauuaucgugauuaucguuauucugcuucugcucaucgccgucggacuguuccuguacugcaaagcuagaugaggacuagucccuguucccagagcccacuuuuuuuucuuuuuuugaaauaaaauagccugucuuucagaucuaaaaaaaaaaaaaaaaaaaaaaaaaaaaaaaaaaaaaaaaaaaaaaaaaaaaaaaaaaaaaaaaugcaucccccccccccccccccccccccccccccccaaaggcucuuuucagagccaccagaauu

SEQ ID NO: 13706 - RNA, 1843 nt, Artificial Sequence
  mRNA product Design d-1 comprising derived and/or modified sequence from HRSV(Memphis-37)__AIY60640.1__F-del_DSCav1_mut0 (opt6)
gggagacccgugacccggaaguuguacggcuacgcgacuuucccucccacaaacccucgcgcccuuccuuuccuacuugggcccggcagaaagcuuaccauggaacucccaauacuuaaaacaaacgcaaucacaacaauacuagcugcagucacacuaugcuucgccucaucacaaaauauaacagaagaauuuuaucaaucaacaugcuccgcaguaucaaaaggauaucucucugcauuacgaacagguugguacaccucgguaauaacaauagaauuaucaaacauaaaagaaaauaaaugcaauggaaccgaugccaaaguaaaacuaaucaaacaagaacuugacaaauacaaaaacgcaguaacagaacuacaacuauuaaugcaaucaacaccagcagcagguucaggcuccgcaaucgcuucaggaauagccguuuguaaaguacuacacuuagaaggagaaguaaauaaaauaaaaaacgccuuacuaucaacaaacaaagcaguagucucccuuuccaacggaguaucagucuuaacuuuuaaaguacucgacuuaaaaaauuacaucgacaaacaacuacuacccauucuaaauaaacaaucaugcucaauaucaaacaucgaaacaguaaucgaauuucaacaaaaaaauaauagauuacuagaaauaacacgagaauuuuccguaaaugccggaguaacgaccccagucucaacauacauguuaacaaacucagaauuacuaucacucauuaacgauaugccaauaacaaaugaccaaaaaaaacuaaugucaaacaacguccaaauaguacgacaacaaucauacucuaucauguguauaauaaaagaagaaguuuuagcauacguaguacaacuaccacuuuacggagucauagacaccccaugcuggaaacuacacacaucacccuuauguacaacaaacaccaaagaagggucuaacauaugucucacuagaacagaucgaggcugguacugcgacaacgcaggaucaguuagcuuuuucccucaagccgaaaccuguaaaguacaauccaaucgaguauuuugcgacacuaugaacucuagaaccuuacccuccgaaguaaaccuauguaacauagacauauuuaaucccaaauaugauugcaaaaucaugacauccaaaacagauguaucaagcucuguaauaaccucacuaggagcaauaguuucaugcuaugguaaaacaaaaugcaccgccucaaacaaaaauagagggauaaucaaaaccuucucaaauggaugcgacuacguaucaaauaaaggaguagacaccgucuccguaggaaacacacuauacuacguaaacaaacaagaaggaaaaucacuauacguaaaaggagaaccaaucauaaacuucuacgacccacuuguuuucccaucagaugaauuugaugccuccauaucacaaguaaacgaaaaaauaaaccaaucucuagccuucaucagaaaauccgacgaacuuuuacacaacguaaacguagguaaaucaacaaccaacaucaugauaacaacaauaauaauaguaauaauuguaauacuuuuacuacuuaucgccguaggccuauucuuauauuguaaagcaagaugaggacuagucccuguucccagagcccacuuuuuuuucuuuuuuugaaauaaaauagccugucuuucagaucuaaaaaaaaaaaaaaaaaaaaaaaaaaaaaaaaaaaaaaaaaaaaaaaaaaaaaaaaaaaaaaaaugcaucccccccccccccccccccccccccccccccaaaggcucuuuucagagccaccagaauu

SEQ ID NO: 13707 - RNA, 1843 nt, Artificial Sequence
  mRNA product Design d-1 comprising derived and/or modified sequence from HRSV(Memphis-37)__AIY60640.1__F-del_DSCav1_mut0 (opt11)
gggagacccgugacccggaaguuguacggcuacgcgacuuucccucccacaaacccucgcgcccuuccuuuccuacuugggcccggcagaaagcuuaccauggaacuaccaauccucaaaaccaacgccaucacuacaauccuagccgcgguaacccugugcuucgccuccucacaaaacaucacagaagaauuuuaccaaucaaccugcuccgccguauccaaaggauaccugagcgcccugagaaccggcugguacaccuccgucaucaccauagaacucuccaacaucaaagaaaacaaaugcaacgguacggacgccaaaguuaaacucaucaaacaagaacuugacaaauacaagaacgccgucacagaacugcaacuccucaugcaauccacccccgccgccggcuccggcuccgccauagccuccggcaucgccgucugcaaagucuuacaccuagaaggcgaagucaacaaaaucaaaaacgcacuacuuuccacaaacaaagccgucgucucacucuccaacggcguauccguccucaccuucaaaguacuugaccucaaaaacuacaucgacaaacaacuacuccccauccugaacaaacaauccugcucaaucuccaacaucgaaaccguaaucgaguuccaacagaaaaauaaucgccuccuggagaucacccgcgaguucuccgucaaugcaggagucacaaccccaguaucaaccuacaugcucaccaacuccgaacuccugucgcucaucaacgacaugcccaucacaaacgaccaaaagaaacucauguccaacaacguacaaaucgucagacaacaauccuauucuauaaugugcaucaucaaagaagaaguccucgccuacgucguacaacucccccucuacggcguuaucgacacccccugcuggaaacuccacaccucaccccucugcaccaccaacacaaaagaaggcuccaacaucugccucacucggaccgaccgcggcugguacugcgacaaugccggcagcgucuccuucuucccacaagccgaaaccugcaaaguccaguccaaccgcguauucugcgacacuaugaacuccagaacccuccccuccgaaguaaaccucugcaacaucgacaucuucaacccaaaauacgacugcaaaaucaugaccucaaaaaccgacgucagcucgucagucauaaccagccucggagccauagucucaugcuacggaaaaaccaaaugcaccgccagcaacaaaaaccgcggcauaauaaaaacauucuccaacggcugcgacuauguauccaacaaaggagucgauaccgucuccguaggcaacacccuauacuacgucaacaaacaagaaggcaaaucccucuacgucaaaggugaaccaaucaucaacuucuacgacccucucgucuuccccuccgaugaguucgacgccucaaucagccaaguaaacgaaaagauaaaccaaucacucgccuucauccgcaaauccgacgaacuucuucacaacgucaacgucggcaaaucuaccaccaacauaaugauaaccaccaucaucaucgucaucaucguaauacuccuccuucucaucgccgucggccuauuccuauacugcaaagcccgcuagggacuagucccuguucccagagcccacuuuuuuuucuuuuuuugaaauaaaauagccugucuuucagaucuaaaaaaaaaaaaaaaaaaaaaaaaaaaaaaaaaaaaaaaaaaaaaaaaaaaaaaaaaaaaaaaaugcaucccccccccccccccccccccccccccccccaaaggcucuuuucagagccaccagaauu

SEQ ID NO: 13708 - RNA, 1898 nt, Artificial Sequence
  mRNA product Design d-2 comprising derived and/or modified sequence from HRSV(Memphis-37)__AIY60640.1__F-del_DSCav1_mut0 (opt1)
gggagagcggcucggccauuuugucccagucaguccggaggcugcggcugcagaaguaccgccugcggaguaacugcaaagaagcuuaccauggagcugcccauccucaagaccaacgccaucaccacgauccuggccgcggugacccugugcuucgccagcucccagaacaucaccgaggaguucuaccagagcacgugcuccgccgucagcaagggcuaccucuccgcccugcgcaccgggugguacaccagcgugaucaccaucgagcuguccaacaucaaggagaacaagugcaacggcaccgacgccaaggugaagcucaucaagcaggagcuggacaaguacaagaacgcggucacggagcugcagcuccugaugcagagcaccccggccgccggcuccgggagcgcgaucgccuccggcaucgccgucugcaaggugcugcaccucgagggcgaggugaacaagaucaagaacgcccugcuguccaccaacaaggccgucgugagccucuccaacggggugagcguccugaccuucaaggugcuggaccucaagaacuacaucgacaagcagcugcugcccauccugaacaagcagagcugcuccaucagcaacaucgagaccgucaucgaguuccagcagaagaacaaccgccuccuggagaucacgcgggaguucagcgugaacgcgggcgugaccacccccgucuccaccuacaugcugacgaacagcgagcuccugucccugaucaacgacaugccgaucaccaacgaccagaagaagcucaugagcaacaacgugcagaucgugcgccagcaguccuacagcaucaugugcaucaucaaggaggagguccuggccuacguggugcagcugccccucuacggggucaucgacacccccugcuggaagcugcacaccagcccccugugcacgaccaacaccaaggagggcuccaacaucugccucacccggacggaccgcgggugguacugcgacaacgccggcagcguguccuucuucccgcaggccgagaccugcaagguccagagcaaccggguguucugcgacaccaugaacucccggacccugcccagcgaggugaaccucugcaacaucgacaucuucaaccccaaguacgacugcaagaucaugacguccaagaccgacgucagcuccagcgugaucaccucccugggcgccaucgugagcugcuacgggaagaccaagugcacggcgagcaacaagaaccgcggcaucaucaagaccuucuccaacgggugcgacuacgucagcaacaagggcguggacaccguguccgucggcaacacccuguacuacgugaacaagcaggagggcaagagccucuacgugaagggggagcccaucaucaacuucuacgacccgcuggucuuccccuccgacgaguucgacgccagcaucucccaggugaacgagaagaucaaccagagccuggccuucauccggaaguccgacgagcuccugcacaacgugaacgucggcaagagcaccacgaacaucaugaucaccaccaucaucaucgugaucaucgugauccugcugcuccugaucgccgucgggcuguuccucuacugcaaggcccgcugaggacuaguaauaaggaaacuguaugaaugucugugggcaggaagugaagagauccuucuguaaagguuuuuggaauuaugucugcugaauaauaaacuuuuuugaaauaauaaaucugguagaaaaaugagaucuaaaaaaaaaaaaaaaaaaaaaaaaaaaaaaaaaaaaaaaaaaaaaaaaaaaaaaaaaaaaaaaaugcaucccccccccccccccccccccccccccccccaaaggcucuuuucagagccaccagaauu

SEQ ID NO: 13709 - RNA, 1898 nt, Artificial Sequence
  mRNA product Design d-2 comprising derived and/or modified sequence from HRSV(Memphis-37)__AIY60640.1__F-del_DSCav1_mut0 (opt1)
gggagagcggcucggccauuuugucccagucaguccggaggcugcggcugcagaaguaccgccugcggaguaacugcaaagaagcuuaccauggagcugcccauccucaagaccaacgccaucaccacgauccuggccgcggugacccugugcuucgccagcucccagaacaucaccgaggaguucuaccagagcacgugcuccgccgucagcaagggcuaccucuccgcccugcgcaccgggugguacaccagcgugaucaccaucgagcuguccaacaucaaggagaacaagugcaacggcaccgacgccaaggugaagcucaucaagcaggagcuggacaaguacaagaacgcggucacggagcugcagcuccugaugcagagcaccccggccgccggguccggcagcgccaucgcguccgggaucgccgugugcaaggugcugcaccucgagggcgaggucaacaagaucaagaacgcccugcugagcaccaacaaggccguggugucccucagcaacggcgucuccgugcugaccuucaaggugcuggaccucaagaacuacaucgacaagcagcugcugcccauccucaacaagcagagcugcuccaucagcaacaucgagacggucaucgaguuccagcagaagaacaaccggcugcuggagaucacccgcgaguucuccgugaacgccggggugaccacccccgucagcacguacaugcucaccaacagcgagcugcugucccucaucaacgacaugcccaucaccaacgaccagaagaagcugaugagcaacaacgugcagaucgugcggcagcaguccuacagcaucaugugcaucaucaaggaggagguccuggcguacguggugcagcucccgcuguacggcgucaucgacacccccugcuggaagcugcacacgagcccccucugcaccaccaacaccaaggagggguccaacaucugccugacgcgcaccgaccggggcugguacugcgacaacgccggguccgugagcuucuucccccaggccgagaccugcaaggugcaguccaaccgcgucuucugcgacaccaugaacagccggacgcucccguccgaggugaaccugugcaacaucgacaucuucaaccccaaguacgacugcaagaucaugaccagcaagaccgacgucuccagcuccgugaucaccagccugggcgccaucguguccugcuacggcaagacgaagugcaccgccagcaacaagaaccgggggaucaucaagaccuucuccaacggcugcgacuacgucagcaacaaggggguggacaccgugagcgucggcaacacgcucuacuacgugaacaagcaggagggcaagucccuguacgugaagggggagcccaucaucaacuucuacgacccccuggucuucccgagcgacgaguucgacgcguccaucagccaggugaacgagaagaucaaccagucccucgccuucauccgcaagagcgacgagcugcugcacaacgugaacgucggcaaguccaccaccaacaucaugaucaccaccaucaucaucgugaucaucgugauccuccugcugcucaucgccgucgggcuguuccuguacugcaaggcccggugaggacuaguaauaaggaaacuguaugaaugucugugggcaggaagugaagagauccuucuguaaagguuuuuggaauuaugucugcugaauaauaaacuuuuuugaaauaauaaaucugguagaaaaaugagaucuaaaaaaaaaaaaaaaaaaaaaaaaaaaaaaaaaaaaaaaaaaaaaaaaaaaaaaaaaaaaaaaaugcaucccccccccccccccccccccccccccccccaaaggcucuuuucagagccaccagaauu

SEQ ID NO: 13710 - RNA, 1898 nt, Artificial Sequence
  mRNA product Design d-2 comprising derived and/or modified sequence from HRSV(Memphis-37)__AIY60640.1__F-del_DSCav1_mut0 (opt2)
gggagagcggcucggccauuuugucccagucaguccggaggcugcggcugcagaaguaccgccugcggaguaacugcaaagaagcuuaccauggagcuccccauccucaagaccaacgccaucaccaccauccucgccgccgucacccucugcuucgccuccucccagaacaucaccgaggaguucuaccaguccaccugcuccgccgucuccaagggcuaccucuccgcccuccgcaccggcugguacaccuccgucaucaccaucgagcucuccaacaucaaggagaacaagugcaacggcaccgacgccaaggucaagcucaucaagcaggagcucgacaaguacaagaacgccgucaccgagcuccagcuccucaugcaguccacccccgccgccggcuccggcuccgccaucgccuccggcaucgccgucugcaagguccuccaccucgagggcgaggucaacaagaucaagaacgcccuccucuccaccaacaaggccgucgucucccucuccaacggcgucuccguccucaccuucaagguccucgaccucaagaacuacaucgacaagcagcuccuccccauccucaacaagcaguccugcuccaucuccaacaucgagaccgucaucgaguuccagcagaagaacaaccgccuccucgagaucacccgcgaguucuccgucaacgccggcgucaccacccccgucuccaccuacaugcucaccaacuccgagcuccucucccucaucaacgacaugcccaucaccaacgaccagaagaagcucauguccaacaacguccagaucguccgccagcaguccuacuccaucaugugcaucaucaaggaggagguccucgccuacgucguccagcucccccucuacggcgucaucgacacccccugcuggaagcuccacaccuccccccucugcaccaccaacaccaaggagggcuccaacaucugccucacccgcaccgaccgcggcugguacugcgacaacgccggcuccgucuccuucuucccccaggccgagaccugcaagguccaguccaaccgcgucuucugcgacaccaugaacucccgcacccuccccuccgaggucaaccucugcaacaucgacaucuucaaccccaaguacgacugcaagaucaugaccuccaagaccgacgucuccuccuccgucaucaccucccucggcgccaucgucuccugcuacggcaagaccaagugcaccgccuccaacaagaaccgcggcaucaucaagaccuucuccaacggcugcgacuacgucuccaacaagggcgucgacaccgucuccgucggcaacacccucuacuacgucaacaagcaggagggcaagucccucuacgucaagggcgagcccaucaucaacuucuacgacccccucgucuuccccuccgacgaguucgacgccuccaucucccaggucaacgagaagaucaaccagucccucgccuucauccgcaaguccgacgagcuccuccacaacgucaacgucggcaaguccaccaccaacaucaugaucaccaccaucaucaucgucaucaucgucauccuccuccuccucaucgccgucggccucuuccucuacugcaaggcccgcugaggacuaguaauaaggaaacuguaugaaugucugugggcaggaagugaagagauccuucuguaaagguuuuuggaauuaugucugcugaauaauaaacuuuuuugaaauaauaaaucugguagaaaaaugagaucuaaaaaaaaaaaaaaaaaaaaaaaaaaaaaaaaaaaaaaaaaaaaaaaaaaaaaaaaaaaaaaaaugcaucccccccccccccccccccccccccccccccaaaggcucuuuucagagccaccagaauu

SEQ ID NO: 13711 - RNA, 1898 nt, Artificial Sequence
  mRNA product Design d-2 comprising derived and/or modified sequence from HRSV(Memphis-37)__AIY60640.1__F-del_DSCav1_mut0 (opt3)
gggagagcggcucggccauuuugucccagucaguccggaggcugcggcugcagaaguaccgccugcggaguaacugcaaagaagcuuaccauggagcugcccauccucaagaccaacgccauuacaacuauacuugcugcagugacgcugugcuucgccagcucccagaauaucaccgaagaguuuuaccaaucuacauguucagcggucaguaaaggcuauuugagcgcuuuaagaacugggugguacaccuccguuauuacaaucgaacugucuaacauuaaggagaauaaaugcaacggaaccgacgccaaggugaaacuaaucaagcaggaacucgauaaguauaaaaaugcaguaacugagcugcagcuucugaugcagucgaccccugccgcugguucaggcagcgcaauagccagugggaucgcuguguguaaggucuugcaccucgagggagaagugaacaaaauuaagaaugcccugcuguccacaaacaaagcgguugugucucucagcaauggcgucuccguguuaacguucaagguacuggaccuuaagaacuacaucgauaaacaauugcugccaauucuaaauaagcagucaugcaguaucagcaacauagagacuguuauugaauuucagcagaaaaauaacaggcuccuggagaucacccgggaguucucugugaaugccggugucacaacuccgguguccaccuauaugcuuacaaacucagaacuguugagccucauuaacgacaugcccaucaccaaugaucaaaagaaacugaugaguaacaaugugcagaucguccgccagcagucuuacuccauuauguguauaaucaaggaggaaguuuuagcauaugugguacaacugccucucuacggggugauugacacgccaugcuggaaacuucauacuagcccccuguguacaaccaacacuaaggagggaucgaauaucugcuugacacgaaccgaucguggcugguacugugacaacgcuggcucugucuccuuuuucccucaggccgaaacgugcaaggugcagucaaauagaguguuuugugauaccaugaacaguagaacacugccaagcgaggugaaucucugcaacauagacauuuucaaucccaaauaugauugcaagaucaugacuuccaaaaccgacgucucuagcucagugaucacaagucugggggcaauuguauccuguuacggaaagacuaaaugcaccgcuagcaacaagaauagggguaucauuaagacauuuucuaacggcugugauuauguuucaaauaaagggguggacaccgucagugugggaaacacucuuuacuaugucaacaagcaagagggcaaaagccuguacgugaagggugaaccuauaaucaauuucuaugacccauugguuuuuccguccgaugaguucgacgccucuauuucgcagguuaacgagaaaaucaaucagagccucgcguuuauccggaaguccgaugaacuguuacacaacguaaaugucgggaagucaacgacaaacauuaugauaaccacuaucauuaucgugauuaucguuauacugcuacuccugaucgccgugggacuuuucuuguacugcaaagcacgcugaggacuaguaauaaggaaacuguaugaaugucugugggcaggaagugaagagauccuucuguaaagguuuuuggaauuaugucugcugaauaauaaacuuuuuugaaauaauaaaucugguagaaaaaugagaucuaaaaaaaaaaaaaaaaaaaaaaaaaaaaaaaaaaaaaaaaaaaaaaaaaaaaaaaaaaaaaaaaugcaucccccccccccccccccccccccccccccccaaaggcucuuuucagagccaccagaauu

SEQ ID NO: 13712 - RNA, 1898 nt, Artificial Sequence
  mRNA product Design d-2 comprising derived and/or modified sequence from HRSV(Memphis-37)__AIY60640.1__F-del_DSCav1_mut0 (opt4)
gggagagcggcucggccauuuugucccagucaguccggaggcugcggcugcagaaguaccgccugcggaguaacugcaaagaagcuuaccauggagcugcccauccugaagaccaacgccaucaccaccauccuggccgccgugacccugugcuucgccagcagccagaacaucaccgaggaguucuaccagagcaccugcagcgccgugagcaagggcuaccugagcgcccugagaaccggcugguacaccagcgugaucaccaucgagcugagcaacaucaaggagaacaagugcaacggcaccgacgccaaggugaagcugaucaagcaggagcuggacaaguacaagaacgccgugaccgagcugcagcugcugaugcagagcacccccgccgccggcagcggcagcgccaucgccagcggcaucgccgugugcaaggugcugcaccuggagggcgaggugaacaagaucaagaacgcccugcugagcaccaacaaggccguggugagccugagcaacggcgugagcgugcugaccuucaaggugcuggaccugaagaacuacaucgacaagcagcugcugcccauccugaacaagcagagcugcagcaucagcaacaucgagaccgugaucgaguuccagcagaagaacaacagacugcuggagaucaccagagaguucagcgugaacgccggcgugaccacccccgugagcaccuacaugcugaccaacagcgagcugcugagccugaucaacgacaugcccaucaccaacgaccagaagaagcugaugagcaacaacgugcagaucgugagacagcagagcuacagcaucaugugcaucaucaaggaggaggugcuggccuacguggugcagcugccccuguacggcgugaucgacacccccugcuggaagcugcacaccagcccccugugcaccaccaacaccaaggagggcagcaacaucugccugaccagaaccgacagaggcugguacugcgacaacgccggcagcgugagcuucuucccccaggccgagaccugcaaggugcagagcaacagaguguucugcgacaccaugaacagcagaacccugcccagcgaggugaaccugugcaacaucgacaucuucaaccccaaguacgacugcaagaucaugaccagcaagaccgacgugagcagcagcgugaucaccagccugggcgccaucgugagcugcuacggcaagaccaagugcaccgccagcaacaagaacagaggcaucaucaagaccuucagcaacggcugcgacuacgugagcaacaagggcguggacaccgugagcgugggcaacacccuguacuacgugaacaagcaggagggcaagagccuguacgugaagggcgagcccaucaucaacuucuacgacccccugguguuccccagcgacgaguucgacgccagcaucagccaggugaacgagaagaucaaccagagccuggccuucaucagaaagagcgacgagcugcugcacaacgugaacgugggcaagagcaccaccaacaucaugaucaccaccaucaucaucgugaucaucgugauccugcugcugcugaucgccgugggccuguuccuguacugcaaggccagaugaggacuaguaauaaggaaacuguaugaaugucugugggcaggaagugaagagauccuucuguaaagguuuuuggaauuaugucugcugaauaauaaacuuuuuugaaauaauaaaucugguagaaaaaugagaucuaaaaaaaaaaaaaaaaaaaaaaaaaaaaaaaaaaaaaaaaaaaaaaaaaaaaaaaaaaaaaaaaugcaucccccccccccccccccccccccccccccccaaaggcucuuuucagagccaccagaauu

SEQ ID NO: 13713 - RNA, 1898 nt, Artificial Sequence
  mRNA product Design d-2 comprising derived and/or modified sequence from HRSV(Memphis-37)__AIY60640.1__F-del_DSCav1_mut0 (opt5)
gggagagcggcucggccauuuugucccagucaguccggaggcugcggcugcagaaguaccgccugcggaguaacugcaaagaagcuuaccauggagcugcccauccucaagaccaacgccauuacaacgauccuggcugccgugacccuuugcuucgcgagcucccagaauauuacagaagaguuuuaccaaucuaccuguagcgcugucuccaaaggcuaucugucugcccucagaacagggugguacaccagcguuaucacaauugaacuguccaacaucaaggagaauaaaugcaacggaaccgacgccaaggugaaacuuaucaagcaggaacuggauaaguauaaaaaugcugugacggagcuccagcugcugaugcagucuaccccugccgcuggcagcggguccgccauugcgagcggaaucgccgucuguaaggugcuccaccuggagggcgaaguuaacaaaauuaagaaugcccuucugucuacaaacaaagcuguggucucccucagcaauggggugucuguucugaccuucaaggugcuugaccugaagaacuacaucgauaaacaacuccugccgauucugaauaagcaguccugcagcaucucuaacauugagacagucaucgaauuucagcagaaaaauaaccggcuccuggagaucacccgcgaguucuccgugaaugcuggagugacgacacccgucagcaccuauaugcuuacaaacuccgaacugcucucucugauuaacgacaugccuaucaccaaugaucaaaagaaacuuaugagcaacaauguucagauugugagacagcaguccuacagcaucauguguauuaucaaggaggaagugcuggccuaugucgugcaacucccccuguacggcguuaucgacaccccuugcuggaaacugcauacaucuccccucuguacgaccaacacaaaggagggcuccaauauuugccugacccggacagaucgcgggugguacugugacaacgcgggaagcgugagcuuuuucccucaggccgaaaccugcaagguccagucuaauagaguguuuugugauacgaugaacuccagaacacugccgucugagguuaaucucugcaacaucgacauuuucaaucccaaauaugauugcaagaucaugaccagcaaaaccgacguguccagcucugucauuacaucccugggcgcuaucgugagcuguuacgggaagaccaaaugcacagccucuaacaagaaucggggaaucauuaagacguuuuccaacggcugugauuaugucagcaauaaagggguggacaccguuuccgugggaaacacacuuuacuaugucaacaagcaagagggcaaaucucuguacgugaagggcgaaccuaucauuaauuucuaugacccccucguuuuuccuagcgaugaguucgacgcuuccaucucucaggugaacgaaaagauuaaucagagccuggccuuuauccgcaaguccgaugagcugcuccacaacgucaauguggggaaaagcaccacaaacauuaugaucaccacgaucauuaucgugauuaucguuauucugcuucugcucaucgccgucggacuguuccuguacugcaaagcuagaugaggacuaguaauaaggaaacuguaugaaugucugugggcaggaagugaagagauccuucuguaaagguuuuuggaauuaugucugcugaauaauaaacuuuuuugaaauaauaaaucugguagaaaaaugagaucuaaaaaaaaaaaaaaaaaaaaaaaaaaaaaaaaaaaaaaaaaaaaaaaaaaaaaaaaaaaaaaaaugcaucccccccccccccccccccccccccccccccaaaggcucuuuucagagccaccagaauu

SEQ ID NO: 13714 - RNA, 1898 nt, Artificial Sequence
  mRNA product Design d-2 comprising derived and/or modified sequence from HRSV(Memphis-37)__AIY60640.1__F-del_DSCav1_mut0 (opt6)
gggagagcggcucggccauuuugucccagucaguccggaggcugcggcugcagaaguaccgccugcggaguaacugcaaagaagcuuaccauggaacucccaauacuuaaaacaaacgcaaucacaacaauacuagcugcagucacacuaugcuucgccucaucacaaaauauaacagaagaauuuuaucaaucaacaugcuccgcaguaucaaaaggauaucucucugcauuacgaacagguugguacaccucgguaauaacaauagaauuaucaaacauaaaagaaaauaaaugcaauggaaccgaugccaaaguaaaacuaaucaaacaagaacuugacaaauacaaaaacgcaguaacagaacuacaacuauuaaugcaaucaacaccagcagcagguucaggcuccgcaaucgcuucaggaauagccguuuguaaaguacuacacuuagaaggagaaguaaauaaaauaaaaaacgccuuacuaucaacaaacaaagcaguagucucccuuuccaacggaguaucagucuuaacuuuuaaaguacucgacuuaaaaaauuacaucgacaaacaacuacuacccauucuaaauaaacaaucaugcucaauaucaaacaucgaaacaguaaucgaauuucaacaaaaaaauaauagauuacuagaaauaacacgagaauuuuccguaaaugccggaguaacgaccccagucucaacauacauguuaacaaacucagaauuacuaucacucauuaacgauaugccaauaacaaaugaccaaaaaaaacuaaugucaaacaacguccaaauaguacgacaacaaucauacucuaucauguguauaauaaaagaagaaguuuuagcauacguaguacaacuaccacuuuacggagucauagacaccccaugcuggaaacuacacacaucacccuuauguacaacaaacaccaaagaagggucuaacauaugucucacuagaacagaucgaggcugguacugcgacaacgcaggaucaguuagcuuuuucccucaagccgaaaccuguaaaguacaauccaaucgaguauuuugcgacacuaugaacucuagaaccuuacccuccgaaguaaaccuauguaacauagacauauuuaaucccaaauaugauugcaaaaucaugacauccaaaacagauguaucaagcucuguaauaaccucacuaggagcaauaguuucaugcuaugguaaaacaaaaugcaccgccucaaacaaaaauagagggauaaucaaaaccuucucaaauggaugcgacuacguaucaaauaaaggaguagacaccgucuccguaggaaacacacuauacuacguaaacaaacaagaaggaaaaucacuauacguaaaaggagaaccaaucauaaacuucuacgacccacuuguuuucccaucagaugaauuugaugccuccauaucacaaguaaacgaaaaaauaaaccaaucucuagccuucaucagaaaauccgacgaacuuuuacacaacguaaacguagguaaaucaacaaccaacaucaugauaacaacaauaauaauaguaauaauuguaauacuuuuacuacuuaucgccguaggccuauucuuauauuguaaagcaagaugaggacuaguaauaaggaaacuguaugaaugucugugggcaggaagugaagagauccuucuguaaagguuuuuggaauuaugucugcugaauaauaaacuuuuuugaaauaauaaaucugguagaaaaaugagaucuaaaaaaaaaaaaaaaaaaaaaaaaaaaaaaaaaaaaaaaaaaaaaaaaaaaaaaaaaaaaaaaaugcaucccccccccccccccccccccccccccccccaaaggcucuuuucagagccaccagaauu

SEQ ID NO: 13715 - RNA, 1898 nt, Artificial Sequence
  mRNA product Design d-2 comprising derived and/or modified sequence from HRSV(Memphis-37)__AIY60640.1__F-del_DSCav1_mut0 (opt11)
gggagagcggcucggccauuuugucccagucaguccggaggcugcggcugcagaaguaccgccugcggaguaacugcaaagaagcuuaccauggaacuaccaauccucaaaaccaacgccaucacuacaauccuagccgcgguaacccugugcuucgccuccucacaaaacaucacagaagaauuuuaccaaucaaccugcuccgccguauccaaaggauaccugagcgcccugagaaccggcugguacaccuccgucaucaccauagaacucuccaacaucaaagaaaacaaaugcaacgguacggacgccaaaguuaaacucaucaaacaagaacuugacaaauacaagaacgccgucacagaacugcaacuccucaugcaauccacccccgccgccggcuccggcuccgccauagccuccggcaucgccgucugcaaagucuuacaccuagaaggcgaagucaacaaaaucaaaaacgcacuacuuuccacaaacaaagccgucgucucacucuccaacggcguauccguccucaccuucaaaguacuugaccucaaaaacuacaucgacaaacaacuacuccccauccugaacaaacaauccugcucaaucuccaacaucgaaaccguaaucgaguuccaacagaaaaauaaucgccuccuggagaucacccgcgaguucuccgucaaugcaggagucacaaccccaguaucaaccuacaugcucaccaacuccgaacuccugucgcucaucaacgacaugcccaucacaaacgaccaaaagaaacucauguccaacaacguacaaaucgucagacaacaauccuauucuauaaugugcaucaucaaagaagaaguccucgccuacgucguacaacucccccucuacggcguuaucgacacccccugcuggaaacuccacaccucaccccucugcaccaccaacacaaaagaaggcuccaacaucugccucacucggaccgaccgcggcugguacugcgacaaugccggcagcgucuccuucuucccacaagccgaaaccugcaaaguccaguccaaccgcguauucugcgacacuaugaacuccagaacccuccccuccgaaguaaaccucugcaacaucgacaucuucaacccaaaauacgacugcaaaaucaugaccucaaaaaccgacgucagcucgucagucauaaccagccucggagccauagucucaugcuacggaaaaaccaaaugcaccgccagcaacaaaaaccgcggcauaauaaaaacauucuccaacggcugcgacuauguauccaacaaaggagucgauaccgucuccguaggcaacacccuauacuacgucaacaaacaagaaggcaaaucccucuacgucaaaggugaaccaaucaucaacuucuacgacccucucgucuuccccuccgaugaguucgacgccucaaucagccaaguaaacgaaaagauaaaccaaucacucgccuucauccgcaaauccgacgaacuucuucacaacgucaacgucggcaaaucuaccaccaacauaaugauaaccaccaucaucaucgucaucaucguaauacuccuccuucucaucgccgucggccuauuccuauacugcaaagcccgcuagggacuaguaauaaggaaacuguaugaaugucugugggcaggaagugaagagauccuucuguaaagguuuuuggaauuaugucugcugaauaauaaacuuuuuugaaauaauaaaucugguagaaaaaugagaucuaaaaaaaaaaaaaaaaaaaaaaaaaaaaaaaaaaaaaaaaaaaaaaaaaaaaaaaaaaaaaaaaugcaucccccccccccccccccccccccccccccccaaaggcucuuuucagagccaccagaauu

SEQ ID NO: 13716 - RNA, 2214 nt, Artificial Sequence
  mRNA product Design d-3 comprising derived and/or modified sequence from HRSV(Memphis-37)__AIY60640.1__F-del_DSCav1_mut0 (opt1)
gggagagggcgcuuggcuugcaaggacccugagcugcggcauugaagcacacccaacccaacucgacugaagucagccucacugaaccggaucugagaaucuucucucucugggcuugccagggcucuccgaaccuagcuagcauccucuucaauuccaacuagaaagcuuaccauggagcugcccauccucaagaccaacgccaucaccacgauccuggccgcggugacccugugcuucgccagcucccagaacaucaccgaggaguucuaccagagcacgugcuccgccgucagcaagggcuaccucuccgcccugcgcaccgggugguacaccagcgugaucaccaucgagcuguccaacaucaaggagaacaagugcaacggcaccgacgccaaggugaagcucaucaagcaggagcuggacaaguacaagaacgcggucacggagcugcagcuccugaugcagagcaccccggccgccggcuccgggagcgcgaucgccuccggcaucgccgucugcaaggugcugcaccucgagggcgaggugaacaagaucaagaacgcccugcuguccaccaacaaggccgucgugagccucuccaacggggugagcguccugaccuucaaggugcuggaccucaagaacuacaucgacaagcagcugcugcccauccugaacaagcagagcugcuccaucagcaacaucgagaccgucaucgaguuccagcagaagaacaaccgccuccuggagaucacgcgggaguucagcgugaacgcgggcgugaccacccccgucuccaccuacaugcugacgaacagcgagcuccugucccugaucaacgacaugccgaucaccaacgaccagaagaagcucaugagcaacaacgugcagaucgugcgccagcaguccuacagcaucaugugcaucaucaaggaggagguccuggccuacguggugcagcugccccucuacggggucaucgacacccccugcuggaagcugcacaccagcccccugugcacgaccaacaccaaggagggcuccaacaucugccucacccggacggaccgcgggugguacugcgacaacgccggcagcguguccuucuucccgcaggccgagaccugcaagguccagagcaaccggguguucugcgacaccaugaacucccggacccugcccagcgaggugaaccucugcaacaucgacaucuucaaccccaaguacgacugcaagaucaugacguccaagaccgacgucagcuccagcgugaucaccucccugggcgccaucgugagcugcuacgggaagaccaagugcacggcgagcaacaagaaccgcggcaucaucaagaccuucuccaacgggugcgacuacgucagcaacaagggcguggacaccguguccgucggcaacacccuguacuacgugaacaagcaggagggcaagagccucuacgugaagggggagcccaucaucaacuucuacgacccgcuggucuuccccuccgacgaguucgacgccagcaucucccaggugaacgagaagaucaaccagagccuggccuucauccggaaguccgacgagcuccugcacaacgugaacgucggcaagagcaccacgaacaucaugaucaccaccaucaucaucgugaucaucgugauccugcugcuccugaucgccgucgggcuguuccucuacugcaaggcccgcugaggacuagugaagggaacacccaaauuuaauucagccuuaagcacaauuaauuaagagugaaacguaauuguacaagcaguuggucacccaccauagggcaugaucaacaccgcaaccuuuccuuuuucccccagugauucugaaaaaccccucuucccuucagcuugcuuagauguuccaaauuuaguaagcuuaaggcggccuacagaagaaaaagaaaaaaaaggccacaaaaguucccucucacuuucaguaaauaaaauaaaagcagcaacagaaauaaagaaauaaaugaaauucaaaaugaaauaaauauuguguugugcagcauuaaaaaaucaauaaaaauuaaaaaugagcaagaucuaaaaaaaaaaaaaaaaaaaaaaaaaaaaaaaaaaaaaaaaaaaaaaaaaaaaaaaaaaaaaaaaugcaucccccccccccccccccccccccccccccccaaaggcucuuuucagagccaccagaauu

SEQ ID NO: 13717 - RNA, 2214 nt, Artificial Sequence
  mRNA product Design d-3 comprising derived and/or modified sequence from HRSV(Memphis-37)__AIY60640.1__F-del_DSCav1_mut0 (opt1)
gggagagggcgcuuggcuugcaaggacccugagcugcggcauugaagcacacccaacccaacucgacugaagucagccucacugaaccggaucugagaaucuucucucucugggcuugccagggcucuccgaaccuagcuagcauccucuucaauuccaacuagaaagcuuaccauggagcugcccauccucaagaccaacgccaucaccacgauccuggccgcggugacccugugcuucgccagcucccagaacaucaccgaggaguucuaccagagcacgugcuccgccgucagcaagggcuaccucuccgcccugcgcaccgggugguacaccagcgugaucaccaucgagcuguccaacaucaaggagaacaagugcaacggcaccgacgccaaggugaagcucaucaagcaggagcuggacaaguacaagaacgcggucacggagcugcagcuccugaugcagagcaccccggccgccggguccggcagcgccaucgcguccgggaucgccgugugcaaggugcugcaccucgagggcgaggucaacaagaucaagaacgcccugcugagcaccaacaaggccguggugucccucagcaacggcgucuccgugcugaccuucaaggugcuggaccucaagaacuacaucgacaagcagcugcugcccauccucaacaagcagagcugcuccaucagcaacaucgagacggucaucgaguuccagcagaagaacaaccggcugcuggagaucacccgcgaguucuccgugaacgccggggugaccacccccgucagcacguacaugcucaccaacagcgagcugcugucccucaucaacgacaugcccaucaccaacgaccagaagaagcugaugagcaacaacgugcagaucgugcggcagcaguccuacagcaucaugugcaucaucaaggaggagguccuggcguacguggugcagcucccgcuguacggcgucaucgacacccccugcuggaagcugcacacgagcccccucugcaccaccaacaccaaggagggguccaacaucugccugacgcgcaccgaccggggcugguacugcgacaacgccggguccgugagcuucuucccccaggccgagaccugcaaggugcaguccaaccgcgucuucugcgacaccaugaacagccggacgcucccguccgaggugaaccugugcaacaucgacaucuucaaccccaaguacgacugcaagaucaugaccagcaagaccgacgucuccagcuccgugaucaccagccugggcgccaucguguccugcuacggcaagacgaagugcaccgccagcaacaagaaccgggggaucaucaagaccuucuccaacggcugcgacuacgucagcaacaaggggguggacaccgugagcgucggcaacacgcucuacuacgugaacaagcaggagggcaagucccuguacgugaagggggagcccaucaucaacuucuacgacccccuggucuucccgagcgacgaguucgacgcguccaucagccaggugaacgagaagaucaaccagucccucgccuucauccgcaagagcgacgagcugcugcacaacgugaacgucggcaaguccaccaccaacaucaugaucaccaccaucaucaucgugaucaucgugauccuccugcugcucaucgccgucgggcuguuccuguacugcaaggcccggugaggacuagugaagggaacacccaaauuuaauucagccuuaagcacaauuaauuaagagugaaacguaauuguacaagcaguuggucacccaccauagggcaugaucaacaccgcaaccuuuccuuuuucccccagugauucugaaaaaccccucuucccuucagcuugcuuagauguuccaaauuuaguaagcuuaaggcggccuacagaagaaaaagaaaaaaaaggccacaaaaguucccucucacuuucaguaaauaaaauaaaagcagcaacagaaauaaagaaauaaaugaaauucaaaaugaaauaaauauuguguugugcagcauuaaaaaaucaauaaaaauuaaaaaugagcaagaucuaaaaaaaaaaaaaaaaaaaaaaaaaaaaaaaaaaaaaaaaaaaaaaaaaaaaaaaaaaaaaaaaugcaucccccccccccccccccccccccccccccccaaaggcucuuuucagagccaccagaauu

SEQ ID NO: 13718 - RNA, 2214 nt, Artificial Sequence
  mRNA product Design d-3 comprising derived and/or modified sequence from HRSV(Memphis-37)__AIY60640.1__F-del_DSCav1_mut0 (opt2)
gggagagggcgcuuggcuugcaaggacccugagcugcggcauugaagcacacccaacccaacucgacugaagucagccucacugaaccggaucugagaaucuucucucucugggcuugccagggcucuccgaaccuagcuagcauccucuucaauuccaacuagaaagcuuaccauggagcuccccauccucaagaccaacgccaucaccaccauccucgccgccgucacccucugcuucgccuccucccagaacaucaccgaggaguucuaccaguccaccugcuccgccgucuccaagggcuaccucuccgcccuccgcaccggcugguacaccuccgucaucaccaucgagcucuccaacaucaaggagaacaagugcaacggcaccgacgccaaggucaagcucaucaagcaggagcucgacaaguacaagaacgccgucaccgagcuccagcuccucaugcaguccacccccgccgccggcuccggcuccgccaucgccuccggcaucgccgucugcaagguccuccaccucgagggcgaggucaacaagaucaagaacgcccuccucuccaccaacaaggccgucgucucccucuccaacggcgucuccguccucaccuucaagguccucgaccucaagaacuacaucgacaagcagcuccuccccauccucaacaagcaguccugcuccaucuccaacaucgagaccgucaucgaguuccagcagaagaacaaccgccuccucgagaucacccgcgaguucuccgucaacgccggcgucaccacccccgucuccaccuacaugcucaccaacuccgagcuccucucccucaucaacgacaugcccaucaccaacgaccagaagaagcucauguccaacaacguccagaucguccgccagcaguccuacuccaucaugugcaucaucaaggaggagguccucgccuacgucguccagcucccccucuacggcgucaucgacacccccugcuggaagcuccacaccuccccccucugcaccaccaacaccaaggagggcuccaacaucugccucacccgcaccgaccgcggcugguacugcgacaacgccggcuccgucuccuucuucccccaggccgagaccugcaagguccaguccaaccgcgucuucugcgacaccaugaacucccgcacccuccccuccgaggucaaccucugcaacaucgacaucuucaaccccaaguacgacugcaagaucaugaccuccaagaccgacgucuccuccuccgucaucaccucccucggcgccaucgucuccugcuacggcaagaccaagugcaccgccuccaacaagaaccgcggcaucaucaagaccuucuccaacggcugcgacuacgucuccaacaagggcgucgacaccgucuccgucggcaacacccucuacuacgucaacaagcaggagggcaagucccucuacgucaagggcgagcccaucaucaacuucuacgacccccucgucuuccccuccgacgaguucgacgccuccaucucccaggucaacgagaagaucaaccagucccucgccuucauccgcaaguccgacgagcuccuccacaacgucaacgucggcaaguccaccaccaacaucaugaucaccaccaucaucaucgucaucaucgucauccuccuccuccucaucgccgucggccucuuccucuacugcaaggcccgcugaggacuagugaagggaacacccaaauuuaauucagccuuaagcacaauuaauuaagagugaaacguaauuguacaagcaguuggucacccaccauagggcaugaucaacaccgcaaccuuuccuuuuucccccagugauucugaaaaaccccucuucccuucagcuugcuuagauguuccaaauuuaguaagcuuaaggcggccuacagaagaaaaagaaaaaaaaggccacaaaaguucccucucacuuucaguaaauaaaauaaaagcagcaacagaaauaaagaaauaaaugaaauucaaaaugaaauaaauauuguguugugcagcauuaaaaaaucaauaaaaauuaaaaaugagcaagaucuaaaaaaaaaaaaaaaaaaaaaaaaaaaaaaaaaaaaaaaaaaaaaaaaaaaaaaaaaaaaaaaaugcaucccccccccccccccccccccccccccccccaaaggcucuuuucagagccaccagaauu

SEQ ID NO: 13719 - RNA, 2214 nt, Artificial Sequence
  mRNA product Design d-3 comprising derived and/or modified sequence from HRSV(Memphis-37)__AIY60640.1__F-del_DSCav1_mut0 (opt3)
gggagagggcgcuuggcuugcaaggacccugagcugcggcauugaagcacacccaacccaacucgacugaagucagccucacugaaccggaucugagaaucuucucucucugggcuugccagggcucuccgaaccuagcuagcauccucuucaauuccaacuagaaagcuuaccauggagcugcccauccucaagaccaacgccauuacaacuauacuugcugcagugacgcugugcuucgccagcucccagaauaucaccgaagaguuuuaccaaucuacauguucagcggucaguaaaggcuauuugagcgcuuuaagaacugggugguacaccuccguuauuacaaucgaacugucuaacauuaaggagaauaaaugcaacggaaccgacgccaaggugaaacuaaucaagcaggaacucgauaaguauaaaaaugcaguaacugagcugcagcuucugaugcagucgaccccugccgcugguucaggcagcgcaauagccagugggaucgcuguguguaaggucuugcaccucgagggagaagugaacaaaauuaagaaugcccugcuguccacaaacaaagcgguugugucucucagcaauggcgucuccguguuaacguucaagguacuggaccuuaagaacuacaucgauaaacaauugcugccaauucuaaauaagcagucaugcaguaucagcaacauagagacuguuauugaauuucagcagaaaaauaacaggcuccuggagaucacccgggaguucucugugaaugccggugucacaacuccgguguccaccuauaugcuuacaaacucagaacuguugagccucauuaacgacaugcccaucaccaaugaucaaaagaaacugaugaguaacaaugugcagaucguccgccagcagucuuacuccauuauguguauaaucaaggaggaaguuuuagcauaugugguacaacugccucucuacggggugauugacacgccaugcuggaaacuucauacuagcccccuguguacaaccaacacuaaggagggaucgaauaucugcuugacacgaaccgaucguggcugguacugugacaacgcuggcucugucuccuuuuucccucaggccgaaacgugcaaggugcagucaaauagaguguuuugugauaccaugaacaguagaacacugccaagcgaggugaaucucugcaacauagacauuuucaaucccaaauaugauugcaagaucaugacuuccaaaaccgacgucucuagcucagugaucacaagucugggggcaauuguauccuguuacggaaagacuaaaugcaccgcuagcaacaagaauagggguaucauuaagacauuuucuaacggcugugauuauguuucaaauaaagggguggacaccgucagugugggaaacacucuuuacuaugucaacaagcaagagggcaaaagccuguacgugaagggugaaccuauaaucaauuucuaugacccauugguuuuuccguccgaugaguucgacgccucuauuucgcagguuaacgagaaaaucaaucagagccucgcguuuauccggaaguccgaugaacuguuacacaacguaaaugucgggaagucaacgacaaacauuaugauaaccacuaucauuaucgugauuaucguuauacugcuacuccugaucgccgugggacuuuucuuguacugcaaagcacgcugaggacuagugaagggaacacccaaauuuaauucagccuuaagcacaauuaauuaagagugaaacguaauuguacaagcaguuggucacccaccauagggcaugaucaacaccgcaaccuuuccuuuuucccccagugauucugaaaaaccccucuucccuucagcuugcuuagauguuccaaauuuaguaagcuuaaggcggccuacagaagaaaaagaaaaaaaaggccacaaaaguucccucucacuuucaguaaauaaaauaaaagcagcaacagaaauaaagaaauaaaugaaauucaaaaugaaauaaauauuguguugugcagcauuaaaaaaucaauaaaaauuaaaaaugagcaagaucuaaaaaaaaaaaaaaaaaaaaaaaaaaaaaaaaaaaaaaaaaaaaaaaaaaaaaaaaaaaaaaaaugcaucccccccccccccccccccccccccccccccaaaggcucuuuucagagccaccagaauu

SEQ ID NO: 13720 - RNA, 2214 nt, Artificial Sequence
  mRNA product Design d-3 comprising derived and/or modified sequence from HRSV(Memphis-37)__AIY60640.1__F-del_DSCav1_mut0 (opt4)
gggagagggcgcuuggcuugcaaggacccugagcugcggcauugaagcacacccaacccaacucgacugaagucagccucacugaaccggaucugagaaucuucucucucugggcuugccagggcucuccgaaccuagcuagcauccucuucaauuccaacuagaaagcuuaccauggagcugcccauccugaagaccaacgccaucaccaccauccuggccgccgugacccugugcuucgccagcagccagaacaucaccgaggaguucuaccagagcaccugcagcgccgugagcaagggcuaccugagcgcccugagaaccggcugguacaccagcgugaucaccaucgagcugagcaacaucaaggagaacaagugcaacggcaccgacgccaaggugaagcugaucaagcaggagcuggacaaguacaagaacgccgugaccgagcugcagcugcugaugcagagcacccccgccgccggcagcggcagcgccaucgccagcggcaucgccgugugcaaggugcugcaccuggagggcgaggugaacaagaucaagaacgcccugcugagcaccaacaaggccguggugagccugagcaacggcgugagcgugcugaccuucaaggugcuggaccugaagaacuacaucgacaagcagcugcugcccauccugaacaagcagagcugcagcaucagcaacaucgagaccgugaucgaguuccagcagaagaacaacagacugcuggagaucaccagagaguucagcgugaacgccggcgugaccacccccgugagcaccuacaugcugaccaacagcgagcugcugagccugaucaacgacaugcccaucaccaacgaccagaagaagcugaugagcaacaacgugcagaucgugagacagcagagcuacagcaucaugugcaucaucaaggaggaggugcuggccuacguggugcagcugccccuguacggcgugaucgacacccccugcuggaagcugcacaccagcccccugugcaccaccaacaccaaggagggcagcaacaucugccugaccagaaccgacagaggcugguacugcgacaacgccggcagcgugagcuucuucccccaggccgagaccugcaaggugcagagcaacagaguguucugcgacaccaugaacagcagaacccugcccagcgaggugaaccugugcaacaucgacaucuucaaccccaaguacgacugcaagaucaugaccagcaagaccgacgugagcagcagcgugaucaccagccugggcgccaucgugagcugcuacggcaagaccaagugcaccgccagcaacaagaacagaggcaucaucaagaccuucagcaacggcugcgacuacgugagcaacaagggcguggacaccgugagcgugggcaacacccuguacuacgugaacaagcaggagggcaagagccuguacgugaagggcgagcccaucaucaacuucuacgacccccugguguuccccagcgacgaguucgacgccagcaucagccaggugaacgagaagaucaaccagagccuggccuucaucagaaagagcgacgagcugcugcacaacgugaacgugggcaagagcaccaccaacaucaugaucaccaccaucaucaucgugaucaucgugauccugcugcugcugaucgccgugggccuguuccuguacugcaaggccagaugaggacuagugaagggaacacccaaauuuaauucagccuuaagcacaauuaauuaagagugaaacguaauuguacaagcaguuggucacccaccauagggcaugaucaacaccgcaaccuuuccuuuuucccccagugauucugaaaaaccccucuucccuucagcuugcuuagauguuccaaauuuaguaagcuuaaggcggccuacagaagaaaaagaaaaaaaaggccacaaaaguucccucucacuuucaguaaauaaaauaaaagcagcaacagaaauaaagaaauaaaugaaauucaaaaugaaauaaauauuguguugugcagcauuaaaaaaucaauaaaaauuaaaaaugagcaagaucuaaaaaaaaaaaaaaaaaaaaaaaaaaaaaaaaaaaaaaaaaaaaaaaaaaaaaaaaaaaaaaaaugcaucccccccccccccccccccccccccccccccaaaggcucuuuucagagccaccagaauu

SEQ ID NO: 13721 - RNA, 2214 nt, Artificial Sequence
  mRNA product Design d-3 comprising derived and/or modified sequence from HRSV(Memphis-37)__AIY60640.1__F-del_DSCav1_mut0 (opt5)
gggagagggcgcuuggcuugcaaggacccugagcugcggcauugaagcacacccaacccaacucgacugaagucagccucacugaaccggaucugagaaucuucucucucugggcuugccagggcucuccgaaccuagcuagcauccucuucaauuccaacuagaaagcuuaccauggagcugcccauccucaagaccaacgccauuacaacgauccuggcugccgugacccuuugcuucgcgagcucccagaauauuacagaagaguuuuaccaaucuaccuguagcgcugucuccaaaggcuaucugucugcccucagaacagggugguacaccagcguuaucacaauugaacuguccaacaucaaggagaauaaaugcaacggaaccgacgccaaggugaaacuuaucaagcaggaacuggauaaguauaaaaaugcugugacggagcuccagcugcugaugcagucuaccccugccgcuggcagcggguccgccauugcgagcggaaucgccgucuguaaggugcuccaccuggagggcgaaguuaacaaaauuaagaaugcccuucugucuacaaacaaagcuguggucucccucagcaauggggugucuguucugaccuucaaggugcuugaccugaagaacuacaucgauaaacaacuccugccgauucugaauaagcaguccugcagcaucucuaacauugagacagucaucgaauuucagcagaaaaauaaccggcuccuggagaucacccgcgaguucuccgugaaugcuggagugacgacacccgucagcaccuauaugcuuacaaacuccgaacugcucucucugauuaacgacaugccuaucaccaaugaucaaaagaaacuuaugagcaacaauguucagauugugagacagcaguccuacagcaucauguguauuaucaaggaggaagugcuggccuaugucgugcaacucccccuguacggcguuaucgacaccccuugcuggaaacugcauacaucuccccucuguacgaccaacacaaaggagggcuccaauauuugccugacccggacagaucgcgggugguacugugacaacgcgggaagcgugagcuuuuucccucaggccgaaaccugcaagguccagucuaauagaguguuuugugauacgaugaacuccagaacacugccgucugagguuaaucucugcaacaucgacauuuucaaucccaaauaugauugcaagaucaugaccagcaaaaccgacguguccagcucugucauuacaucccugggcgcuaucgugagcuguuacgggaagaccaaaugcacagccucuaacaagaaucggggaaucauuaagacguuuuccaacggcugugauuaugucagcaauaaagggguggacaccguuuccgugggaaacacacuuuacuaugucaacaagcaagagggcaaaucucuguacgugaagggcgaaccuaucauuaauuucuaugacccccucguuuuuccuagcgaugaguucgacgcuuccaucucucaggugaacgaaaagauuaaucagagccuggccuuuauccgcaaguccgaugagcugcuccacaacgucaauguggggaaaagcaccacaaacauuaugaucaccacgaucauuaucgugauuaucguuauucugcuucugcucaucgccgucggacuguuccuguacugcaaagcuagaugaggacuagugaagggaacacccaaauuuaauucagccuuaagcacaauuaauuaagagugaaacguaauuguacaagcaguuggucacccaccauagggcaugaucaacaccgcaaccuuuccuuuuucccccagugauucugaaaaaccccucuucccuucagcuugcuuagauguuccaaauuuaguaagcuuaaggcggccuacagaagaaaaagaaaaaaaaggccacaaaaguucccucucacuuucaguaaauaaaauaaaagcagcaacagaaauaaagaaauaaaugaaauucaaaaugaaauaaauauuguguugugcagcauuaaaaaaucaauaaaaauuaaaaaugagcaagaucuaaaaaaaaaaaaaaaaaaaaaaaaaaaaaaaaaaaaaaaaaaaaaaaaaaaaaaaaaaaaaaaaugcaucccccccccccccccccccccccccccccccaaaggcucuuuucagagccaccagaauu

SEQ ID NO: 13722 - RNA, 2214 nt, Artificial Sequence
  mRNA product Design d-3 comprising derived and/or modified sequence from HRSV(Memphis-37)__AIY60640.1__F-del_DSCav1_mut0 (opt6)
gggagagggcgcuuggcuugcaaggacccugagcugcggcauugaagcacacccaacccaacucgacugaagucagccucacugaaccggaucugagaaucuucucucucugggcuugccagggcucuccgaaccuagcuagcauccucuucaauuccaacuagaaagcuuaccauggaacucccaauacuuaaaacaaacgcaaucacaacaauacuagcugcagucacacuaugcuucgccucaucacaaaauauaacagaagaauuuuaucaaucaacaugcuccgcaguaucaaaaggauaucucucugcauuacgaacagguugguacaccucgguaauaacaauagaauuaucaaacauaaaagaaaauaaaugcaauggaaccgaugccaaaguaaaacuaaucaaacaagaacuugacaaauacaaaaacgcaguaacagaacuacaacuauuaaugcaaucaacaccagcagcagguucaggcuccgcaaucgcuucaggaauagccguuuguaaaguacuacacuuagaaggagaaguaaauaaaauaaaaaacgccuuacuaucaacaaacaaagcaguagucucccuuuccaacggaguaucagucuuaacuuuuaaaguacucgacuuaaaaaauuacaucgacaaacaacuacuacccauucuaaauaaacaaucaugcucaauaucaaacaucgaaacaguaaucgaauuucaacaaaaaaauaauagauuacuagaaauaacacgagaauuuuccguaaaugccggaguaacgaccccagucucaacauacauguuaacaaacucagaauuacuaucacucauuaacgauaugccaauaacaaaugaccaaaaaaaacuaaugucaaacaacguccaaauaguacgacaacaaucauacucuaucauguguauaauaaaagaagaaguuuuagcauacguaguacaacuaccacuuuacggagucauagacaccccaugcuggaaacuacacacaucacccuuauguacaacaaacaccaaagaagggucuaacauaugucucacuagaacagaucgaggcugguacugcgacaacgcaggaucaguuagcuuuuucccucaagccgaaaccuguaaaguacaauccaaucgaguauuuugcgacacuaugaacucuagaaccuuacccuccgaaguaaaccuauguaacauagacauauuuaaucccaaauaugauugcaaaaucaugacauccaaaacagauguaucaagcucuguaauaaccucacuaggagcaauaguuucaugcuaugguaaaacaaaaugcaccgccucaaacaaaaauagagggauaaucaaaaccuucucaaauggaugcgacuacguaucaaauaaaggaguagacaccgucuccguaggaaacacacuauacuacguaaacaaacaagaaggaaaaucacuauacguaaaaggagaaccaaucauaaacuucuacgacccacuuguuuucccaucagaugaauuugaugccuccauaucacaaguaaacgaaaaaauaaaccaaucucuagccuucaucagaaaauccgacgaacuuuuacacaacguaaacguagguaaaucaacaaccaacaucaugauaacaacaauaauaauaguaauaauuguaauacuuuuacuacuuaucgccguaggccuauucuuauauuguaaagcaagaugaggacuagugaagggaacacccaaauuuaauucagccuuaagcacaauuaauuaagagugaaacguaauuguacaagcaguuggucacccaccauagggcaugaucaacaccgcaaccuuuccuuuuucccccagugauucugaaaaaccccucuucccuucagcuugcuuagauguuccaaauuuaguaagcuuaaggcggccuacagaagaaaaagaaaaaaaaggccacaaaaguucccucucacuuucaguaaauaaaauaaaagcagcaacagaaauaaagaaauaaaugaaauucaaaaugaaauaaauauuguguugugcagcauuaaaaaaucaauaaaaauuaaaaaugagcaagaucuaaaaaaaaaaaaaaaaaaaaaaaaaaaaaaaaaaaaaaaaaaaaaaaaaaaaaaaaaaaaaaaaugcaucccccccccccccccccccccccccccccccaaaggcucuuuucagagccaccagaauu

SEQ ID NO: 13723 - RNA, 2214 nt, Artificial Sequence
  mRNA product Design d-3 comprising derived and/or modified sequence from HRSV(Memphis-37)__AIY60640.1__F-del_DSCav1_mut0 (opt11)
gggagagggcgcuuggcuugcaaggacccugagcugcggcauugaagcacacccaacccaacucgacugaagucagccucacugaaccggaucugagaaucuucucucucugggcuugccagggcucuccgaaccuagcuagcauccucuucaauuccaacuagaaagcuuaccauggaacuaccaauccucaaaaccaacgccaucacuacaauccuagccgcgguaacccugugcuucgccuccucacaaaacaucacagaagaauuuuaccaaucaaccugcuccgccguauccaaaggauaccugagcgcccugagaaccggcugguacaccuccgucaucaccauagaacucuccaacaucaaagaaaacaaaugcaacgguacggacgccaaaguuaaacucaucaaacaagaacuugacaaauacaagaacgccgucacagaacugcaacuccucaugcaauccacccccgccgccggcuccggcuccgccauagccuccggcaucgccgucugcaaagucuuacaccuagaaggcgaagucaacaaaaucaaaaacgcacuacuuuccacaaacaaagccgucgucucacucuccaacggcguauccguccucaccuucaaaguacuugaccucaaaaacuacaucgacaaacaacuacuccccauccugaacaaacaauccugcucaaucuccaacaucgaaaccguaaucgaguuccaacagaaaaauaaucgccuccuggagaucacccgcgaguucuccgucaaugcaggagucacaaccccaguaucaaccuacaugcucaccaacuccgaacuccugucgcucaucaacgacaugcccaucacaaacgaccaaaagaaacucauguccaacaacguacaaaucgucagacaacaauccuauucuauaaugugcaucaucaaagaagaaguccucgccuacgucguacaacucccccucuacggcguuaucgacacccccugcuggaaacuccacaccucaccccucugcaccaccaacacaaaagaaggcuccaacaucugccucacucggaccgaccgcggcugguacugcgacaaugccggcagcgucuccuucuucccacaagccgaaaccugcaaaguccaguccaaccgcguauucugcgacacuaugaacuccagaacccuccccuccgaaguaaaccucugcaacaucgacaucuucaacccaaaauacgacugcaaaaucaugaccucaaaaaccgacgucagcucgucagucauaaccagccucggagccauagucucaugcuacggaaaaaccaaaugcaccgccagcaacaaaaaccgcggcauaauaaaaacauucuccaacggcugcgacuauguauccaacaaaggagucgauaccgucuccguaggcaacacccuauacuacgucaacaaacaagaaggcaaaucccucuacgucaaaggugaaccaaucaucaacuucuacgacccucucgucuuccccuccgaugaguucgacgccucaaucagccaaguaaacgaaaagauaaaccaaucacucgccuucauccgcaaauccgacgaacuucuucacaacgucaacgucggcaaaucuaccaccaacauaaugauaaccaccaucaucaucgucaucaucguaauacuccuccuucucaucgccgucggccuauuccuauacugcaaagcccgcuagggacuagugaagggaacacccaaauuuaauucagccuuaagcacaauuaauuaagagugaaacguaauuguacaagcaguuggucacccaccauagggcaugaucaacaccgcaaccuuuccuuuuucccccagugauucugaaaaaccccucuucccuucagcuugcuuagauguuccaaauuuaguaagcuuaaggcggccuacagaagaaaaagaaaaaaaaggccacaaaaguucccucucacuuucaguaaauaaaauaaaagcagcaacagaaauaaagaaauaaaugaaauucaaaaugaaauaaauauuguguugugcagcauuaaaaaaucaauaaaaauuaaaaaugagcaagaucuaaaaaaaaaaaaaaaaaaaaaaaaaaaaaaaaaaaaaaaaaaaaaaaaaaaaaaaaaaaaaaaaugcaucccccccccccccccccccccccccccccccaaaggcucuuuucagagccaccagaauu

SEQ ID NO: 13724 - RNA, 1897 nt, Artificial Sequence
  mRNA product Design d-4 comprising derived and/or modified sequence from HRSV(Memphis-37)__AIY60640.1__F-del_DSCav1_mut0 (opt1)
gggagagucccgcagucggcguccagcggcucugcuuguucgugugugugucguugcaggccuuauucaagcuuaccauggagcugcccauccucaagaccaacgccaucaccacgauccuggccgcggugacccugugcuucgccagcucccagaacaucaccgaggaguucuaccagagcacgugcuccgccgucagcaagggcuaccucuccgcccugcgcaccgggugguacaccagcgugaucaccaucgagcuguccaacaucaaggagaacaagugcaacggcaccgacgccaaggugaagcucaucaagcaggagcuggacaaguacaagaacgcggucacggagcugcagcuccugaugcagagcaccccggccgccggcuccgggagcgcgaucgccuccggcaucgccgucugcaaggugcugcaccucgagggcgaggugaacaagaucaagaacgcccugcuguccaccaacaaggccgucgugagccucuccaacggggugagcguccugaccuucaaggugcuggaccucaagaacuacaucgacaagcagcugcugcccauccugaacaagcagagcugcuccaucagcaacaucgagaccgucaucgaguuccagcagaagaacaaccgccuccuggagaucacgcgggaguucagcgugaacgcgggcgugaccacccccgucuccaccuacaugcugacgaacagcgagcuccugucccugaucaacgacaugccgaucaccaacgaccagaagaagcucaugagcaacaacgugcagaucgugcgccagcaguccuacagcaucaugugcaucaucaaggaggagguccuggccuacguggugcagcugccccucuacggggucaucgacacccccugcuggaagcugcacaccagcccccugugcacgaccaacaccaaggagggcuccaacaucugccucacccggacggaccgcgggugguacugcgacaacgccggcagcguguccuucuucccgcaggccgagaccugcaagguccagagcaaccggguguucugcgacaccaugaacucccggacccugcccagcgaggugaaccucugcaacaucgacaucuucaaccccaaguacgacugcaagaucaugacguccaagaccgacgucagcuccagcgugaucaccucccugggcgccaucgugagcugcuacgggaagaccaagugcacggcgagcaacaagaaccgcggcaucaucaagaccuucuccaacgggugcgacuacgucagcaacaagggcguggacaccguguccgucggcaacacccuguacuacgugaacaagcaggagggcaagagccucuacgugaagggggagcccaucaucaacuucuacgacccgcuggucuuccccuccgacgaguucgacgccagcaucucccaggugaacgagaagaucaaccagagccuggccuucauccggaaguccgacgagcuccugcacaacgugaacgucggcaagagcaccacgaacaucaugaucaccaccaucaucaucgugaucaucgugauccugcugcuccugaucgccgucgggcuguuccucuacugcaaggcccgcugaggacuaguggaagcauuuuccuggcugauuaaaagaaauuacucagcuauggucaucuguuccuguuagaaggcuaugcagcauauuauauacuaugcgcauguuaugaaaugcauaauaaaaaauuuuaaaaaaucuaaaagaucuaaaaaaaaaaaaaaaaaaaaaaaaaaaaaaaaaaaaaaaaaaaaaaaaaaaaaaaaaaaaaaaaugcaucccccccccccccccccccccccccccccccaaaggcucuuuucagagccaccagaauu

SEQ ID NO: 13725 - RNA, 1897 nt, Artificial Sequence
  mRNA product Design d-4 comprising derived and/or modified sequence from HRSV(Memphis-37)__AIY60640.1__F-del_DSCav1_mut0 (opt1)
gggagagucccgcagucggcguccagcggcucugcuuguucgugugugugucguugcaggccuuauucaagcuuaccauggagcugcccauccucaagaccaacgccaucaccacgauccuggccgcggugacccugugcuucgccagcucccagaacaucaccgaggaguucuaccagagcacgugcuccgccgucagcaagggcuaccucuccgcccugcgcaccgggugguacaccagcgugaucaccaucgagcuguccaacaucaaggagaacaagugcaacggcaccgacgccaaggugaagcucaucaagcaggagcuggacaaguacaagaacgcggucacggagcugcagcuccugaugcagagcaccccggccgccggguccggcagcgccaucgcguccgggaucgccgugugcaaggugcugcaccucgagggcgaggucaacaagaucaagaacgcccugcugagcaccaacaaggccguggugucccucagcaacggcgucuccgugcugaccuucaaggugcuggaccucaagaacuacaucgacaagcagcugcugcccauccucaacaagcagagcugcuccaucagcaacaucgagacggucaucgaguuccagcagaagaacaaccggcugcuggagaucacccgcgaguucuccgugaacgccggggugaccacccccgucagcacguacaugcucaccaacagcgagcugcugucccucaucaacgacaugcccaucaccaacgaccagaagaagcugaugagcaacaacgugcagaucgugcggcagcaguccuacagcaucaugugcaucaucaaggaggagguccuggcguacguggugcagcucccgcuguacggcgucaucgacacccccugcuggaagcugcacacgagcccccucugcaccaccaacaccaaggagggguccaacaucugccugacgcgcaccgaccggggcugguacugcgacaacgccggguccgugagcuucuucccccaggccgagaccugcaaggugcaguccaaccgcgucuucugcgacaccaugaacagccggacgcucccguccgaggugaaccugugcaacaucgacaucuucaaccccaaguacgacugcaagaucaugaccagcaagaccgacgucuccagcuccgugaucaccagccugggcgccaucguguccugcuacggcaagacgaagugcaccgccagcaacaagaaccgggggaucaucaagaccuucuccaacggcugcgacuacgucagcaacaaggggguggacaccgugagcgucggcaacacgcucuacuacgugaacaagcaggagggcaagucccuguacgugaagggggagcccaucaucaacuucuacgacccccuggucuucccgagcgacgaguucgacgcguccaucagccaggugaacgagaagaucaaccagucccucgccuucauccgcaagagcgacgagcugcugcacaacgugaacgucggcaaguccaccaccaacaucaugaucaccaccaucaucaucgugaucaucgugauccuccugcugcucaucgccgucgggcuguuccuguacugcaaggcccggugaggacuaguggaagcauuuuccuggcugauuaaaagaaauuacucagcuauggucaucuguuccuguuagaaggcuaugcagcauauuauauacuaugcgcauguuaugaaaugcauaauaaaaaauuuuaaaaaaucuaaaagaucuaaaaaaaaaaaaaaaaaaaaaaaaaaaaaaaaaaaaaaaaaaaaaaaaaaaaaaaaaaaaaaaaugcaucccccccccccccccccccccccccccccccaaaggcucuuuucagagccaccagaauu

SEQ ID NO: 13726 - RNA, 1897 nt, Artificial Sequence
  mRNA product Design d-4 comprising derived and/or modified sequence from HRSV(Memphis-37)__AIY60640.1__F-del_DSCav1_mut0 (opt2)
gggagagucccgcagucggcguccagcggcucugcuuguucgugugugugucguugcaggccuuauucaagcuuaccauggagcuccccauccucaagaccaacgccaucaccaccauccucgccgccgucacccucugcuucgccuccucccagaacaucaccgaggaguucuaccaguccaccugcuccgccgucuccaagggcuaccucuccgcccuccgcaccggcugguacaccuccgucaucaccaucgagcucuccaacaucaaggagaacaagugcaacggcaccgacgccaaggucaagcucaucaagcaggagcucgacaaguacaagaacgccgucaccgagcuccagcuccucaugcaguccacccccgccgccggcuccggcuccgccaucgccuccggcaucgccgucugcaagguccuccaccucgagggcgaggucaacaagaucaagaacgcccuccucuccaccaacaaggccgucgucucccucuccaacggcgucuccguccucaccuucaagguccucgaccucaagaacuacaucgacaagcagcuccuccccauccucaacaagcaguccugcuccaucuccaacaucgagaccgucaucgaguuccagcagaagaacaaccgccuccucgagaucacccgcgaguucuccgucaacgccggcgucaccacccccgucuccaccuacaugcucaccaacuccgagcuccucucccucaucaacgacaugcccaucaccaacgaccagaagaagcucauguccaacaacguccagaucguccgccagcaguccuacuccaucaugugcaucaucaaggaggagguccucgccuacgucguccagcucccccucuacggcgucaucgacacccccugcuggaagcuccacaccuccccccucugcaccaccaacaccaaggagggcuccaacaucugccucacccgcaccgaccgcggcugguacugcgacaacgccggcuccgucuccuucuucccccaggccgagaccugcaagguccaguccaaccgcgucuucugcgacaccaugaacucccgcacccuccccuccgaggucaaccucugcaacaucgacaucuucaaccccaaguacgacugcaagaucaugaccuccaagaccgacgucuccuccuccgucaucaccucccucggcgccaucgucuccugcuacggcaagaccaagugcaccgccuccaacaagaaccgcggcaucaucaagaccuucuccaacggcugcgacuacgucuccaacaagggcgucgacaccgucuccgucggcaacacccucuacuacgucaacaagcaggagggcaagucccucuacgucaagggcgagcccaucaucaacuucuacgacccccucgucuuccccuccgacgaguucgacgccuccaucucccaggucaacgagaagaucaaccagucccucgccuucauccgcaaguccgacgagcuccuccacaacgucaacgucggcaaguccaccaccaacaucaugaucaccaccaucaucaucgucaucaucgucauccuccuccuccucaucgccgucggccucuuccucuacugcaaggcccgcugaggacuaguggaagcauuuuccuggcugauuaaaagaaauuacucagcuauggucaucuguuccuguuagaaggcuaugcagcauauuauauacuaugcgcauguuaugaaaugcauaauaaaaaauuuuaaaaaaucuaaaagaucuaaaaaaaaaaaaaaaaaaaaaaaaaaaaaaaaaaaaaaaaaaaaaaaaaaaaaaaaaaaaaaaaugcaucccccccccccccccccccccccccccccccaaaggcucuuuucagagccaccagaauu

SEQ ID NO: 13727 - RNA, 1897 nt, Artificial Sequence
  mRNA product Design d-4 comprising derived and/or modified sequence from HRSV(Memphis-37)__AIY60640.1__F-del_DSCav1_mut0 (opt3)
gggagagucccgcagucggcguccagcggcucugcuuguucgugugugugucguugcaggccuuauucaagcuuaccauggagcugcccauccucaagaccaacgccauuacaacuauacuugcugcagugacgcugugcuucgccagcucccagaauaucaccgaagaguuuuaccaaucuacauguucagcggucaguaaaggcuauuugagcgcuuuaagaacugggugguacaccuccguuauuacaaucgaacugucuaacauuaaggagaauaaaugcaacggaaccgacgccaaggugaaacuaaucaagcaggaacucgauaaguauaaaaaugcaguaacugagcugcagcuucugaugcagucgaccccugccgcugguucaggcagcgcaauagccagugggaucgcuguguguaaggucuugcaccucgagggagaagugaacaaaauuaagaaugcccugcuguccacaaacaaagcgguugugucucucagcaauggcgucuccguguuaacguucaagguacuggaccuuaagaacuacaucgauaaacaauugcugccaauucuaaauaagcagucaugcaguaucagcaacauagagacuguuauugaauuucagcagaaaaauaacaggcuccuggagaucacccgggaguucucugugaaugccggugucacaacuccgguguccaccuauaugcuuacaaacucagaacuguugagccucauuaacgacaugcccaucaccaaugaucaaaagaaacugaugaguaacaaugugcagaucguccgccagcagucuuacuccauuauguguauaaucaaggaggaaguuuuagcauaugugguacaacugccucucuacggggugauugacacgccaugcuggaaacuucauacuagcccccuguguacaaccaacacuaaggagggaucgaauaucugcuugacacgaaccgaucguggcugguacugugacaacgcuggcucugucuccuuuuucccucaggccgaaacgugcaaggugcagucaaauagaguguuuugugauaccaugaacaguagaacacugccaagcgaggugaaucucugcaacauagacauuuucaaucccaaauaugauugcaagaucaugacuuccaaaaccgacgucucuagcucagugaucacaagucugggggcaauuguauccuguuacggaaagacuaaaugcaccgcuagcaacaagaauagggguaucauuaagacauuuucuaacggcugugauuauguuucaaauaaagggguggacaccgucagugugggaaacacucuuuacuaugucaacaagcaagagggcaaaagccuguacgugaagggugaaccuauaaucaauuucuaugacccauugguuuuuccguccgaugaguucgacgccucuauuucgcagguuaacgagaaaaucaaucagagccucgcguuuauccggaaguccgaugaacuguuacacaacguaaaugucgggaagucaacgacaaacauuaugauaaccacuaucauuaucgugauuaucguuauacugcuacuccugaucgccgugggacuuuucuuguacugcaaagcacgcugaggacuaguggaagcauuuuccuggcugauuaaaagaaauuacucagcuauggucaucuguuccuguuagaaggcuaugcagcauauuauauacuaugcgcauguuaugaaaugcauaauaaaaaauuuuaaaaaaucuaaaagaucuaaaaaaaaaaaaaaaaaaaaaaaaaaaaaaaaaaaaaaaaaaaaaaaaaaaaaaaaaaaaaaaaugcaucccccccccccccccccccccccccccccccaaaggcucuuuucagagccaccagaauu

SEQ ID NO: 13728 - RNA, 1897 nt, Artificial Sequence
  mRNA product Design d-4 comprising derived and/or modified sequence from HRSV(Memphis-37)__AIY60640.1__F-del_DSCav1_mut0 (opt4)
gggagagucccgcagucggcguccagcggcucugcuuguucgugugugugucguugcaggccuuauucaagcuuaccauggagcugcccauccugaagaccaacgccaucaccaccauccuggccgccgugacccugugcuucgccagcagccagaacaucaccgaggaguucuaccagagcaccugcagcgccgugagcaagggcuaccugagcgcccugagaaccggcugguacaccagcgugaucaccaucgagcugagcaacaucaaggagaacaagugcaacggcaccgacgccaaggugaagcugaucaagcaggagcuggacaaguacaagaacgccgugaccgagcugcagcugcugaugcagagcacccccgccgccggcagcggcagcgccaucgccagcggcaucgccgugugcaaggugcugcaccuggagggcgaggugaacaagaucaagaacgcccugcugagcaccaacaaggccguggugagccugagcaacggcgugagcgugcugaccuucaaggugcuggaccugaagaacuacaucgacaagcagcugcugcccauccugaacaagcagagcugcagcaucagcaacaucgagaccgugaucgaguuccagcagaagaacaacagacugcuggagaucaccagagaguucagcgugaacgccggcgugaccacccccgugagcaccuacaugcugaccaacagcgagcugcugagccugaucaacgacaugcccaucaccaacgaccagaagaagcugaugagcaacaacgugcagaucgugagacagcagagcuacagcaucaugugcaucaucaaggaggaggugcuggccuacguggugcagcugccccuguacggcgugaucgacacccccugcuggaagcugcacaccagcccccugugcaccaccaacaccaaggagggcagcaacaucugccugaccagaaccgacagaggcugguacugcgacaacgccggcagcgugagcuucuucccccaggccgagaccugcaaggugcagagcaacagaguguucugcgacaccaugaacagcagaacccugcccagcgaggugaaccugugcaacaucgacaucuucaaccccaaguacgacugcaagaucaugaccagcaagaccgacgugagcagcagcgugaucaccagccugggcgccaucgugagcugcuacggcaagaccaagugcaccgccagcaacaagaacagaggcaucaucaagaccuucagcaacggcugcgacuacgugagcaacaagggcguggacaccgugagcgugggcaacacccuguacuacgugaacaagcaggagggcaagagccuguacgugaagggcgagcccaucaucaacuucuacgacccccugguguuccccagcgacgaguucgacgccagcaucagccaggugaacgagaagaucaaccagagccuggccuucaucagaaagagcgacgagcugcugcacaacgugaacgugggcaagagcaccaccaacaucaugaucaccaccaucaucaucgugaucaucgugauccugcugcugcugaucgccgugggccuguuccuguacugcaaggccagaugaggacuaguggaagcauuuuccuggcugauuaaaagaaauuacucagcuauggucaucuguuccuguuagaaggcuaugcagcauauuauauacuaugcgcauguuaugaaaugcauaauaaaaaauuuuaaaaaaucuaaaagaucuaaaaaaaaaaaaaaaaaaaaaaaaaaaaaaaaaaaaaaaaaaaaaaaaaaaaaaaaaaaaaaaaugcaucccccccccccccccccccccccccccccccaaaggcucuuuucagagccaccagaauu

SEQ ID NO: 13729 - RNA, 1897 nt, Artificial Sequence
  mRNA product Design d-4 comprising derived and/or modified sequence from HRSV(Memphis-37)__AIY60640.1__F-del_DSCav1_mut0 (opt5)
gggagagucccgcagucggcguccagcggcucugcuuguucgugugugugucguugcaggccuuauucaagcuuaccauggagcugcccauccucaagaccaacgccauuacaacgauccuggcugccgugacccuuugcuucgcgagcucccagaauauuacagaagaguuuuaccaaucuaccuguagcgcugucuccaaaggcuaucugucugcccucagaacagggugguacaccagcguuaucacaauugaacuguccaacaucaaggagaauaaaugcaacggaaccgacgccaaggugaaacuuaucaagcaggaacuggauaaguauaaaaaugcugugacggagcuccagcugcugaugcagucuaccccugccgcuggcagcggguccgccauugcgagcggaaucgccgucuguaaggugcuccaccuggagggcgaaguuaacaaaauuaagaaugcccuucugucuacaaacaaagcuguggucucccucagcaauggggugucuguucugaccuucaaggugcuugaccugaagaacuacaucgauaaacaacuccugccgauucugaauaagcaguccugcagcaucucuaacauugagacagucaucgaauuucagcagaaaaauaaccggcuccuggagaucacccgcgaguucuccgugaaugcuggagugacgacacccgucagcaccuauaugcuuacaaacuccgaacugcucucucugauuaacgacaugccuaucaccaaugaucaaaagaaacuuaugagcaacaauguucagauugugagacagcaguccuacagcaucauguguauuaucaaggaggaagugcuggccuaugucgugcaacucccccuguacggcguuaucgacaccccuugcuggaaacugcauacaucuccccucuguacgaccaacacaaaggagggcuccaauauuugccugacccggacagaucgcgggugguacugugacaacgcgggaagcgugagcuuuuucccucaggccgaaaccugcaagguccagucuaauagaguguuuugugauacgaugaacuccagaacacugccgucugagguuaaucucugcaacaucgacauuuucaaucccaaauaugauugcaagaucaugaccagcaaaaccgacguguccagcucugucauuacaucccugggcgcuaucgugagcuguuacgggaagaccaaaugcacagccucuaacaagaaucggggaaucauuaagacguuuuccaacggcugugauuaugucagcaauaaagggguggacaccguuuccgugggaaacacacuuuacuaugucaacaagcaagagggcaaaucucuguacgugaagggcgaaccuaucauuaauuucuaugacccccucguuuuuccuagcgaugaguucgacgcuuccaucucucaggugaacgaaaagauuaaucagagccuggccuuuauccgcaaguccgaugagcugcuccacaacgucaauguggggaaaagcaccacaaacauuaugaucaccacgaucauuaucgugauuaucguuauucugcuucugcucaucgccgucggacuguuccuguacugcaaagcuagaugaggacuaguggaagcauuuuccuggcugauuaaaagaaauuacucagcuauggucaucuguuccuguuagaaggcuaugcagcauauuauauacuaugcgcauguuaugaaaugcauaauaaaaaauuuuaaaaaaucuaaaagaucuaaaaaaaaaaaaaaaaaaaaaaaaaaaaaaaaaaaaaaaaaaaaaaaaaaaaaaaaaaaaaaaaugcaucccccccccccccccccccccccccccccccaaaggcucuuuucagagccaccagaauu

SEQ ID NO: 13730 - RNA, 1897 nt, Artificial Sequence
  mRNA product Design d-4 comprising derived and/or modified sequence from HRSV(Memphis-37)__AIY60640.1__F-del_DSCav1_mut0 (opt6)
gggagagucccgcagucggcguccagcggcucugcuuguucgugugugugucguugcaggccuuauucaagcuuaccauggaacucccaauacuuaaaacaaacgcaaucacaacaauacuagcugcagucacacuaugcuucgccucaucacaaaauauaacagaagaauuuuaucaaucaacaugcuccgcaguaucaaaaggauaucucucugcauuacgaacagguugguacaccucgguaauaacaauagaauuaucaaacauaaaagaaaauaaaugcaauggaaccgaugccaaaguaaaacuaaucaaacaagaacuugacaaauacaaaaacgcaguaacagaacuacaacuauuaaugcaaucaacaccagcagcagguucaggcuccgcaaucgcuucaggaauagccguuuguaaaguacuacacuuagaaggagaaguaaauaaaauaaaaaacgccuuacuaucaacaaacaaagcaguagucucccuuuccaacggaguaucagucuuaacuuuuaaaguacucgacuuaaaaaauuacaucgacaaacaacuacuacccauucuaaauaaacaaucaugcucaauaucaaacaucgaaacaguaaucgaauuucaacaaaaaaauaauagauuacuagaaauaacacgagaauuuuccguaaaugccggaguaacgaccccagucucaacauacauguuaacaaacucagaauuacuaucacucauuaacgauaugccaauaacaaaugaccaaaaaaaacuaaugucaaacaacguccaaauaguacgacaacaaucauacucuaucauguguauaauaaaagaagaaguuuuagcauacguaguacaacuaccacuuuacggagucauagacaccccaugcuggaaacuacacacaucacccuuauguacaacaaacaccaaagaagggucuaacauaugucucacuagaacagaucgaggcugguacugcgacaacgcaggaucaguuagcuuuuucccucaagccgaaaccuguaaaguacaauccaaucgaguauuuugcgacacuaugaacucuagaaccuuacccuccgaaguaaaccuauguaacauagacauauuuaaucccaaauaugauugcaaaaucaugacauccaaaacagauguaucaagcucuguaauaaccucacuaggagcaauaguuucaugcuaugguaaaacaaaaugcaccgccucaaacaaaaauagagggauaaucaaaaccuucucaaauggaugcgacuacguaucaaauaaaggaguagacaccgucuccguaggaaacacacuauacuacguaaacaaacaagaaggaaaaucacuauacguaaaaggagaaccaaucauaaacuucuacgacccacuuguuuucccaucagaugaauuugaugccuccauaucacaaguaaacgaaaaaauaaaccaaucucuagccuucaucagaaaauccgacgaacuuuuacacaacguaaacguagguaaaucaacaaccaacaucaugauaacaacaauaauaauaguaauaauuguaauacuuuuacuacuuaucgccguaggccuauucuuauauuguaaagcaagaugaggacuaguggaagcauuuuccuggcugauuaaaagaaauuacucagcuauggucaucuguuccuguuagaaggcuaugcagcauauuauauacuaugcgcauguuaugaaaugcauaauaaaaaauuuuaaaaaaucuaaaagaucuaaaaaaaaaaaaaaaaaaaaaaaaaaaaaaaaaaaaaaaaaaaaaaaaaaaaaaaaaaaaaaaaugcaucccccccccccccccccccccccccccccccaaaggcucuuuucagagccaccagaauu

SEQ ID NO: 13731 - RNA, 1897 nt, Artificial Sequence
  mRNA product Design d-4 comprising derived and/or modified sequence from HRSV(Memphis-37)__AIY60640.1__F-del_DSCav1_mut0 (opt11)
gggagagucccgcagucggcguccagcggcucugcuuguucgugugugugucguugcaggccuuauucaagcuuaccauggaacuaccaauccucaaaaccaacgccaucacuacaauccuagccgcgguaacccugugcuucgccuccucacaaaacaucacagaagaauuuuaccaaucaaccugcuccgccguauccaaaggauaccugagcgcccugagaaccggcugguacaccuccgucaucaccauagaacucuccaacaucaaagaaaacaaaugcaacgguacggacgccaaaguuaaacucaucaaacaagaacuugacaaauacaagaacgccgucacagaacugcaacuccucaugcaauccacccccgccgccggcuccggcuccgccauagccuccggcaucgccgucugcaaagucuuacaccuagaaggcgaagucaacaaaaucaaaaacgcacuacuuuccacaaacaaagccgucgucucacucuccaacggcguauccguccucaccuucaaaguacuugaccucaaaaacuacaucgacaaacaacuacuccccauccugaacaaacaauccugcucaaucuccaacaucgaaaccguaaucgaguuccaacagaaaaauaaucgccuccuggagaucacccgcgaguucuccgucaaugcaggagucacaaccccaguaucaaccuacaugcucaccaacuccgaacuccugucgcucaucaacgacaugcccaucacaaacgaccaaaagaaacucauguccaacaacguacaaaucgucagacaacaauccuauucuauaaugugcaucaucaaagaagaaguccucgccuacgucguacaacucccccucuacggcguuaucgacacccccugcuggaaacuccacaccucaccccucugcaccaccaacacaaaagaaggcuccaacaucugccucacucggaccgaccgcggcugguacugcgacaaugccggcagcgucuccuucuucccacaagccgaaaccugcaaaguccaguccaaccgcguauucugcgacacuaugaacuccagaacccuccccuccgaaguaaaccucugcaacaucgacaucuucaacccaaaauacgacugcaaaaucaugaccucaaaaaccgacgucagcucgucagucauaaccagccucggagccauagucucaugcuacggaaaaaccaaaugcaccgccagcaacaaaaaccgcggcauaauaaaaacauucuccaacggcugcgacuauguauccaacaaaggagucgauaccgucuccguaggcaacacccuauacuacgucaacaaacaagaaggcaaaucccucuacgucaaaggugaaccaaucaucaacuucuacgacccucucgucuuccccuccgaugaguucgacgccucaaucagccaaguaaacgaaaagauaaaccaaucacucgccuucauccgcaaauccgacgaacuucuucacaacgucaacgucggcaaaucuaccaccaacauaaugauaaccaccaucaucaucgucaucaucguaauacuccuccuucucaucgccgucggccuauuccuauacugcaaagcccgcuagggacuaguggaagcauuuuccuggcugauuaaaagaaauuacucagcuauggucaucuguuccuguuagaaggcuaugcagcauauuauauacuaugcgcauguuaugaaaugcauaauaaaaaauuuuaaaaaaucuaaaagaucuaaaaaaaaaaaaaaaaaaaaaaaaaaaaaaaaaaaaaaaaaaaaaaaaaaaaaaaaaaaaaaaaugcaucccccccccccccccccccccccccccccccaaaggcucuuuucagagccaccagaauu

SEQ ID NO: 13732 - RNA, 1994 nt, Artificial Sequence
  mRNA product Design d-5 comprising derived and/or modified sequence from HRSV(Memphis-37)__AIY60640.1__F-del_DSCav1_mut0 (opt1)
gggagagggcgcuuggcuugcaaggacccugagcugcggcauugaagcacacccaacccaacucgacugaagucagccucacugaaccggaucugagaaucuucucucucugggcuugccagggcucuccgaaccuagcuagcauccucuucaauuccaacuagaaagcuuaccauggagcugcccauccucaagaccaacgccaucaccacgauccuggccgcggugacccugugcuucgccagcucccagaacaucaccgaggaguucuaccagagcacgugcuccgccgucagcaagggcuaccucuccgcccugcgcaccgggugguacaccagcgugaucaccaucgagcuguccaacaucaaggagaacaagugcaacggcaccgacgccaaggugaagcucaucaagcaggagcuggacaaguacaagaacgcggucacggagcugcagcuccugaugcagagcaccccggccgccggcuccgggagcgcgaucgccuccggcaucgccgucugcaaggugcugcaccucgagggcgaggugaacaagaucaagaacgcccugcuguccaccaacaaggccgucgugagccucuccaacggggugagcguccugaccuucaaggugcuggaccucaagaacuacaucgacaagcagcugcugcccauccugaacaagcagagcugcuccaucagcaacaucgagaccgucaucgaguuccagcagaagaacaaccgccuccuggagaucacgcgggaguucagcgugaacgcgggcgugaccacccccgucuccaccuacaugcugacgaacagcgagcuccugucccugaucaacgacaugccgaucaccaacgaccagaagaagcucaugagcaacaacgugcagaucgugcgccagcaguccuacagcaucaugugcaucaucaaggaggagguccuggccuacguggugcagcugccccucuacggggucaucgacacccccugcuggaagcugcacaccagcccccugugcacgaccaacaccaaggagggcuccaacaucugccucacccggacggaccgcgggugguacugcgacaacgccggcagcguguccuucuucccgcaggccgagaccugcaagguccagagcaaccggguguucugcgacaccaugaacucccggacccugcccagcgaggugaaccucugcaacaucgacaucuucaaccccaaguacgacugcaagaucaugacguccaagaccgacgucagcuccagcgugaucaccucccugggcgccaucgugagcugcuacgggaagaccaagugcacggcgagcaacaagaaccgcggcaucaucaagaccuucuccaacgggugcgacuacgucagcaacaagggcguggacaccguguccgucggcaacacccuguacuacgugaacaagcaggagggcaagagccucuacgugaagggggagcccaucaucaacuucuacgacccgcuggucuuccccuccgacgaguucgacgccagcaucucccaggugaacgagaagaucaaccagagccuggccuucauccggaaguccgacgagcuccugcacaacgugaacgucggcaagagcaccacgaacaucaugaucaccaccaucaucaucgugaucaucgugauccugcugcuccugaucgccgucgggcuguuccucuacugcaaggcccgcugaggacuaguggaagcauuuuccuggcugauuaaaagaaauuacucagcuauggucaucuguuccuguuagaaggcuaugcagcauauuauauacuaugcgcauguuaugaaaugcauaauaaaaaauuuuaaaaaaucuaaaagaucuaaaaaaaaaaaaaaaaaaaaaaaaaaaaaaaaaaaaaaaaaaaaaaaaaaaaaaaaaaaaaaaaugcaucccccccccccccccccccccccccccccccaaaggcucuuuucagagccaccagaauu

SEQ ID NO: 13733 - RNA, 1994 nt, Artificial Sequence
  mRNA product Design d-5 comprising derived and/or modified sequence from HRSV(Memphis-37)__AIY60640.1__F-del_DSCav1_mut0 (opt1)
gggagagggcgcuuggcuugcaaggacccugagcugcggcauugaagcacacccaacccaacucgacugaagucagccucacugaaccggaucugagaaucuucucucucugggcuugccagggcucuccgaaccuagcuagcauccucuucaauuccaacuagaaagcuuaccauggagcugcccauccucaagaccaacgccaucaccacgauccuggccgcggugacccugugcuucgccagcucccagaacaucaccgaggaguucuaccagagcacgugcuccgccgucagcaagggcuaccucuccgcccugcgcaccgggugguacaccagcgugaucaccaucgagcuguccaacaucaaggagaacaagugcaacggcaccgacgccaaggugaagcucaucaagcaggagcuggacaaguacaagaacgcggucacggagcugcagcuccugaugcagagcaccccggccgccggguccggcagcgccaucgcguccgggaucgccgugugcaaggugcugcaccucgagggcgaggucaacaagaucaagaacgcccugcugagcaccaacaaggccguggugucccucagcaacggcgucuccgugcugaccuucaaggugcuggaccucaagaacuacaucgacaagcagcugcugcccauccucaacaagcagagcugcuccaucagcaacaucgagacggucaucgaguuccagcagaagaacaaccggcugcuggagaucacccgcgaguucuccgugaacgccggggugaccacccccgucagcacguacaugcucaccaacagcgagcugcugucccucaucaacgacaugcccaucaccaacgaccagaagaagcugaugagcaacaacgugcagaucgugcggcagcaguccuacagcaucaugugcaucaucaaggaggagguccuggcguacguggugcagcucccgcuguacggcgucaucgacacccccugcuggaagcugcacacgagcccccucugcaccaccaacaccaaggagggguccaacaucugccugacgcgcaccgaccggggcugguacugcgacaacgccggguccgugagcuucuucccccaggccgagaccugcaaggugcaguccaaccgcgucuucugcgacaccaugaacagccggacgcucccguccgaggugaaccugugcaacaucgacaucuucaaccccaaguacgacugcaagaucaugaccagcaagaccgacgucuccagcuccgugaucaccagccugggcgccaucguguccugcuacggcaagacgaagugcaccgccagcaacaagaaccgggggaucaucaagaccuucuccaacggcugcgacuacgucagcaacaaggggguggacaccgugagcgucggcaacacgcucuacuacgugaacaagcaggagggcaagucccuguacgugaagggggagcccaucaucaacuucuacgacccccuggucuucccgagcgacgaguucgacgcguccaucagccaggugaacgagaagaucaaccagucccucgccuucauccgcaagagcgacgagcugcugcacaacgugaacgucggcaaguccaccaccaacaucaugaucaccaccaucaucaucgugaucaucgugauccuccugcugcucaucgccgucgggcuguuccuguacugcaaggcccggugaggacuaguggaagcauuuuccuggcugauuaaaagaaauuacucagcuauggucaucuguuccuguuagaaggcuaugcagcauauuauauacuaugcgcauguuaugaaaugcauaauaaaaaauuuuaaaaaaucuaaaagaucuaaaaaaaaaaaaaaaaaaaaaaaaaaaaaaaaaaaaaaaaaaaaaaaaaaaaaaaaaaaaaaaaugcaucccccccccccccccccccccccccccccccaaaggcucuuuucagagccaccagaauu

SEQ ID NO: 13734 - RNA, 1994 nt, Artificial Sequence
  mRNA product Design d-5 comprising derived and/or modified sequence from HRSV(Memphis-37)__AIY60640.1__F-del_DSCav1_mut0 (opt2)
gggagagggcgcuuggcuugcaaggacccugagcugcggcauugaagcacacccaacccaacucgacugaagucagccucacugaaccggaucugagaaucuucucucucugggcuugccagggcucuccgaaccuagcuagcauccucuucaauuccaacuagaaagcuuaccauggagcuccccauccucaagaccaacgccaucaccaccauccucgccgccgucacccucugcuucgccuccucccagaacaucaccgaggaguucuaccaguccaccugcuccgccgucuccaagggcuaccucuccgcccuccgcaccggcugguacaccuccgucaucaccaucgagcucuccaacaucaaggagaacaagugcaacggcaccgacgccaaggucaagcucaucaagcaggagcucgacaaguacaagaacgccgucaccgagcuccagcuccucaugcaguccacccccgccgccggcuccggcuccgccaucgccuccggcaucgccgucugcaagguccuccaccucgagggcgaggucaacaagaucaagaacgcccuccucuccaccaacaaggccgucgucucccucuccaacggcgucuccguccucaccuucaagguccucgaccucaagaacuacaucgacaagcagcuccuccccauccucaacaagcaguccugcuccaucuccaacaucgagaccgucaucgaguuccagcagaagaacaaccgccuccucgagaucacccgcgaguucuccgucaacgccggcgucaccacccccgucuccaccuacaugcucaccaacuccgagcuccucucccucaucaacgacaugcccaucaccaacgaccagaagaagcucauguccaacaacguccagaucguccgccagcaguccuacuccaucaugugcaucaucaaggaggagguccucgccuacgucguccagcucccccucuacggcgucaucgacacccccugcuggaagcuccacaccuccccccucugcaccaccaacaccaaggagggcuccaacaucugccucacccgcaccgaccgcggcugguacugcgacaacgccggcuccgucuccuucuucccccaggccgagaccugcaagguccaguccaaccgcgucuucugcgacaccaugaacucccgcacccuccccuccgaggucaaccucugcaacaucgacaucuucaaccccaaguacgacugcaagaucaugaccuccaagaccgacgucuccuccuccgucaucaccucccucggcgccaucgucuccugcuacggcaagaccaagugcaccgccuccaacaagaaccgcggcaucaucaagaccuucuccaacggcugcgacuacgucuccaacaagggcgucgacaccgucuccgucggcaacacccucuacuacgucaacaagcaggagggcaagucccucuacgucaagggcgagcccaucaucaacuucuacgacccccucgucuuccccuccgacgaguucgacgccuccaucucccaggucaacgagaagaucaaccagucccucgccuucauccgcaaguccgacgagcuccuccacaacgucaacgucggcaaguccaccaccaacaucaugaucaccaccaucaucaucgucaucaucgucauccuccuccuccucaucgccgucggccucuuccucuacugcaaggcccgcugaggacuaguggaagcauuuuccuggcugauuaaaagaaauuacucagcuauggucaucuguuccuguuagaaggcuaugcagcauauuauauacuaugcgcauguuaugaaaugcauaauaaaaaauuuuaaaaaaucuaaaagaucuaaaaaaaaaaaaaaaaaaaaaaaaaaaaaaaaaaaaaaaaaaaaaaaaaaaaaaaaaaaaaaaaugcaucccccccccccccccccccccccccccccccaaaggcucuuuucagagccaccagaauu

SEQ ID NO: 13735 - RNA, 1994 nt, Artificial Sequence
  mRNA product Design d-5 comprising derived and/or modified sequence from HRSV(Memphis-37)__AIY60640.1__F-del_DSCav1_mut0 (opt3)
gggagagggcgcuuggcuugcaaggacccugagcugcggcauugaagcacacccaacccaacucgacugaagucagccucacugaaccggaucugagaaucuucucucucugggcuugccagggcucuccgaaccuagcuagcauccucuucaauuccaacuagaaagcuuaccauggagcugcccauccucaagaccaacgccauuacaacuauacuugcugcagugacgcugugcuucgccagcucccagaauaucaccgaagaguuuuaccaaucuacauguucagcggucaguaaaggcuauuugagcgcuuuaagaacugggugguacaccuccguuauuacaaucgaacugucuaacauuaaggagaauaaaugcaacggaaccgacgccaaggugaaacuaaucaagcaggaacucgauaaguauaaaaaugcaguaacugagcugcagcuucugaugcagucgaccccugccgcugguucaggcagcgcaauagccagugggaucgcuguguguaaggucuugcaccucgagggagaagugaacaaaauuaagaaugcccugcuguccacaaacaaagcgguugugucucucagcaauggcgucuccguguuaacguucaagguacuggaccuuaagaacuacaucgauaaacaauugcugccaauucuaaauaagcagucaugcaguaucagcaacauagagacuguuauugaauuucagcagaaaaauaacaggcuccuggagaucacccgggaguucucugugaaugccggugucacaacuccgguguccaccuauaugcuuacaaacucagaacuguugagccucauuaacgacaugcccaucaccaaugaucaaaagaaacugaugaguaacaaugugcagaucguccgccagcagucuuacuccauuauguguauaaucaaggaggaaguuuuagcauaugugguacaacugccucucuacggggugauugacacgccaugcuggaaacuucauacuagcccccuguguacaaccaacacuaaggagggaucgaauaucugcuugacacgaaccgaucguggcugguacugugacaacgcuggcucugucuccuuuuucccucaggccgaaacgugcaaggugcagucaaauagaguguuuugugauaccaugaacaguagaacacugccaagcgaggugaaucucugcaacauagacauuuucaaucccaaauaugauugcaagaucaugacuuccaaaaccgacgucucuagcucagugaucacaagucugggggcaauuguauccuguuacggaaagacuaaaugcaccgcuagcaacaagaauagggguaucauuaagacauuuucuaacggcugugauuauguuucaaauaaagggguggacaccgucagugugggaaacacucuuuacuaugucaacaagcaagagggcaaaagccuguacgugaagggugaaccuauaaucaauuucuaugacccauugguuuuuccguccgaugaguucgacgccucuauuucgcagguuaacgagaaaaucaaucagagccucgcguuuauccggaaguccgaugaacuguuacacaacguaaaugucgggaagucaacgacaaacauuaugauaaccacuaucauuaucgugauuaucguuauacugcuacuccugaucgccgugggacuuuucuuguacugcaaagcacgcugaggacuaguggaagcauuuuccuggcugauuaaaagaaauuacucagcuauggucaucuguuccuguuagaaggcuaugcagcauauuauauacuaugcgcauguuaugaaaugcauaauaaaaaauuuuaaaaaaucuaaaagaucuaaaaaaaaaaaaaaaaaaaaaaaaaaaaaaaaaaaaaaaaaaaaaaaaaaaaaaaaaaaaaaaaugcaucccccccccccccccccccccccccccccccaaaggcucuuuucagagccaccagaauu

SEQ ID NO: 13736 - RNA, 1994 nt, Artificial Sequence
  mRNA product Design d-5 comprising derived and/or modified sequence from HRSV(Memphis-37)__AIY60640.1__F-del_DSCav1_mut0 (opt4)
gggagagggcgcuuggcuugcaaggacccugagcugcggcauugaagcacacccaacccaacucgacugaagucagccucacugaaccggaucugagaaucuucucucucugggcuugccagggcucuccgaaccuagcuagcauccucuucaauuccaacuagaaagcuuaccauggagcugcccauccugaagaccaacgccaucaccaccauccuggccgccgugacccugugcuucgccagcagccagaacaucaccgaggaguucuaccagagcaccugcagcgccgugagcaagggcuaccugagcgcccugagaaccggcugguacaccagcgugaucaccaucgagcugagcaacaucaaggagaacaagugcaacggcaccgacgccaaggugaagcugaucaagcaggagcuggacaaguacaagaacgccgugaccgagcugcagcugcugaugcagagcacccccgccgccggcagcggcagcgccaucgccagcggcaucgccgugugcaaggugcugcaccuggagggcgaggugaacaagaucaagaacgcccugcugagcaccaacaaggccguggugagccugagcaacggcgugagcgugcugaccuucaaggugcuggaccugaagaacuacaucgacaagcagcugcugcccauccugaacaagcagagcugcagcaucagcaacaucgagaccgugaucgaguuccagcagaagaacaacagacugcuggagaucaccagagaguucagcgugaacgccggcgugaccacccccgugagcaccuacaugcugaccaacagcgagcugcugagccugaucaacgacaugcccaucaccaacgaccagaagaagcugaugagcaacaacgugcagaucgugagacagcagagcuacagcaucaugugcaucaucaaggaggaggugcuggccuacguggugcagcugccccuguacggcgugaucgacacccccugcuggaagcugcacaccagcccccugugcaccaccaacaccaaggagggcagcaacaucugccugaccagaaccgacagaggcugguacugcgacaacgccggcagcgugagcuucuucccccaggccgagaccugcaaggugcagagcaacagaguguucugcgacaccaugaacagcagaacccugcccagcgaggugaaccugugcaacaucgacaucuucaaccccaaguacgacugcaagaucaugaccagcaagaccgacgugagcagcagcgugaucaccagccugggcgccaucgugagcugcuacggcaagaccaagugcaccgccagcaacaagaacagaggcaucaucaagaccuucagcaacggcugcgacuacgugagcaacaagggcguggacaccgugagcgugggcaacacccuguacuacgugaacaagcaggagggcaagagccuguacgugaagggcgagcccaucaucaacuucuacgacccccugguguuccccagcgacgaguucgacgccagcaucagccaggugaacgagaagaucaaccagagccuggccuucaucagaaagagcgacgagcugcugcacaacgugaacgugggcaagagcaccaccaacaucaugaucaccaccaucaucaucgugaucaucgugauccugcugcugcugaucgccgugggccuguuccuguacugcaaggccagaugaggacuaguggaagcauuuuccuggcugauuaaaagaaauuacucagcuauggucaucuguuccuguuagaaggcuaugcagcauauuauauacuaugcgcauguuaugaaaugcauaauaaaaaauuuuaaaaaaucuaaaagaucuaaaaaaaaaaaaaaaaaaaaaaaaaaaaaaaaaaaaaaaaaaaaaaaaaaaaaaaaaaaaaaaaugcaucccccccccccccccccccccccccccccccaaaggcucuuuucagagccaccagaauu

SEQ ID NO: 13737 - RNA, 1994 nt, Artificial Sequence
  mRNA product Design d-5 comprising derived and/or modified sequence from HRSV(Memphis-37)__AIY60640.1__F-del_DSCav1_mut0 (opt5)
gggagagggcgcuuggcuugcaaggacccugagcugcggcauugaagcacacccaacccaacucgacugaagucagccucacugaaccggaucugagaaucuucucucucugggcuugccagggcucuccgaaccuagcuagcauccucuucaauuccaacuagaaagcuuaccauggagcugcccauccucaagaccaacgccauuacaacgauccuggcugccgugacccuuugcuucgcgagcucccagaauauuacagaagaguuuuaccaaucuaccuguagcgcugucuccaaaggcuaucugucugcccucagaacagggugguacaccagcguuaucacaauugaacuguccaacaucaaggagaauaaaugcaacggaaccgacgccaaggugaaacuuaucaagcaggaacuggauaaguauaaaaaugcugugacggagcuccagcugcugaugcagucuaccccugccgcuggcagcggguccgccauugcgagcggaaucgccgucuguaaggugcuccaccuggagggcgaaguuaacaaaauuaagaaugcccuucugucuacaaacaaagcuguggucucccucagcaauggggugucuguucugaccuucaaggugcuugaccugaagaacuacaucgauaaacaacuccugccgauucugaauaagcaguccugcagcaucucuaacauugagacagucaucgaauuucagcagaaaaauaaccggcuccuggagaucacccgcgaguucuccgugaaugcuggagugacgacacccgucagcaccuauaugcuuacaaacuccgaacugcucucucugauuaacgacaugccuaucaccaaugaucaaaagaaacuuaugagcaacaauguucagauugugagacagcaguccuacagcaucauguguauuaucaaggaggaagugcuggccuaugucgugcaacucccccuguacggcguuaucgacaccccuugcuggaaacugcauacaucuccccucuguacgaccaacacaaaggagggcuccaauauuugccugacccggacagaucgcgggugguacugugacaacgcgggaagcgugagcuuuuucccucaggccgaaaccugcaagguccagucuaauagaguguuuugugauacgaugaacuccagaacacugccgucugagguuaaucucugcaacaucgacauuuucaaucccaaauaugauugcaagaucaugaccagcaaaaccgacguguccagcucugucauuacaucccugggcgcuaucgugagcuguuacgggaagaccaaaugcacagccucuaacaagaaucggggaaucauuaagacguuuuccaacggcugugauuaugucagcaauaaagggguggacaccguuuccgugggaaacacacuuuacuaugucaacaagcaagagggcaaaucucuguacgugaagggcgaaccuaucauuaauuucuaugacccccucguuuuuccuagcgaugaguucgacgcuuccaucucucaggugaacgaaaagauuaaucagagccuggccuuuauccgcaaguccgaugagcugcuccacaacgucaauguggggaaaagcaccacaaacauuaugaucaccacgaucauuaucgugauuaucguuauucugcuucugcucaucgccgucggacuguuccuguacugcaaagcuagaugaggacuaguggaagcauuuuccuggcugauuaaaagaaauuacucagcuauggucaucuguuccuguuagaaggcuaugcagcauauuauauacuaugcgcauguuaugaaaugcauaauaaaaaauuuuaaaaaaucuaaaagaucuaaaaaaaaaaaaaaaaaaaaaaaaaaaaaaaaaaaaaaaaaaaaaaaaaaaaaaaaaaaaaaaaugcaucccccccccccccccccccccccccccccccaaaggcucuuuucagagccaccagaauu

SEQ ID NO: 13738 - RNA, 1994 nt, Artificial Sequence
  mRNA product Design d-5 comprising derived and/or modified sequence from HRSV(Memphis-37)__AIY60640.1__F-del_DSCav1_mut0 (opt6)
gggagagggcgcuuggcuugcaaggacccugagcugcggcauugaagcacacccaacccaacucgacugaagucagccucacugaaccggaucugagaaucuucucucucugggcuugccagggcucuccgaaccuagcuagcauccucuucaauuccaacuagaaagcuuaccauggaacucccaauacuuaaaacaaacgcaaucacaacaauacuagcugcagucacacuaugcuucgccucaucacaaaauauaacagaagaauuuuaucaaucaacaugcuccgcaguaucaaaaggauaucucucugcauuacgaacagguugguacaccucgguaauaacaauagaauuaucaaacauaaaagaaaauaaaugcaauggaaccgaugccaaaguaaaacuaaucaaacaagaacuugacaaauacaaaaacgcaguaacagaacuacaacuauuaaugcaaucaacaccagcagcagguucaggcuccgcaaucgcuucaggaauagccguuuguaaaguacuacacuuagaaggagaaguaaauaaaauaaaaaacgccuuacuaucaacaaacaaagcaguagucucccuuuccaacggaguaucagucuuaacuuuuaaaguacucgacuuaaaaaauuacaucgacaaacaacuacuacccauucuaaauaaacaaucaugcucaauaucaaacaucgaaacaguaaucgaauuucaacaaaaaaauaauagauuacuagaaauaacacgagaauuuuccguaaaugccggaguaacgaccccagucucaacauacauguuaacaaacucagaauuacuaucacucauuaacgauaugccaauaacaaaugaccaaaaaaaacuaaugucaaacaacguccaaauaguacgacaacaaucauacucuaucauguguauaauaaaagaagaaguuuuagcauacguaguacaacuaccacuuuacggagucauagacaccccaugcuggaaacuacacacaucacccuuauguacaacaaacaccaaagaagggucuaacauaugucucacuagaacagaucgaggcugguacugcgacaacgcaggaucaguuagcuuuuucccucaagccgaaaccuguaaaguacaauccaaucgaguauuuugcgacacuaugaacucuagaaccuuacccuccgaaguaaaccuauguaacauagacauauuuaaucccaaauaugauugcaaaaucaugacauccaaaacagauguaucaagcucuguaauaaccucacuaggagcaauaguuucaugcuaugguaaaacaaaaugcaccgccucaaacaaaaauagagggauaaucaaaaccuucucaaauggaugcgacuacguaucaaauaaaggaguagacaccgucuccguaggaaacacacuauacuacguaaacaaacaagaaggaaaaucacuauacguaaaaggagaaccaaucauaaacuucuacgacccacuuguuuucccaucagaugaauuugaugccuccauaucacaaguaaacgaaaaaauaaaccaaucucuagccuucaucagaaaauccgacgaacuuuuacacaacguaaacguagguaaaucaacaaccaacaucaugauaacaacaauaauaauaguaauaauuguaauacuuuuacuacuuaucgccguaggccuauucuuauauuguaaagcaagaugaggacuaguggaagcauuuuccuggcugauuaaaagaaauuacucagcuauggucaucuguuccuguuagaaggcuaugcagcauauuauauacuaugcgcauguuaugaaaugcauaauaaaaaauuuuaaaaaaucuaaaagaucuaaaaaaaaaaaaaaaaaaaaaaaaaaaaaaaaaaaaaaaaaaaaaaaaaaaaaaaaaaaaaaaaugcaucccccccccccccccccccccccccccccccaaaggcucuuuucagagccaccagaauu

SEQ ID NO: 13739 - RNA, 1994 nt, Artificial Sequence
  mRNA product Design d-5 comprising derived and/or modified sequence from HRSV(Memphis-37)__AIY60640.1__F-del_DSCav1_mut0 (opt11)
gggagagggcgcuuggcuugcaaggacccugagcugcggcauugaagcacacccaacccaacucgacugaagucagccucacugaaccggaucugagaaucuucucucucugggcuugccagggcucuccgaaccuagcuagcauccucuucaauuccaacuagaaagcuuaccauggaacuaccaauccucaaaaccaacgccaucacuacaauccuagccgcgguaacccugugcuucgccuccucacaaaacaucacagaagaauuuuaccaaucaaccugcuccgccguauccaaaggauaccugagcgcccugagaaccggcugguacaccuccgucaucaccauagaacucuccaacaucaaagaaaacaaaugcaacgguacggacgccaaaguuaaacucaucaaacaagaacuugacaaauacaagaacgccgucacagaacugcaacuccucaugcaauccacccccgccgccggcuccggcuccgccauagccuccggcaucgccgucugcaaagucuuacaccuagaaggcgaagucaacaaaaucaaaaacgcacuacuuuccacaaacaaagccgucgucucacucuccaacggcguauccguccucaccuucaaaguacuugaccucaaaaacuacaucgacaaacaacuacuccccauccugaacaaacaauccugcucaaucuccaacaucgaaaccguaaucgaguuccaacagaaaaauaaucgccuccuggagaucacccgcgaguucuccgucaaugcaggagucacaaccccaguaucaaccuacaugcucaccaacuccgaacuccugucgcucaucaacgacaugcccaucacaaacgaccaaaagaaacucauguccaacaacguacaaaucgucagacaacaauccuauucuauaaugugcaucaucaaagaagaaguccucgccuacgucguacaacucccccucuacggcguuaucgacacccccugcuggaaacuccacaccucaccccucugcaccaccaacacaaaagaaggcuccaacaucugccucacucggaccgaccgcggcugguacugcgacaaugccggcagcgucuccuucuucccacaagccgaaaccugcaaaguccaguccaaccgcguauucugcgacacuaugaacuccagaacccuccccuccgaaguaaaccucugcaacaucgacaucuucaacccaaaauacgacugcaaaaucaugaccucaaaaaccgacgucagcucgucagucauaaccagccucggagccauagucucaugcuacggaaaaaccaaaugcaccgccagcaacaaaaaccgcggcauaauaaaaacauucuccaacggcugcgacuauguauccaacaaaggagucgauaccgucuccguaggcaacacccuauacuacgucaacaaacaagaaggcaaaucccucuacgucaaaggugaaccaaucaucaacuucuacgacccucucgucuuccccuccgaugaguucgacgccucaaucagccaaguaaacgaaaagauaaaccaaucacucgccuucauccgcaaauccgacgaacuucuucacaacgucaacgucggcaaaucuaccaccaacauaaugauaaccaccaucaucaucgucaucaucguaauacuccuccuucucaucgccgucggccuauuccuauacugcaaagcccgcuagggacuaguggaagcauuuuccuggcugauuaaaagaaauuacucagcuauggucaucuguuccuguuagaaggcuaugcagcauauuauauacuaugcgcauguuaugaaaugcauaauaaaaaauuuuaaaaaaucuaaaagaucuaaaaaaaaaaaaaaaaaaaaaaaaaaaaaaaaaaaaaaaaaaaaaaaaaaaaaaaaaaaaaaaaugcaucccccccccccccccccccccccccccccccaaaggcucuuuucagagccaccagaauu

SEQ ID NO: 13740 - RNA, 1874 nt, Artificial Sequence
  mRNA product Design e-1 comprising derived and/or modified sequence from HRSV(Memphis-37)__AIY60640.1__F-del_DSCav1_mut0 (opt1)
gggagaauauaagcguuggcggagcgucgguuguagcacucugcgcgcccgcucuucugcugcuguuugucuacuuccuccugcuuccccgccgccgccgccgccaucaagcuuaccauggagcugcccauccucaagaccaacgccaucaccacgauccuggccgcggugacccugugcuucgccagcucccagaacaucaccgaggaguucuaccagagcacgugcuccgccgucagcaagggcuaccucuccgcccugcgcaccgggugguacaccagcgugaucaccaucgagcuguccaacaucaaggagaacaagugcaacggcaccgacgccaaggugaagcucaucaagcaggagcuggacaaguacaagaacgcggucacggagcugcagcuccugaugcagagcaccccggccgccggcuccgggagcgcgaucgccuccggcaucgccgucugcaaggugcugcaccucgagggcgaggugaacaagaucaagaacgcccugcuguccaccaacaaggccgucgugagccucuccaacggggugagcguccugaccuucaaggugcuggaccucaagaacuacaucgacaagcagcugcugcccauccugaacaagcagagcugcuccaucagcaacaucgagaccgucaucgaguuccagcagaagaacaaccgccuccuggagaucacgcgggaguucagcgugaacgcgggcgugaccacccccgucuccaccuacaugcugacgaacagcgagcuccugucccugaucaacgacaugccgaucaccaacgaccagaagaagcucaugagcaacaacgugcagaucgugcgccagcaguccuacagcaucaugugcaucaucaaggaggagguccuggccuacguggugcagcugccccucuacggggucaucgacacccccugcuggaagcugcacaccagcccccugugcacgaccaacaccaaggagggcuccaacaucugccucacccggacggaccgcgggugguacugcgacaacgccggcagcguguccuucuucccgcaggccgagaccugcaagguccagagcaaccggguguucugcgacaccaugaacucccggacccugcccagcgaggugaaccucugcaacaucgacaucuucaaccccaaguacgacugcaagaucaugacguccaagaccgacgucagcuccagcgugaucaccucccugggcgccaucgugagcugcuacgggaagaccaagugcacggcgagcaacaagaaccgcggcaucaucaagaccuucuccaacgggugcgacuacgucagcaacaagggcguggacaccguguccgucggcaacacccuguacuacgugaacaagcaggagggcaagagccucuacgugaagggggagcccaucaucaacuucuacgacccgcuggucuuccccuccgacgaguucgacgccagcaucucccaggugaacgagaagaucaaccagagccuggccuucauccggaaguccgacgagcuccugcacaacgugaacgucggcaagagcaccacgaacaucaugaucaccaccaucaucaucgugaucaucgugauccugcugcuccugaucgccgucgggcuguuccucuacugcaaggcccgcugaggacuaguguccaccugucccuccugggcugcuggauugucucguuuuccugccaaauaaacaggaucagcgcuuuacagaucuaaaaaaaaaaaaaaaaaaaaaaaaaaaaaaaaaaaaaaaaaaaaaaaaaaaaaaaaaaaaaaaaugcaucccccccccccccccccccccccccccccccaaaggcucuuuucagagccaccagaauu

SEQ ID NO: 13741 - RNA, 1874 nt, Artificial Sequence
  mRNA product Design e-1 comprising derived and/or modified sequence from HRSV(Memphis-37)__AIY60640.1__F-del_DSCav1_mut0 (opt1)
gggagaauauaagcguuggcggagcgucgguuguagcacucugcgcgcccgcucuucugcugcuguuugucuacuuccuccugcuuccccgccgccgccgccgccaucaagcuuaccauggagcugcccauccucaagaccaacgccaucaccacgauccuggccgcggugacccugugcuucgccagcucccagaacaucaccgaggaguucuaccagagcacgugcuccgccgucagcaagggcuaccucuccgcccugcgcaccgggugguacaccagcgugaucaccaucgagcuguccaacaucaaggagaacaagugcaacggcaccgacgccaaggugaagcucaucaagcaggagcuggacaaguacaagaacgcggucacggagcugcagcuccugaugcagagcaccccggccgccggguccggcagcgccaucgcguccgggaucgccgugugcaaggugcugcaccucgagggcgaggucaacaagaucaagaacgcccugcugagcaccaacaaggccguggugucccucagcaacggcgucuccgugcugaccuucaaggugcuggaccucaagaacuacaucgacaagcagcugcugcccauccucaacaagcagagcugcuccaucagcaacaucgagacggucaucgaguuccagcagaagaacaaccggcugcuggagaucacccgcgaguucuccgugaacgccggggugaccacccccgucagcacguacaugcucaccaacagcgagcugcugucccucaucaacgacaugcccaucaccaacgaccagaagaagcugaugagcaacaacgugcagaucgugcggcagcaguccuacagcaucaugugcaucaucaaggaggagguccuggcguacguggugcagcucccgcuguacggcgucaucgacacccccugcuggaagcugcacacgagcccccucugcaccaccaacaccaaggagggguccaacaucugccugacgcgcaccgaccggggcugguacugcgacaacgccggguccgugagcuucuucccccaggccgagaccugcaaggugcaguccaaccgcgucuucugcgacaccaugaacagccggacgcucccguccgaggugaaccugugcaacaucgacaucuucaaccccaaguacgacugcaagaucaugaccagcaagaccgacgucuccagcuccgugaucaccagccugggcgccaucguguccugcuacggcaagacgaagugcaccgccagcaacaagaaccgggggaucaucaagaccuucuccaacggcugcgacuacgucagcaacaaggggguggacaccgugagcgucggcaacacgcucuacuacgugaacaagcaggagggcaagucccuguacgugaagggggagcccaucaucaacuucuacgacccccuggucuucccgagcgacgaguucgacgcguccaucagccaggugaacgagaagaucaaccagucccucgccuucauccgcaagagcgacgagcugcugcacaacgugaacgucggcaaguccaccaccaacaucaugaucaccaccaucaucaucgugaucaucgugauccuccugcugcucaucgccgucgggcuguuccuguacugcaaggcccggugaggacuaguguccaccugucccuccugggcugcuggauugucucguuuuccugccaaauaaacaggaucagcgcuuuacagaucuaaaaaaaaaaaaaaaaaaaaaaaaaaaaaaaaaaaaaaaaaaaaaaaaaaaaaaaaaaaaaaaaugcaucccccccccccccccccccccccccccccccaaaggcucuuuucagagccaccagaauu

SEQ ID NO: 13742 - RNA, 1874 nt, Artificial Sequence
  mRNA product Design e-1 comprising derived and/or modified sequence from HRSV(Memphis-37)__AIY60640.1__F-del_DSCav1_mut0 (opt2)
gggagaauauaagcguuggcggagcgucgguuguagcacucugcgcgcccgcucuucugcugcuguuugucuacuuccuccugcuuccccgccgccgccgccgccaucaagcuuaccauggagcuccccauccucaagaccaacgccaucaccaccauccucgccgccgucacccucugcuucgccuccucccagaacaucaccgaggaguucuaccaguccaccugcuccgccgucuccaagggcuaccucuccgcccuccgcaccggcugguacaccuccgucaucaccaucgagcucuccaacaucaaggagaacaagugcaacggcaccgacgccaaggucaagcucaucaagcaggagcucgacaaguacaagaacgccgucaccgagcuccagcuccucaugcaguccacccccgccgccggcuccggcuccgccaucgccuccggcaucgccgucugcaagguccuccaccucgagggcgaggucaacaagaucaagaacgcccuccucuccaccaacaaggccgucgucucccucuccaacggcgucuccguccucaccuucaagguccucgaccucaagaacuacaucgacaagcagcuccuccccauccucaacaagcaguccugcuccaucuccaacaucgagaccgucaucgaguuccagcagaagaacaaccgccuccucgagaucacccgcgaguucuccgucaacgccggcgucaccacccccgucuccaccuacaugcucaccaacuccgagcuccucucccucaucaacgacaugcccaucaccaacgaccagaagaagcucauguccaacaacguccagaucguccgccagcaguccuacuccaucaugugcaucaucaaggaggagguccucgccuacgucguccagcucccccucuacggcgucaucgacacccccugcuggaagcuccacaccuccccccucugcaccaccaacaccaaggagggcuccaacaucugccucacccgcaccgaccgcggcugguacugcgacaacgccggcuccgucuccuucuucccccaggccgagaccugcaagguccaguccaaccgcgucuucugcgacaccaugaacucccgcacccuccccuccgaggucaaccucugcaacaucgacaucuucaaccccaaguacgacugcaagaucaugaccuccaagaccgacgucuccuccuccgucaucaccucccucggcgccaucgucuccugcuacggcaagaccaagugcaccgccuccaacaagaaccgcggcaucaucaagaccuucuccaacggcugcgacuacgucuccaacaagggcgucgacaccgucuccgucggcaacacccucuacuacgucaacaagcaggagggcaagucccucuacgucaagggcgagcccaucaucaacuucuacgacccccucgucuuccccuccgacgaguucgacgccuccaucucccaggucaacgagaagaucaaccagucccucgccuucauccgcaaguccgacgagcuccuccacaacgucaacgucggcaaguccaccaccaacaucaugaucaccaccaucaucaucgucaucaucgucauccuccuccuccucaucgccgucggccucuuccucuacugcaaggcccgcugaggacuaguguccaccugucccuccugggcugcuggauugucucguuuuccugccaaauaaacaggaucagcgcuuuacagaucuaaaaaaaaaaaaaaaaaaaaaaaaaaaaaaaaaaaaaaaaaaaaaaaaaaaaaaaaaaaaaaaaugcaucccccccccccccccccccccccccccccccaaaggcucuuuucagagccaccagaauu

SEQ ID NO: 13743 - RNA, 1874 nt, Artificial Sequence
  mRNA product Design e-1 comprising derived and/or modified sequence from HRSV(Memphis-37)__AIY60640.1__F-del_DSCav1_mut0 (opt3)
gggagaauauaagcguuggcggagcgucgguuguagcacucugcgcgcccgcucuucugcugcuguuugucuacuuccuccugcuuccccgccgccgccgccgccaucaagcuuaccauggagcugcccauccucaagaccaacgccauuacaacuauacuugcugcagugacgcugugcuucgccagcucccagaauaucaccgaagaguuuuaccaaucuacauguucagcggucaguaaaggcuauuugagcgcuuuaagaacugggugguacaccuccguuauuacaaucgaacugucuaacauuaaggagaauaaaugcaacggaaccgacgccaaggugaaacuaaucaagcaggaacucgauaaguauaaaaaugcaguaacugagcugcagcuucugaugcagucgaccccugccgcugguucaggcagcgcaauagccagugggaucgcuguguguaaggucuugcaccucgagggagaagugaacaaaauuaagaaugcccugcuguccacaaacaaagcgguugugucucucagcaauggcgucuccguguuaacguucaagguacuggaccuuaagaacuacaucgauaaacaauugcugccaauucuaaauaagcagucaugcaguaucagcaacauagagacuguuauugaauuucagcagaaaaauaacaggcuccuggagaucacccgggaguucucugugaaugccggugucacaacuccgguguccaccuauaugcuuacaaacucagaacuguugagccucauuaacgacaugcccaucaccaaugaucaaaagaaacugaugaguaacaaugugcagaucguccgccagcagucuuacuccauuauguguauaaucaaggaggaaguuuuagcauaugugguacaacugccucucuacggggugauugacacgccaugcuggaaacuucauacuagcccccuguguacaaccaacacuaaggagggaucgaauaucugcuugacacgaaccgaucguggcugguacugugacaacgcuggcucugucuccuuuuucccucaggccgaaacgugcaaggugcagucaaauagaguguuuugugauaccaugaacaguagaacacugccaagcgaggugaaucucugcaacauagacauuuucaaucccaaauaugauugcaagaucaugacuuccaaaaccgacgucucuagcucagugaucacaagucugggggcaauuguauccuguuacggaaagacuaaaugcaccgcuagcaacaagaauagggguaucauuaagacauuuucuaacggcugugauuauguuucaaauaaagggguggacaccgucagugugggaaacacucuuuacuaugucaacaagcaagagggcaaaagccuguacgugaagggugaaccuauaaucaauuucuaugacccauugguuuuuccguccgaugaguucgacgccucuauuucgcagguuaacgagaaaaucaaucagagccucgcguuuauccggaaguccgaugaacuguuacacaacguaaaugucgggaagucaacgacaaacauuaugauaaccacuaucauuaucgugauuaucguuauacugcuacuccugaucgccgugggacuuuucuuguacugcaaagcacgcugaggacuaguguccaccugucccuccugggcugcuggauugucucguuuuccugccaaauaaacaggaucagcgcuuuacagaucuaaaaaaaaaaaaaaaaaaaaaaaaaaaaaaaaaaaaaaaaaaaaaaaaaaaaaaaaaaaaaaaaugcaucccccccccccccccccccccccccccccccaaaggcucuuuucagagccaccagaauu

SEQ ID NO: 13744 - RNA, 1874 nt, Artificial Sequence
  mRNA product Design e-1 comprising derived and/or modified sequence from HRSV(Memphis-37)__AIY60640.1__F-del_DSCav1_mut0 (opt4)
gggagaauauaagcguuggcggagcgucgguuguagcacucugcgcgcccgcucuucugcugcuguuugucuacuuccuccugcuuccccgccgccgccgccgccaucaagcuuaccauggagcugcccauccugaagaccaacgccaucaccaccauccuggccgccgugacccugugcuucgccagcagccagaacaucaccgaggaguucuaccagagcaccugcagcgccgugagcaagggcuaccugagcgcccugagaaccggcugguacaccagcgugaucaccaucgagcugagcaacaucaaggagaacaagugcaacggcaccgacgccaaggugaagcugaucaagcaggagcuggacaaguacaagaacgccgugaccgagcugcagcugcugaugcagagcacccccgccgccggcagcggcagcgccaucgccagcggcaucgccgugugcaaggugcugcaccuggagggcgaggugaacaagaucaagaacgcccugcugagcaccaacaaggccguggugagccugagcaacggcgugagcgugcugaccuucaaggugcuggaccugaagaacuacaucgacaagcagcugcugcccauccugaacaagcagagcugcagcaucagcaacaucgagaccgugaucgaguuccagcagaagaacaacagacugcuggagaucaccagagaguucagcgugaacgccggcgugaccacccccgugagcaccuacaugcugaccaacagcgagcugcugagccugaucaacgacaugcccaucaccaacgaccagaagaagcugaugagcaacaacgugcagaucgugagacagcagagcuacagcaucaugugcaucaucaaggaggaggugcuggccuacguggugcagcugccccuguacggcgugaucgacacccccugcuggaagcugcacaccagcccccugugcaccaccaacaccaaggagggcagcaacaucugccugaccagaaccgacagaggcugguacugcgacaacgccggcagcgugagcuucuucccccaggccgagaccugcaaggugcagagcaacagaguguucugcgacaccaugaacagcagaacccugcccagcgaggugaaccugugcaacaucgacaucuucaaccccaaguacgacugcaagaucaugaccagcaagaccgacgugagcagcagcgugaucaccagccugggcgccaucgugagcugcuacggcaagaccaagugcaccgccagcaacaagaacagaggcaucaucaagaccuucagcaacggcugcgacuacgugagcaacaagggcguggacaccgugagcgugggcaacacccuguacuacgugaacaagcaggagggcaagagccuguacgugaagggcgagcccaucaucaacuucuacgacccccugguguuccccagcgacgaguucgacgccagcaucagccaggugaacgagaagaucaaccagagccuggccuucaucagaaagagcgacgagcugcugcacaacgugaacgugggcaagagcaccaccaacaucaugaucaccaccaucaucaucgugaucaucgugauccugcugcugcugaucgccgugggccuguuccuguacugcaaggccagaugaggacuaguguccaccugucccuccugggcugcuggauugucucguuuuccugccaaauaaacaggaucagcgcuuuacagaucuaaaaaaaaaaaaaaaaaaaaaaaaaaaaaaaaaaaaaaaaaaaaaaaaaaaaaaaaaaaaaaaaugcaucccccccccccccccccccccccccccccccaaaggcucuuuucagagccaccagaauu

SEQ ID NO: 13745 - RNA, 1874 nt, Artificial Sequence
  mRNA product Design e-1 comprising derived and/or modified sequence from HRSV(Memphis-37)__AIY60640.1__F-del_DSCav1_mut0 (opt5)
gggagaauauaagcguuggcggagcgucgguuguagcacucugcgcgcccgcucuucugcugcuguuugucuacuuccuccugcuuccccgccgccgccgccgccaucaagcuuaccauggagcugcccauccucaagaccaacgccauuacaacgauccuggcugccgugacccuuugcuucgcgagcucccagaauauuacagaagaguuuuaccaaucuaccuguagcgcugucuccaaaggcuaucugucugcccucagaacagggugguacaccagcguuaucacaauugaacuguccaacaucaaggagaauaaaugcaacggaaccgacgccaaggugaaacuuaucaagcaggaacuggauaaguauaaaaaugcugugacggagcuccagcugcugaugcagucuaccccugccgcuggcagcggguccgccauugcgagcggaaucgccgucuguaaggugcuccaccuggagggcgaaguuaacaaaauuaagaaugcccuucugucuacaaacaaagcuguggucucccucagcaauggggugucuguucugaccuucaaggugcuugaccugaagaacuacaucgauaaacaacuccugccgauucugaauaagcaguccugcagcaucucuaacauugagacagucaucgaauuucagcagaaaaauaaccggcuccuggagaucacccgcgaguucuccgugaaugcuggagugacgacacccgucagcaccuauaugcuuacaaacuccgaacugcucucucugauuaacgacaugccuaucaccaaugaucaaaagaaacuuaugagcaacaauguucagauugugagacagcaguccuacagcaucauguguauuaucaaggaggaagugcuggccuaugucgugcaacucccccuguacggcguuaucgacaccccuugcuggaaacugcauacaucuccccucuguacgaccaacacaaaggagggcuccaauauuugccugacccggacagaucgcgggugguacugugacaacgcgggaagcgugagcuuuuucccucaggccgaaaccugcaagguccagucuaauagaguguuuugugauacgaugaacuccagaacacugccgucugagguuaaucucugcaacaucgacauuuucaaucccaaauaugauugcaagaucaugaccagcaaaaccgacguguccagcucugucauuacaucccugggcgcuaucgugagcuguuacgggaagaccaaaugcacagccucuaacaagaaucggggaaucauuaagacguuuuccaacggcugugauuaugucagcaauaaagggguggacaccguuuccgugggaaacacacuuuacuaugucaacaagcaagagggcaaaucucuguacgugaagggcgaaccuaucauuaauuucuaugacccccucguuuuuccuagcgaugaguucgacgcuuccaucucucaggugaacgaaaagauuaaucagagccuggccuuuauccgcaaguccgaugagcugcuccacaacgucaauguggggaaaagcaccacaaacauuaugaucaccacgaucauuaucgugauuaucguuauucugcuucugcucaucgccgucggacuguuccuguacugcaaagcuagaugaggacuaguguccaccugucccuccugggcugcuggauugucucguuuuccugccaaauaaacaggaucagcgcuuuacagaucuaaaaaaaaaaaaaaaaaaaaaaaaaaaaaaaaaaaaaaaaaaaaaaaaaaaaaaaaaaaaaaaaugcaucccccccccccccccccccccccccccccccaaaggcucuuuucagagccaccagaauu

SEQ ID NO: 13746 - RNA, 1874 nt, Artificial Sequence
  mRNA product Design e-1 comprising derived and/or modified sequence from HRSV(Memphis-37)__AIY60640.1__F-del_DSCav1_mut0 (opt6)
gggagaauauaagcguuggcggagcgucgguuguagcacucugcgcgcccgcucuucugcugcuguuugucuacuuccuccugcuuccccgccgccgccgccgccaucaagcuuaccauggaacucccaauacuuaaaacaaacgcaaucacaacaauacuagcugcagucacacuaugcuucgccucaucacaaaauauaacagaagaauuuuaucaaucaacaugcuccgcaguaucaaaaggauaucucucugcauuacgaacagguugguacaccucgguaauaacaauagaauuaucaaacauaaaagaaaauaaaugcaauggaaccgaugccaaaguaaaacuaaucaaacaagaacuugacaaauacaaaaacgcaguaacagaacuacaacuauuaaugcaaucaacaccagcagcagguucaggcuccgcaaucgcuucaggaauagccguuuguaaaguacuacacuuagaaggagaaguaaauaaaauaaaaaacgccuuacuaucaacaaacaaagcaguagucucccuuuccaacggaguaucagucuuaacuuuuaaaguacucgacuuaaaaaauuacaucgacaaacaacuacuacccauucuaaauaaacaaucaugcucaauaucaaacaucgaaacaguaaucgaauuucaacaaaaaaauaauagauuacuagaaauaacacgagaauuuuccguaaaugccggaguaacgaccccagucucaacauacauguuaacaaacucagaauuacuaucacucauuaacgauaugccaauaacaaaugaccaaaaaaaacuaaugucaaacaacguccaaauaguacgacaacaaucauacucuaucauguguauaauaaaagaagaaguuuuagcauacguaguacaacuaccacuuuacggagucauagacaccccaugcuggaaacuacacacaucacccuuauguacaacaaacaccaaagaagggucuaacauaugucucacuagaacagaucgaggcugguacugcgacaacgcaggaucaguuagcuuuuucccucaagccgaaaccuguaaaguacaauccaaucgaguauuuugcgacacuaugaacucuagaaccuuacccuccgaaguaaaccuauguaacauagacauauuuaaucccaaauaugauugcaaaaucaugacauccaaaacagauguaucaagcucuguaauaaccucacuaggagcaauaguuucaugcuaugguaaaacaaaaugcaccgccucaaacaaaaauagagggauaaucaaaaccuucucaaauggaugcgacuacguaucaaauaaaggaguagacaccgucuccguaggaaacacacuauacuacguaaacaaacaagaaggaaaaucacuauacguaaaaggagaaccaaucauaaacuucuacgacccacuuguuuucccaucagaugaauuugaugccuccauaucacaaguaaacgaaaaaauaaaccaaucucuagccuucaucagaaaauccgacgaacuuuuacacaacguaaacguagguaaaucaacaaccaacaucaugauaacaacaauaauaauaguaauaauuguaauacuuuuacuacuuaucgccguaggccuauucuuauauuguaaagcaagaugaggacuaguguccaccugucccuccugggcugcuggauugucucguuuuccugccaaauaaacaggaucagcgcuuuacagaucuaaaaaaaaaaaaaaaaaaaaaaaaaaaaaaaaaaaaaaaaaaaaaaaaaaaaaaaaaaaaaaaaugcaucccccccccccccccccccccccccccccccaaaggcucuuuucagagccaccagaauu

SEQ ID NO: 13747 - RNA, 1874 nt, Artificial Sequence
  mRNA product Design e-1 comprising derived and/or modified sequence from HRSV(Memphis-37)__AIY60640.1__F-del_DSCav1_mut0 (opt11)
gggagaauauaagcguuggcggagcgucgguuguagcacucugcgcgcccgcucuucugcugcuguuugucuacuuccuccugcuuccccgccgccgccgccgccaucaagcuuaccauggaacuaccaauccucaaaaccaacgccaucacuacaauccuagccgcgguaacccugugcuucgccuccucacaaaacaucacagaagaauuuuaccaaucaaccugcuccgccguauccaaaggauaccugagcgcccugagaaccggcugguacaccuccgucaucaccauagaacucuccaacaucaaagaaaacaaaugcaacgguacggacgccaaaguuaaacucaucaaacaagaacuugacaaauacaagaacgccgucacagaacugcaacuccucaugcaauccacccccgccgccggcuccggcuccgccauagccuccggcaucgccgucugcaaagucuuacaccuagaaggcgaagucaacaaaaucaaaaacgcacuacuuuccacaaacaaagccgucgucucacucuccaacggcguauccguccucaccuucaaaguacuugaccucaaaaacuacaucgacaaacaacuacuccccauccugaacaaacaauccugcucaaucuccaacaucgaaaccguaaucgaguuccaacagaaaaauaaucgccuccuggagaucacccgcgaguucuccgucaaugcaggagucacaaccccaguaucaaccuacaugcucaccaacuccgaacuccugucgcucaucaacgacaugcccaucacaaacgaccaaaagaaacucauguccaacaacguacaaaucgucagacaacaauccuauucuauaaugugcaucaucaaagaagaaguccucgccuacgucguacaacucccccucuacggcguuaucgacacccccugcuggaaacuccacaccucaccccucugcaccaccaacacaaaagaaggcuccaacaucugccucacucggaccgaccgcggcugguacugcgacaaugccggcagcgucuccuucuucccacaagccgaaaccugcaaaguccaguccaaccgcguauucugcgacacuaugaacuccagaacccuccccuccgaaguaaaccucugcaacaucgacaucuucaacccaaaauacgacugcaaaaucaugaccucaaaaaccgacgucagcucgucagucauaaccagccucggagccauagucucaugcuacggaaaaaccaaaugcaccgccagcaacaaaaaccgcggcauaauaaaaacauucuccaacggcugcgacuauguauccaacaaaggagucgauaccgucuccguaggcaacacccuauacuacgucaacaaacaagaaggcaaaucccucuacgucaaaggugaaccaaucaucaacuucuacgacccucucgucuuccccuccgaugaguucgacgccucaaucagccaaguaaacgaaaagauaaaccaaucacucgccuucauccgcaaauccgacgaacuucuucacaacgucaacgucggcaaaucuaccaccaacauaaugauaaccaccaucaucaucgucaucaucguaauacuccuccuucucaucgccgucggccuauuccuauacugcaaagcccgcuagggacuaguguccaccugucccuccugggcugcuggauugucucguuuuccugccaaauaaacaggaucagcgcuuuacagaucuaaaaaaaaaaaaaaaaaaaaaaaaaaaaaaaaaaaaaaaaaaaaaaaaaaaaaaaaaaaaaaaaugcaucccccccccccccccccccccccccccccccaaaggcucuuuucagagccaccagaauu

SEQ ID NO: 13748 - RNA, 1856 nt, Artificial Sequence
  mRNA product Design e-2 comprising derived and/or modified sequence from HRSV(Memphis-37)__AIY60640.1__F-del_DSCav1_mut0 (opt1)
gggagacccgugacccggaaguuguacggcuacgcgacuuucccucccacaaacccucgcgcccuuccuuuccuacuugggcccggcagaaagcuuaccauggagcugcccauccucaagaccaacgccaucaccacgauccuggccgcggugacccugugcuucgccagcucccagaacaucaccgaggaguucuaccagagcacgugcuccgccgucagcaagggcuaccucuccgcccugcgcaccgggugguacaccagcgugaucaccaucgagcuguccaacaucaaggagaacaagugcaacggcaccgacgccaaggugaagcucaucaagcaggagcuggacaaguacaagaacgcggucacggagcugcagcuccugaugcagagcaccccggccgccggcuccgggagcgcgaucgccuccggcaucgccgucugcaaggugcugcaccucgagggcgaggugaacaagaucaagaacgcccugcuguccaccaacaaggccgucgugagccucuccaacggggugagcguccugaccuucaaggugcuggaccucaagaacuacaucgacaagcagcugcugcccauccugaacaagcagagcugcuccaucagcaacaucgagaccgucaucgaguuccagcagaagaacaaccgccuccuggagaucacgcgggaguucagcgugaacgcgggcgugaccacccccgucuccaccuacaugcugacgaacagcgagcuccugucccugaucaacgacaugccgaucaccaacgaccagaagaagcucaugagcaacaacgugcagaucgugcgccagcaguccuacagcaucaugugcaucaucaaggaggagguccuggccuacguggugcagcugccccucuacggggucaucgacacccccugcuggaagcugcacaccagcccccugugcacgaccaacaccaaggagggcuccaacaucugccucacccggacggaccgcgggugguacugcgacaacgccggcagcguguccuucuucccgcaggccgagaccugcaagguccagagcaaccggguguucugcgacaccaugaacucccggacccugcccagcgaggugaaccucugcaacaucgacaucuucaaccccaaguacgacugcaagaucaugacguccaagaccgacgucagcuccagcgugaucaccucccugggcgccaucgugagcugcuacgggaagaccaagugcacggcgagcaacaagaaccgcggcaucaucaagaccuucuccaacgggugcgacuacgucagcaacaagggcguggacaccguguccgucggcaacacccuguacuacgugaacaagcaggagggcaagagccucuacgugaagggggagcccaucaucaacuucuacgacccgcuggucuuccccuccgacgaguucgacgccagcaucucccaggugaacgagaagaucaaccagagccuggccuucauccggaaguccgacgagcuccugcacaacgugaacgucggcaagagcaccacgaacaucaugaucaccaccaucaucaucgugaucaucgugauccugcugcuccugaucgccgucgggcuguuccucuacugcaaggcccgcugaggacuaguguccaccugucccuccugggcugcuggauugucucguuuuccugccaaauaaacaggaucagcgcuuuacagaucuaaaaaaaaaaaaaaaaaaaaaaaaaaaaaaaaaaaaaaaaaaaaaaaaaaaaaaaaaaaaaaaaugcaucccccccccccccccccccccccccccccccaaaggcucuuuucagagccaccagaauu

SEQ ID NO: 13749 - RNA, 1856 nt, Artificial Sequence
  mRNA product Design e-2 comprising derived and/or modified sequence from HRSV(Memphis-37)__AIY60640.1__F-del_DSCav1_mut0 (opt1)
gggagacccgugacccggaaguuguacggcuacgcgacuuucccucccacaaacccucgcgcccuuccuuuccuacuugggcccggcagaaagcuuaccauggagcugcccauccucaagaccaacgccaucaccacgauccuggccgcggugacccugugcuucgccagcucccagaacaucaccgaggaguucuaccagagcacgugcuccgccgucagcaagggcuaccucuccgcccugcgcaccgggugguacaccagcgugaucaccaucgagcuguccaacaucaaggagaacaagugcaacggcaccgacgccaaggugaagcucaucaagcaggagcuggacaaguacaagaacgcggucacggagcugcagcuccugaugcagagcaccccggccgccggguccggcagcgccaucgcguccgggaucgccgugugcaaggugcugcaccucgagggcgaggucaacaagaucaagaacgcccugcugagcaccaacaaggccguggugucccucagcaacggcgucuccgugcugaccuucaaggugcuggaccucaagaacuacaucgacaagcagcugcugcccauccucaacaagcagagcugcuccaucagcaacaucgagacggucaucgaguuccagcagaagaacaaccggcugcuggagaucacccgcgaguucuccgugaacgccggggugaccacccccgucagcacguacaugcucaccaacagcgagcugcugucccucaucaacgacaugcccaucaccaacgaccagaagaagcugaugagcaacaacgugcagaucgugcggcagcaguccuacagcaucaugugcaucaucaaggaggagguccuggcguacguggugcagcucccgcuguacggcgucaucgacacccccugcuggaagcugcacacgagcccccucugcaccaccaacaccaaggagggguccaacaucugccugacgcgcaccgaccggggcugguacugcgacaacgccggguccgugagcuucuucccccaggccgagaccugcaaggugcaguccaaccgcgucuucugcgacaccaugaacagccggacgcucccguccgaggugaaccugugcaacaucgacaucuucaaccccaaguacgacugcaagaucaugaccagcaagaccgacgucuccagcuccgugaucaccagccugggcgccaucguguccugcuacggcaagacgaagugcaccgccagcaacaagaaccgggggaucaucaagaccuucuccaacggcugcgacuacgucagcaacaaggggguggacaccgugagcgucggcaacacgcucuacuacgugaacaagcaggagggcaagucccuguacgugaagggggagcccaucaucaacuucuacgacccccuggucuucccgagcgacgaguucgacgcguccaucagccaggugaacgagaagaucaaccagucccucgccuucauccgcaagagcgacgagcugcugcacaacgugaacgucggcaaguccaccaccaacaucaugaucaccaccaucaucaucgugaucaucgugauccuccugcugcucaucgccgucgggcuguuccuguacugcaaggcccggugaggacuaguguccaccugucccuccugggcugcuggauugucucguuuuccugccaaauaaacaggaucagcgcuuuacagaucuaaaaaaaaaaaaaaaaaaaaaaaaaaaaaaaaaaaaaaaaaaaaaaaaaaaaaaaaaaaaaaaaugcaucccccccccccccccccccccccccccccccaaaggcucuuuucagagccaccagaauu

SEQ ID NO: 13750 - RNA, 1856 nt, Artificial Sequence
  mRNA product Design e-2 comprising derived and/or modified sequence from HRSV(Memphis-37)__AIY60640.1__F-del_DSCav1_mut0 (opt2)
gggagacccgugacccggaaguuguacggcuacgcgacuuucccucccacaaacccucgcgcccuuccuuuccuacuugggcccggcagaaagcuuaccauggagcuccccauccucaagaccaacgccaucaccaccauccucgccgccgucacccucugcuucgccuccucccagaacaucaccgaggaguucuaccaguccaccugcuccgccgucuccaagggcuaccucuccgcccuccgcaccggcugguacaccuccgucaucaccaucgagcucuccaacaucaaggagaacaagugcaacggcaccgacgccaaggucaagcucaucaagcaggagcucgacaaguacaagaacgccgucaccgagcuccagcuccucaugcaguccacccccgccgccggcuccggcuccgccaucgccuccggcaucgccgucugcaagguccuccaccucgagggcgaggucaacaagaucaagaacgcccuccucuccaccaacaaggccgucgucucccucuccaacggcgucuccguccucaccuucaagguccucgaccucaagaacuacaucgacaagcagcuccuccccauccucaacaagcaguccugcuccaucuccaacaucgagaccgucaucgaguuccagcagaagaacaaccgccuccucgagaucacccgcgaguucuccgucaacgccggcgucaccacccccgucuccaccuacaugcucaccaacuccgagcuccucucccucaucaacgacaugcccaucaccaacgaccagaagaagcucauguccaacaacguccagaucguccgccagcaguccuacuccaucaugugcaucaucaaggaggagguccucgccuacgucguccagcucccccucuacggcgucaucgacacccccugcuggaagcuccacaccuccccccucugcaccaccaacaccaaggagggcuccaacaucugccucacccgcaccgaccgcggcugguacugcgacaacgccggcuccgucuccuucuucccccaggccgagaccugcaagguccaguccaaccgcgucuucugcgacaccaugaacucccgcacccuccccuccgaggucaaccucugcaacaucgacaucuucaaccccaaguacgacugcaagaucaugaccuccaagaccgacgucuccuccuccgucaucaccucccucggcgccaucgucuccugcuacggcaagaccaagugcaccgccuccaacaagaaccgcggcaucaucaagaccuucuccaacggcugcgacuacgucuccaacaagggcgucgacaccgucuccgucggcaacacccucuacuacgucaacaagcaggagggcaagucccucuacgucaagggcgagcccaucaucaacuucuacgacccccucgucuuccccuccgacgaguucgacgccuccaucucccaggucaacgagaagaucaaccagucccucgccuucauccgcaaguccgacgagcuccuccacaacgucaacgucggcaaguccaccaccaacaucaugaucaccaccaucaucaucgucaucaucgucauccuccuccuccucaucgccgucggccucuuccucuacugcaaggcccgcugaggacuaguguccaccugucccuccugggcugcuggauugucucguuuuccugccaaauaaacaggaucagcgcuuuacagaucuaaaaaaaaaaaaaaaaaaaaaaaaaaaaaaaaaaaaaaaaaaaaaaaaaaaaaaaaaaaaaaaaugcaucccccccccccccccccccccccccccccccaaaggcucuuuucagagccaccagaauu

SEQ ID NO: 13751 - RNA, 1856 nt, Artificial Sequence
  mRNA product Design e-2 comprising derived and/or modified sequence from HRSV(Memphis-37)__AIY60640.1__F-del_DSCav1_mut0 (opt3)
gggagacccgugacccggaaguuguacggcuacgcgacuuucccucccacaaacccucgcgcccuuccuuuccuacuugggcccggcagaaagcuuaccauggagcugcccauccucaagaccaacgccauuacaacuauacuugcugcagugacgcugugcuucgccagcucccagaauaucaccgaagaguuuuaccaaucuacauguucagcggucaguaaaggcuauuugagcgcuuuaagaacugggugguacaccuccguuauuacaaucgaacugucuaacauuaaggagaauaaaugcaacggaaccgacgccaaggugaaacuaaucaagcaggaacucgauaaguauaaaaaugcaguaacugagcugcagcuucugaugcagucgaccccugccgcugguucaggcagcgcaauagccagugggaucgcuguguguaaggucuugcaccucgagggagaagugaacaaaauuaagaaugcccugcuguccacaaacaaagcgguugugucucucagcaauggcgucuccguguuaacguucaagguacuggaccuuaagaacuacaucgauaaacaauugcugccaauucuaaauaagcagucaugcaguaucagcaacauagagacuguuauugaauuucagcagaaaaauaacaggcuccuggagaucacccgggaguucucugugaaugccggugucacaacuccgguguccaccuauaugcuuacaaacucagaacuguugagccucauuaacgacaugcccaucaccaaugaucaaaagaaacugaugaguaacaaugugcagaucguccgccagcagucuuacuccauuauguguauaaucaaggaggaaguuuuagcauaugugguacaacugccucucuacggggugauugacacgccaugcuggaaacuucauacuagcccccuguguacaaccaacacuaaggagggaucgaauaucugcuugacacgaaccgaucguggcugguacugugacaacgcuggcucugucuccuuuuucccucaggccgaaacgugcaaggugcagucaaauagaguguuuugugauaccaugaacaguagaacacugccaagcgaggugaaucucugcaacauagacauuuucaaucccaaauaugauugcaagaucaugacuuccaaaaccgacgucucuagcucagugaucacaagucugggggcaauuguauccuguuacggaaagacuaaaugcaccgcuagcaacaagaauagggguaucauuaagacauuuucuaacggcugugauuauguuucaaauaaagggguggacaccgucagugugggaaacacucuuuacuaugucaacaagcaagagggcaaaagccuguacgugaagggugaaccuauaaucaauuucuaugacccauugguuuuuccguccgaugaguucgacgccucuauuucgcagguuaacgagaaaaucaaucagagccucgcguuuauccggaaguccgaugaacuguuacacaacguaaaugucgggaagucaacgacaaacauuaugauaaccacuaucauuaucgugauuaucguuauacugcuacuccugaucgccgugggacuuuucuuguacugcaaagcacgcugaggacuaguguccaccugucccuccugggcugcuggauugucucguuuuccugccaaauaaacaggaucagcgcuuuacagaucuaaaaaaaaaaaaaaaaaaaaaaaaaaaaaaaaaaaaaaaaaaaaaaaaaaaaaaaaaaaaaaaaugcaucccccccccccccccccccccccccccccccaaaggcucuuuucagagccaccagaauu

SEQ ID NO: 13752 - RNA, 1856 nt, Artificial Sequence
  mRNA product Design e-2 comprising derived and/or modified sequence from HRSV(Memphis-37)__AIY60640.1__F-del_DSCav1_mut0 (opt4)
gggagacccgugacccggaaguuguacggcuacgcgacuuucccucccacaaacccucgcgcccuuccuuuccuacuugggcccggcagaaagcuuaccauggagcugcccauccugaagaccaacgccaucaccaccauccuggccgccgugacccugugcuucgccagcagccagaacaucaccgaggaguucuaccagagcaccugcagcgccgugagcaagggcuaccugagcgcccugagaaccggcugguacaccagcgugaucaccaucgagcugagcaacaucaaggagaacaagugcaacggcaccgacgccaaggugaagcugaucaagcaggagcuggacaaguacaagaacgccgugaccgagcugcagcugcugaugcagagcacccccgccgccggcagcggcagcgccaucgccagcggcaucgccgugugcaaggugcugcaccuggagggcgaggugaacaagaucaagaacgcccugcugagcaccaacaaggccguggugagccugagcaacggcgugagcgugcugaccuucaaggugcuggaccugaagaacuacaucgacaagcagcugcugcccauccugaacaagcagagcugcagcaucagcaacaucgagaccgugaucgaguuccagcagaagaacaacagacugcuggagaucaccagagaguucagcgugaacgccggcgugaccacccccgugagcaccuacaugcugaccaacagcgagcugcugagccugaucaacgacaugcccaucaccaacgaccagaagaagcugaugagcaacaacgugcagaucgugagacagcagagcuacagcaucaugugcaucaucaaggaggaggugcuggccuacguggugcagcugccccuguacggcgugaucgacacccccugcuggaagcugcacaccagcccccugugcaccaccaacaccaaggagggcagcaacaucugccugaccagaaccgacagaggcugguacugcgacaacgccggcagcgugagcuucuucccccaggccgagaccugcaaggugcagagcaacagaguguucugcgacaccaugaacagcagaacccugcccagcgaggugaaccugugcaacaucgacaucuucaaccccaaguacgacugcaagaucaugaccagcaagaccgacgugagcagcagcgugaucaccagccugggcgccaucgugagcugcuacggcaagaccaagugcaccgccagcaacaagaacagaggcaucaucaagaccuucagcaacggcugcgacuacgugagcaacaagggcguggacaccgugagcgugggcaacacccuguacuacgugaacaagcaggagggcaagagccuguacgugaagggcgagcccaucaucaacuucuacgacccccugguguuccccagcgacgaguucgacgccagcaucagccaggugaacgagaagaucaaccagagccuggccuucaucagaaagagcgacgagcugcugcacaacgugaacgugggcaagagcaccaccaacaucaugaucaccaccaucaucaucgugaucaucgugauccugcugcugcugaucgccgugggccuguuccuguacugcaaggccagaugaggacuaguguccaccugucccuccugggcugcuggauugucucguuuuccugccaaauaaacaggaucagcgcuuuacagaucuaaaaaaaaaaaaaaaaaaaaaaaaaaaaaaaaaaaaaaaaaaaaaaaaaaaaaaaaaaaaaaaaugcaucccccccccccccccccccccccccccccccaaaggcucuuuucagagccaccagaauu

SEQ ID NO: 13753 - RNA, 1856 nt, Artificial Sequence
  mRNA product Design e-2 comprising derived and/or modified sequence from HRSV(Memphis-37)__AIY60640.1__F-del_DSCav1_mut0 (opt5)
gggagacccgugacccggaaguuguacggcuacgcgacuuucccucccacaaacccucgcgcccuuccuuuccuacuugggcccggcagaaagcuuaccauggagcugcccauccucaagaccaacgccauuacaacgauccuggcugccgugacccuuugcuucgcgagcucccagaauauuacagaagaguuuuaccaaucuaccuguagcgcugucuccaaaggcuaucugucugcccucagaacagggugguacaccagcguuaucacaauugaacuguccaacaucaaggagaauaaaugcaacggaaccgacgccaaggugaaacuuaucaagcaggaacuggauaaguauaaaaaugcugugacggagcuccagcugcugaugcagucuaccccugccgcuggcagcggguccgccauugcgagcggaaucgccgucuguaaggugcuccaccuggagggcgaaguuaacaaaauuaagaaugcccuucugucuacaaacaaagcuguggucucccucagcaauggggugucuguucugaccuucaaggugcuugaccugaagaacuacaucgauaaacaacuccugccgauucugaauaagcaguccugcagcaucucuaacauugagacagucaucgaauuucagcagaaaaauaaccggcuccuggagaucacccgcgaguucuccgugaaugcuggagugacgacacccgucagcaccuauaugcuuacaaacuccgaacugcucucucugauuaacgacaugccuaucaccaaugaucaaaagaaacuuaugagcaacaauguucagauugugagacagcaguccuacagcaucauguguauuaucaaggaggaagugcuggccuaugucgugcaacucccccuguacggcguuaucgacaccccuugcuggaaacugcauacaucuccccucuguacgaccaacacaaaggagggcuccaauauuugccugacccggacagaucgcgggugguacugugacaacgcgggaagcgugagcuuuuucccucaggccgaaaccugcaagguccagucuaauagaguguuuugugauacgaugaacuccagaacacugccgucugagguuaaucucugcaacaucgacauuuucaaucccaaauaugauugcaagaucaugaccagcaaaaccgacguguccagcucugucauuacaucccugggcgcuaucgugagcuguuacgggaagaccaaaugcacagccucuaacaagaaucggggaaucauuaagacguuuuccaacggcugugauuaugucagcaauaaagggguggacaccguuuccgugggaaacacacuuuacuaugucaacaagcaagagggcaaaucucuguacgugaagggcgaaccuaucauuaauuucuaugacccccucguuuuuccuagcgaugaguucgacgcuuccaucucucaggugaacgaaaagauuaaucagagccuggccuuuauccgcaaguccgaugagcugcuccacaacgucaauguggggaaaagcaccacaaacauuaugaucaccacgaucauuaucgugauuaucguuauucugcuucugcucaucgccgucggacuguuccuguacugcaaagcuagaugaggacuaguguccaccugucccuccugggcugcuggauugucucguuuuccugccaaauaaacaggaucagcgcuuuacagaucuaaaaaaaaaaaaaaaaaaaaaaaaaaaaaaaaaaaaaaaaaaaaaaaaaaaaaaaaaaaaaaaaugcaucccccccccccccccccccccccccccccccaaaggcucuuuucagagccaccagaauu

SEQ ID NO: 13754 - RNA, 1856 nt, Artificial Sequence
  mRNA product Design e-2 comprising derived and/or modified sequence from HRSV(Memphis-37)__AIY60640.1__F-del_DSCav1_mut0 (opt6)
gggagacccgugacccggaaguuguacggcuacgcgacuuucccucccacaaacccucgcgcccuuccuuuccuacuugggcccggcagaaagcuuaccauggaacucccaauacuuaaaacaaacgcaaucacaacaauacuagcugcagucacacuaugcuucgccucaucacaaaauauaacagaagaauuuuaucaaucaacaugcuccgcaguaucaaaaggauaucucucugcauuacgaacagguugguacaccucgguaauaacaauagaauuaucaaacauaaaagaaaauaaaugcaauggaaccgaugccaaaguaaaacuaaucaaacaagaacuugacaaauacaaaaacgcaguaacagaacuacaacuauuaaugcaaucaacaccagcagcagguucaggcuccgcaaucgcuucaggaauagccguuuguaaaguacuacacuuagaaggagaaguaaauaaaauaaaaaacgccuuacuaucaacaaacaaagcaguagucucccuuuccaacggaguaucagucuuaacuuuuaaaguacucgacuuaaaaaauuacaucgacaaacaacuacuacccauucuaaauaaacaaucaugcucaauaucaaacaucgaaacaguaaucgaauuucaacaaaaaaauaauagauuacuagaaauaacacgagaauuuuccguaaaugccggaguaacgaccccagucucaacauacauguuaacaaacucagaauuacuaucacucauuaacgauaugccaauaacaaaugaccaaaaaaaacuaaugucaaacaacguccaaauaguacgacaacaaucauacucuaucauguguauaauaaaagaagaaguuuuagcauacguaguacaacuaccacuuuacggagucauagacaccccaugcuggaaacuacacacaucacccuuauguacaacaaacaccaaagaagggucuaacauaugucucacuagaacagaucgaggcugguacugcgacaacgcaggaucaguuagcuuuuucccucaagccgaaaccuguaaaguacaauccaaucgaguauuuugcgacacuaugaacucuagaaccuuacccuccgaaguaaaccuauguaacauagacauauuuaaucccaaauaugauugcaaaaucaugacauccaaaacagauguaucaagcucuguaauaaccucacuaggagcaauaguuucaugcuaugguaaaacaaaaugcaccgccucaaacaaaaauagagggauaaucaaaaccuucucaaauggaugcgacuacguaucaaauaaaggaguagacaccgucuccguaggaaacacacuauacuacguaaacaaacaagaaggaaaaucacuauacguaaaaggagaaccaaucauaaacuucuacgacccacuuguuuucccaucagaugaauuugaugccuccauaucacaaguaaacgaaaaaauaaaccaaucucuagccuucaucagaaaauccgacgaacuuuuacacaacguaaacguagguaaaucaacaaccaacaucaugauaacaacaauaauaauaguaauaauuguaauacuuuuacuacuuaucgccguaggccuauucuuauauuguaaagcaagaugaggacuaguguccaccugucccuccugggcugcuggauugucucguuuuccugccaaauaaacaggaucagcgcuuuacagaucuaaaaaaaaaaaaaaaaaaaaaaaaaaaaaaaaaaaaaaaaaaaaaaaaaaaaaaaaaaaaaaaaugcaucccccccccccccccccccccccccccccccaaaggcucuuuucagagccaccagaauu

SEQ ID NO: 13755 - RNA, 1856 nt, Artificial Sequence
  mRNA product Design e-2 comprising derived and/or modified sequence from HRSV(Memphis-37)__AIY60640.1__F-del_DSCav1_mut0 (opt11)
gggagacccgugacccggaaguuguacggcuacgcgacuuucccucccacaaacccucgcgcccuuccuuuccuacuugggcccggcagaaagcuuaccauggaacuaccaauccucaaaaccaacgccaucacuacaauccuagccgcgguaacccugugcuucgccuccucacaaaacaucacagaagaauuuuaccaaucaaccugcuccgccguauccaaaggauaccugagcgcccugagaaccggcugguacaccuccgucaucaccauagaacucuccaacaucaaagaaaacaaaugcaacgguacggacgccaaaguuaaacucaucaaacaagaacuugacaaauacaagaacgccgucacagaacugcaacuccucaugcaauccacccccgccgccggcuccggcuccgccauagccuccggcaucgccgucugcaaagucuuacaccuagaaggcgaagucaacaaaaucaaaaacgcacuacuuuccacaaacaaagccgucgucucacucuccaacggcguauccguccucaccuucaaaguacuugaccucaaaaacuacaucgacaaacaacuacuccccauccugaacaaacaauccugcucaaucuccaacaucgaaaccguaaucgaguuccaacagaaaaauaaucgccuccuggagaucacccgcgaguucuccgucaaugcaggagucacaaccccaguaucaaccuacaugcucaccaacuccgaacuccugucgcucaucaacgacaugcccaucacaaacgaccaaaagaaacucauguccaacaacguacaaaucgucagacaacaauccuauucuauaaugugcaucaucaaagaagaaguccucgccuacgucguacaacucccccucuacggcguuaucgacacccccugcuggaaacuccacaccucaccccucugcaccaccaacacaaaagaaggcuccaacaucugccucacucggaccgaccgcggcugguacugcgacaaugccggcagcgucuccuucuucccacaagccgaaaccugcaaaguccaguccaaccgcguauucugcgacacuaugaacuccagaacccuccccuccgaaguaaaccucugcaacaucgacaucuucaacccaaaauacgacugcaaaaucaugaccucaaaaaccgacgucagcucgucagucauaaccagccucggagccauagucucaugcuacggaaaaaccaaaugcaccgccagcaacaaaaaccgcggcauaauaaaaacauucuccaacggcugcgacuauguauccaacaaaggagucgauaccgucuccguaggcaacacccuauacuacgucaacaaacaagaaggcaaaucccucuacgucaaaggugaaccaaucaucaacuucuacgacccucucgucuuccccuccgaugaguucgacgccucaaucagccaaguaaacgaaaagauaaaccaaucacucgccuucauccgcaaauccgacgaacuucuucacaacgucaacgucggcaaaucuaccaccaacauaaugauaaccaccaucaucaucgucaucaucguaauacuccuccuucucaucgccgucggccuauuccuauacugcaaagcccgcuagggacuaguguccaccugucccuccugggcugcuggauugucucguuuuccugccaaauaaacaggaucagcgcuuuacagaucuaaaaaaaaaaaaaaaaaaaaaaaaaaaaaaaaaaaaaaaaaaaaaaaaaaaaaaaaaaaaaaaaugcaucccccccccccccccccccccccccccccccaaaggcucuuuucagagccaccagaauu

SEQ ID NO: 13756 - RNA, 1826 nt, Artificial Sequence
  mRNA product Design e-3 comprising derived and/or modified sequence from HRSV(Memphis-37)__AIY60640.1__F-del_DSCav1_mut0 (opt1)
gggagacuuucccauucuguagcagaauuugguguugccuguggucuuggucccgcggagaagcuuaccauggagcugcccauccucaagaccaacgccaucaccacgauccuggccgcggugacccugugcuucgccagcucccagaacaucaccgaggaguucuaccagagcacgugcuccgccgucagcaagggcuaccucuccgcccugcgcaccgggugguacaccagcgugaucaccaucgagcuguccaacaucaaggagaacaagugcaacggcaccgacgccaaggugaagcucaucaagcaggagcuggacaaguacaagaacgcggucacggagcugcagcuccugaugcagagcaccccggccgccggcuccgggagcgcgaucgccuccggcaucgccgucugcaaggugcugcaccucgagggcgaggugaacaagaucaagaacgcccugcuguccaccaacaaggccgucgugagccucuccaacggggugagcguccugaccuucaaggugcuggaccucaagaacuacaucgacaagcagcugcugcccauccugaacaagcagagcugcuccaucagcaacaucgagaccgucaucgaguuccagcagaagaacaaccgccuccuggagaucacgcgggaguucagcgugaacgcgggcgugaccacccccgucuccaccuacaugcugacgaacagcgagcuccugucccugaucaacgacaugccgaucaccaacgaccagaagaagcucaugagcaacaacgugcagaucgugcgccagcaguccuacagcaucaugugcaucaucaaggaggagguccuggccuacguggugcagcugccccucuacggggucaucgacacccccugcuggaagcugcacaccagcccccugugcacgaccaacaccaaggagggcuccaacaucugccucacccggacggaccgcgggugguacugcgacaacgccggcagcguguccuucuucccgcaggccgagaccugcaagguccagagcaaccggguguucugcgacaccaugaacucccggacccugcccagcgaggugaaccucugcaacaucgacaucuucaaccccaaguacgacugcaagaucaugacguccaagaccgacgucagcuccagcgugaucaccucccugggcgccaucgugagcugcuacgggaagaccaagugcacggcgagcaacaagaaccgcggcaucaucaagaccuucuccaacgggugcgacuacgucagcaacaagggcguggacaccguguccgucggcaacacccuguacuacgugaacaagcaggagggcaagagccucuacgugaagggggagcccaucaucaacuucuacgacccgcuggucuuccccuccgacgaguucgacgccagcaucucccaggugaacgagaagaucaaccagagccuggccuucauccggaaguccgacgagcuccugcacaacgugaacgucggcaagagcaccacgaacaucaugaucaccaccaucaucaucgugaucaucgugauccugcugcuccugaucgccgucgggcuguuccucuacugcaaggcccgcugaggacuaguguccaccugucccuccugggcugcuggauugucucguuuuccugccaaauaaacaggaucagcgcuuuacagaucuaaaaaaaaaaaaaaaaaaaaaaaaaaaaaaaaaaaaaaaaaaaaaaaaaaaaaaaaaaaaaaaaugcaucccccccccccccccccccccccccccccccaaaggcucuuuucagagccaccagaauu

SEQ ID NO: 13757 - RNA, 1826 nt, Artificial Sequence
  mRNA product Design e-3 comprising derived and/or modified sequence from HRSV(Memphis-37)__AIY60640.1__F-del_DSCav1_mut0 (opt1)
gggagacuuucccauucuguagcagaauuugguguugccuguggucuuggucccgcggagaagcuuaccauggagcugcccauccucaagaccaacgccaucaccacgauccuggccgcggugacccugugcuucgccagcucccagaacaucaccgaggaguucuaccagagcacgugcuccgccgucagcaagggcuaccucuccgcccugcgcaccgggugguacaccagcgugaucaccaucgagcuguccaacaucaaggagaacaagugcaacggcaccgacgccaaggugaagcucaucaagcaggagcuggacaaguacaagaacgcggucacggagcugcagcuccugaugcagagcaccccggccgccggguccggcagcgccaucgcguccgggaucgccgugugcaaggugcugcaccucgagggcgaggucaacaagaucaagaacgcccugcugagcaccaacaaggccguggugucccucagcaacggcgucuccgugcugaccuucaaggugcuggaccucaagaacuacaucgacaagcagcugcugcccauccucaacaagcagagcugcuccaucagcaacaucgagacggucaucgaguuccagcagaagaacaaccggcugcuggagaucacccgcgaguucuccgugaacgccggggugaccacccccgucagcacguacaugcucaccaacagcgagcugcugucccucaucaacgacaugcccaucaccaacgaccagaagaagcugaugagcaacaacgugcagaucgugcggcagcaguccuacagcaucaugugcaucaucaaggaggagguccuggcguacguggugcagcucccgcuguacggcgucaucgacacccccugcuggaagcugcacacgagcccccucugcaccaccaacaccaaggagggguccaacaucugccugacgcgcaccgaccggggcugguacugcgacaacgccggguccgugagcuucuucccccaggccgagaccugcaaggugcaguccaaccgcgucuucugcgacaccaugaacagccggacgcucccguccgaggugaaccugugcaacaucgacaucuucaaccccaaguacgacugcaagaucaugaccagcaagaccgacgucuccagcuccgugaucaccagccugggcgccaucguguccugcuacggcaagacgaagugcaccgccagcaacaagaaccgggggaucaucaagaccuucuccaacggcugcgacuacgucagcaacaaggggguggacaccgugagcgucggcaacacgcucuacuacgugaacaagcaggagggcaagucccuguacgugaagggggagcccaucaucaacuucuacgacccccuggucuucccgagcgacgaguucgacgcguccaucagccaggugaacgagaagaucaaccagucccucgccuucauccgcaagagcgacgagcugcugcacaacgugaacgucggcaaguccaccaccaacaucaugaucaccaccaucaucaucgugaucaucgugauccuccugcugcucaucgccgucgggcuguuccuguacugcaaggcccggugaggacuaguguccaccugucccuccugggcugcuggauugucucguuuuccugccaaauaaacaggaucagcgcuuuacagaucuaaaaaaaaaaaaaaaaaaaaaaaaaaaaaaaaaaaaaaaaaaaaaaaaaaaaaaaaaaaaaaaaugcaucccccccccccccccccccccccccccccccaaaggcucuuuucagagccaccagaauu

SEQ ID NO: 13758 - RNA, 1826 nt, Artificial Sequence
  mRNA product Design e-3 comprising derived and/or modified sequence from HRSV(Memphis-37)__AIY60640.1__F-del_DSCav1_mut0 (opt2)
gggagacuuucccauucuguagcagaauuugguguugccuguggucuuggucccgcggagaagcuuaccauggagcuccccauccucaagaccaacgccaucaccaccauccucgccgccgucacccucugcuucgccuccucccagaacaucaccgaggaguucuaccaguccaccugcuccgccgucuccaagggcuaccucuccgcccuccgcaccggcugguacaccuccgucaucaccaucgagcucuccaacaucaaggagaacaagugcaacggcaccgacgccaaggucaagcucaucaagcaggagcucgacaaguacaagaacgccgucaccgagcuccagcuccucaugcaguccacccccgccgccggcuccggcuccgccaucgccuccggcaucgccgucugcaagguccuccaccucgagggcgaggucaacaagaucaagaacgcccuccucuccaccaacaaggccgucgucucccucuccaacggcgucuccguccucaccuucaagguccucgaccucaagaacuacaucgacaagcagcuccuccccauccucaacaagcaguccugcuccaucuccaacaucgagaccgucaucgaguuccagcagaagaacaaccgccuccucgagaucacccgcgaguucuccgucaacgccggcgucaccacccccgucuccaccuacaugcucaccaacuccgagcuccucucccucaucaacgacaugcccaucaccaacgaccagaagaagcucauguccaacaacguccagaucguccgccagcaguccuacuccaucaugugcaucaucaaggaggagguccucgccuacgucguccagcucccccucuacggcgucaucgacacccccugcuggaagcuccacaccuccccccucugcaccaccaacaccaaggagggcuccaacaucugccucacccgcaccgaccgcggcugguacugcgacaacgccggcuccgucuccuucuucccccaggccgagaccugcaagguccaguccaaccgcgucuucugcgacaccaugaacucccgcacccuccccuccgaggucaaccucugcaacaucgacaucuucaaccccaaguacgacugcaagaucaugaccuccaagaccgacgucuccuccuccgucaucaccucccucggcgccaucgucuccugcuacggcaagaccaagugcaccgccuccaacaagaaccgcggcaucaucaagaccuucuccaacggcugcgacuacgucuccaacaagggcgucgacaccgucuccgucggcaacacccucuacuacgucaacaagcaggagggcaagucccucuacgucaagggcgagcccaucaucaacuucuacgacccccucgucuuccccuccgacgaguucgacgccuccaucucccaggucaacgagaagaucaaccagucccucgccuucauccgcaaguccgacgagcuccuccacaacgucaacgucggcaaguccaccaccaacaucaugaucaccaccaucaucaucgucaucaucgucauccuccuccuccucaucgccgucggccucuuccucuacugcaaggcccgcugaggacuaguguccaccugucccuccugggcugcuggauugucucguuuuccugccaaauaaacaggaucagcgcuuuacagaucuaaaaaaaaaaaaaaaaaaaaaaaaaaaaaaaaaaaaaaaaaaaaaaaaaaaaaaaaaaaaaaaaugcaucccccccccccccccccccccccccccccccaaaggcucuuuucagagccaccagaauu

SEQ ID NO: 13759 - RNA, 1826 nt, Artificial Sequence
  mRNA product Design e-3 comprising derived and/or modified sequence from HRSV(Memphis-37)__AIY60640.1__F-del_DSCav1_mut0 (opt3)
gggagacuuucccauucuguagcagaauuugguguugccuguggucuuggucccgcggagaagcuuaccauggagcugcccauccucaagaccaacgccauuacaacuauacuugcugcagugacgcugugcuucgccagcucccagaauaucaccgaagaguuuuaccaaucuacauguucagcggucaguaaaggcuauuugagcgcuuuaagaacugggugguacaccuccguuauuacaaucgaacugucuaacauuaaggagaauaaaugcaacggaaccgacgccaaggugaaacuaaucaagcaggaacucgauaaguauaaaaaugcaguaacugagcugcagcuucugaugcagucgaccccugccgcugguucaggcagcgcaauagccagugggaucgcuguguguaaggucuugcaccucgagggagaagugaacaaaauuaagaaugcccugcuguccacaaacaaagcgguugugucucucagcaauggcgucuccguguuaacguucaagguacuggaccuuaagaacuacaucgauaaacaauugcugccaauucuaaauaagcagucaugcaguaucagcaacauagagacuguuauugaauuucagcagaaaaauaacaggcuccuggagaucacccgggaguucucugugaaugccggugucacaacuccgguguccaccuauaugcuuacaaacucagaacuguugagccucauuaacgacaugcccaucaccaaugaucaaaagaaacugaugaguaacaaugugcagaucguccgccagcagucuuacuccauuauguguauaaucaaggaggaaguuuuagcauaugugguacaacugccucucuacggggugauugacacgccaugcuggaaacuucauacuagcccccuguguacaaccaacacuaaggagggaucgaauaucugcuugacacgaaccgaucguggcugguacugugacaacgcuggcucugucuccuuuuucccucaggccgaaacgugcaaggugcagucaaauagaguguuuugugauaccaugaacaguagaacacugccaagcgaggugaaucucugcaacauagacauuuucaaucccaaauaugauugcaagaucaugacuuccaaaaccgacgucucuagcucagugaucacaagucugggggcaauuguauccuguuacggaaagacuaaaugcaccgcuagcaacaagaauagggguaucauuaagacauuuucuaacggcugugauuauguuucaaauaaagggguggacaccgucagugugggaaacacucuuuacuaugucaacaagcaagagggcaaaagccuguacgugaagggugaaccuauaaucaauuucuaugacccauugguuuuuccguccgaugaguucgacgccucuauuucgcagguuaacgagaaaaucaaucagagccucgcguuuauccggaaguccgaugaacuguuacacaacguaaaugucgggaagucaacgacaaacauuaugauaaccacuaucauuaucgugauuaucguuauacugcuacuccugaucgccgugggacuuuucuuguacugcaaagcacgcugaggacuaguguccaccugucccuccugggcugcuggauugucucguuuuccugccaaauaaacaggaucagcgcuuuacagaucuaaaaaaaaaaaaaaaaaaaaaaaaaaaaaaaaaaaaaaaaaaaaaaaaaaaaaaaaaaaaaaaaugcaucccccccccccccccccccccccccccccccaaaggcucuuuucagagccaccagaauu

SEQ ID NO: 13760 - RNA, 1826 nt, Artificial Sequence
  mRNA product Design e-3 comprising derived and/or modified sequence from HRSV(Memphis-37)__AIY60640.1__F-del_DSCav1_mut0 (opt4)
gggagacuuucccauucuguagcagaauuugguguugccuguggucuuggucccgcggagaagcuuaccauggagcugcccauccugaagaccaacgccaucaccaccauccuggccgccgugacccugugcuucgccagcagccagaacaucaccgaggaguucuaccagagcaccugcagcgccgugagcaagggcuaccugagcgcccugagaaccggcugguacaccagcgugaucaccaucgagcugagcaacaucaaggagaacaagugcaacggcaccgacgccaaggugaagcugaucaagcaggagcuggacaaguacaagaacgccgugaccgagcugcagcugcugaugcagagcacccccgccgccggcagcggcagcgccaucgccagcggcaucgccgugugcaaggugcugcaccuggagggcgaggugaacaagaucaagaacgcccugcugagcaccaacaaggccguggugagccugagcaacggcgugagcgugcugaccuucaaggugcuggaccugaagaacuacaucgacaagcagcugcugcccauccugaacaagcagagcugcagcaucagcaacaucgagaccgugaucgaguuccagcagaagaacaacagacugcuggagaucaccagagaguucagcgugaacgccggcgugaccacccccgugagcaccuacaugcugaccaacagcgagcugcugagccugaucaacgacaugcccaucaccaacgaccagaagaagcugaugagcaacaacgugcagaucgugagacagcagagcuacagcaucaugugcaucaucaaggaggaggugcuggccuacguggugcagcugccccuguacggcgugaucgacacccccugcuggaagcugcacaccagcccccugugcaccaccaacaccaaggagggcagcaacaucugccugaccagaaccgacagaggcugguacugcgacaacgccggcagcgugagcuucuucccccaggccgagaccugcaaggugcagagcaacagaguguucugcgacaccaugaacagcagaacccugcccagcgaggugaaccugugcaacaucgacaucuucaaccccaaguacgacugcaagaucaugaccagcaagaccgacgugagcagcagcgugaucaccagccugggcgccaucgugagcugcuacggcaagaccaagugcaccgccagcaacaagaacagaggcaucaucaagaccuucagcaacggcugcgacuacgugagcaacaagggcguggacaccgugagcgugggcaacacccuguacuacgugaacaagcaggagggcaagagccuguacgugaagggcgagcccaucaucaacuucuacgacccccugguguuccccagcgacgaguucgacgccagcaucagccaggugaacgagaagaucaaccagagccuggccuucaucagaaagagcgacgagcugcugcacaacgugaacgugggcaagagcaccaccaacaucaugaucaccaccaucaucaucgugaucaucgugauccugcugcugcugaucgccgugggccuguuccuguacugcaaggccagaugaggacuaguguccaccugucccuccugggcugcuggauugucucguuuuccugccaaauaaacaggaucagcgcuuuacagaucuaaaaaaaaaaaaaaaaaaaaaaaaaaaaaaaaaaaaaaaaaaaaaaaaaaaaaaaaaaaaaaaaugcaucccccccccccccccccccccccccccccccaaaggcucuuuucagagccaccagaauu

SEQ ID NO: 13761 - RNA, 1826 nt, Artificial Sequence
  mRNA product Design e-3 comprising derived and/or modified sequence from HRSV(Memphis-37)__AIY60640.1__F-del_DSCav1_mut0 (opt5)
gggagacuuucccauucuguagcagaauuugguguugccuguggucuuggucccgcggagaagcuuaccauggagcugcccauccucaagaccaacgccauuacaacgauccuggcugccgugacccuuugcuucgcgagcucccagaauauuacagaagaguuuuaccaaucuaccuguagcgcugucuccaaaggcuaucugucugcccucagaacagggugguacaccagcguuaucacaauugaacuguccaacaucaaggagaauaaaugcaacggaaccgacgccaaggugaaacuuaucaagcaggaacuggauaaguauaaaaaugcugugacggagcuccagcugcugaugcagucuaccccugccgcuggcagcggguccgccauugcgagcggaaucgccgucuguaaggugcuccaccuggagggcgaaguuaacaaaauuaagaaugcccuucugucuacaaacaaagcuguggucucccucagcaauggggugucuguucugaccuucaaggugcuugaccugaagaacuacaucgauaaacaacuccugccgauucugaauaagcaguccugcagcaucucuaacauugagacagucaucgaauuucagcagaaaaauaaccggcuccuggagaucacccgcgaguucuccgugaaugcuggagugacgacacccgucagcaccuauaugcuuacaaacuccgaacugcucucucugauuaacgacaugccuaucaccaaugaucaaaagaaacuuaugagcaacaauguucagauugugagacagcaguccuacagcaucauguguauuaucaaggaggaagugcuggccuaugucgugcaacucccccuguacggcguuaucgacaccccuugcuggaaacugcauacaucuccccucuguacgaccaacacaaaggagggcuccaauauuugccugacccggacagaucgcgggugguacugugacaacgcgggaagcgugagcuuuuucccucaggccgaaaccugcaagguccagucuaauagaguguuuugugauacgaugaacuccagaacacugccgucugagguuaaucucugcaacaucgacauuuucaaucccaaauaugauugcaagaucaugaccagcaaaaccgacguguccagcucugucauuacaucccugggcgcuaucgugagcuguuacgggaagaccaaaugcacagccucuaacaagaaucggggaaucauuaagacguuuuccaacggcugugauuaugucagcaauaaagggguggacaccguuuccgugggaaacacacuuuacuaugucaacaagcaagagggcaaaucucuguacgugaagggcgaaccuaucauuaauuucuaugacccccucguuuuuccuagcgaugaguucgacgcuuccaucucucaggugaacgaaaagauuaaucagagccuggccuuuauccgcaaguccgaugagcugcuccacaacgucaauguggggaaaagcaccacaaacauuaugaucaccacgaucauuaucgugauuaucguuauucugcuucugcucaucgccgucggacuguuccuguacugcaaagcuagaugaggacuaguguccaccugucccuccugggcugcuggauugucucguuuuccugccaaauaaacaggaucagcgcuuuacagaucuaaaaaaaaaaaaaaaaaaaaaaaaaaaaaaaaaaaaaaaaaaaaaaaaaaaaaaaaaaaaaaaaugcaucccccccccccccccccccccccccccccccaaaggcucuuuucagagccaccagaauu

SEQ ID NO: 13762 - RNA, 1826 nt, Artificial Sequence
  mRNA product Design e-3 comprising derived and/or modified sequence from HRSV(Memphis-37)__AIY60640.1__F-del_DSCav1_mut0 (opt6)
gggagacuuucccauucuguagcagaauuugguguugccuguggucuuggucccgcggagaagcuuaccauggaacucccaauacuuaaaacaaacgcaaucacaacaauacuagcugcagucacacuaugcuucgccucaucacaaaauauaacagaagaauuuuaucaaucaacaugcuccgcaguaucaaaaggauaucucucugcauuacgaacagguugguacaccucgguaauaacaauagaauuaucaaacauaaaagaaaauaaaugcaauggaaccgaugccaaaguaaaacuaaucaaacaagaacuugacaaauacaaaaacgcaguaacagaacuacaacuauuaaugcaaucaacaccagcagcagguucaggcuccgcaaucgcuucaggaauagccguuuguaaaguacuacacuuagaaggagaaguaaauaaaauaaaaaacgccuuacuaucaacaaacaaagcaguagucucccuuuccaacggaguaucagucuuaacuuuuaaaguacucgacuuaaaaaauuacaucgacaaacaacuacuacccauucuaaauaaacaaucaugcucaauaucaaacaucgaaacaguaaucgaauuucaacaaaaaaauaauagauuacuagaaauaacacgagaauuuuccguaaaugccggaguaacgaccccagucucaacauacauguuaacaaacucagaauuacuaucacucauuaacgauaugccaauaacaaaugaccaaaaaaaacuaaugucaaacaacguccaaauaguacgacaacaaucauacucuaucauguguauaauaaaagaagaaguuuuagcauacguaguacaacuaccacuuuacggagucauagacaccccaugcuggaaacuacacacaucacccuuauguacaacaaacaccaaagaagggucuaacauaugucucacuagaacagaucgaggcugguacugcgacaacgcaggaucaguuagcuuuuucccucaagccgaaaccuguaaaguacaauccaaucgaguauuuugcgacacuaugaacucuagaaccuuacccuccgaaguaaaccuauguaacauagacauauuuaaucccaaauaugauugcaaaaucaugacauccaaaacagauguaucaagcucuguaauaaccucacuaggagcaauaguuucaugcuaugguaaaacaaaaugcaccgccucaaacaaaaauagagggauaaucaaaaccuucucaaauggaugcgacuacguaucaaauaaaggaguagacaccgucuccguaggaaacacacuauacuacguaaacaaacaagaaggaaaaucacuauacguaaaaggagaaccaaucauaaacuucuacgacccacuuguuuucccaucagaugaauuugaugccuccauaucacaaguaaacgaaaaaauaaaccaaucucuagccuucaucagaaaauccgacgaacuuuuacacaacguaaacguagguaaaucaacaaccaacaucaugauaacaacaauaauaauaguaauaauuguaauacuuuuacuacuuaucgccguaggccuauucuuauauuguaaagcaagaugaggacuaguguccaccugucccuccugggcugcuggauugucucguuuuccugccaaauaaacaggaucagcgcuuuacagaucuaaaaaaaaaaaaaaaaaaaaaaaaaaaaaaaaaaaaaaaaaaaaaaaaaaaaaaaaaaaaaaaaugcaucccccccccccccccccccccccccccccccaaaggcucuuuucagagccaccagaauu

SEQ ID NO: 13763 - RNA, 1826 nt, Artificial Sequence
  mRNA product Design e-3 comprising derived and/or modified sequence from HRSV(Memphis-37)__AIY60640.1__F-del_DSCav1_mut0 (opt11)
gggagacuuucccauucuguagcagaauuugguguugccuguggucuuggucccgcggagaagcuuaccauggaacuaccaauccucaaaaccaacgccaucacuacaauccuagccgcgguaacccugugcuucgccuccucacaaaacaucacagaagaauuuuaccaaucaaccugcuccgccguauccaaaggauaccugagcgcccugagaaccggcugguacaccuccgucaucaccauagaacucuccaacaucaaagaaaacaaaugcaacgguacggacgccaaaguuaaacucaucaaacaagaacuugacaaauacaagaacgccgucacagaacugcaacuccucaugcaauccacccccgccgccggcuccggcuccgccauagccuccggcaucgccgucugcaaagucuuacaccuagaaggcgaagucaacaaaaucaaaaacgcacuacuuuccacaaacaaagccgucgucucacucuccaacggcguauccguccucaccuucaaaguacuugaccucaaaaacuacaucgacaaacaacuacuccccauccugaacaaacaauccugcucaaucuccaacaucgaaaccguaaucgaguuccaacagaaaaauaaucgccuccuggagaucacccgcgaguucuccgucaaugcaggagucacaaccccaguaucaaccuacaugcucaccaacuccgaacuccugucgcucaucaacgacaugcccaucacaaacgaccaaaagaaacucauguccaacaacguacaaaucgucagacaacaauccuauucuauaaugugcaucaucaaagaagaaguccucgccuacgucguacaacucccccucuacggcguuaucgacacccccugcuggaaacuccacaccucaccccucugcaccaccaacacaaaagaaggcuccaacaucugccucacucggaccgaccgcggcugguacugcgacaaugccggcagcgucuccuucuucccacaagccgaaaccugcaaaguccaguccaaccgcguauucugcgacacuaugaacuccagaacccuccccuccgaaguaaaccucugcaacaucgacaucuucaacccaaaauacgacugcaaaaucaugaccucaaaaaccgacgucagcucgucagucauaaccagccucggagccauagucucaugcuacggaaaaaccaaaugcaccgccagcaacaaaaaccgcggcauaauaaaaacauucuccaacggcugcgacuauguauccaacaaaggagucgauaccgucuccguaggcaacacccuauacuacgucaacaaacaagaaggcaaaucccucuacgucaaaggugaaccaaucaucaacuucuacgacccucucgucuuccccuccgaugaguucgacgccucaaucagccaaguaaacgaaaagauaaaccaaucacucgccuucauccgcaaauccgacgaacuucuucacaacgucaacgucggcaaaucuaccaccaacauaaugauaaccaccaucaucaucgucaucaucguaauacuccuccuucucaucgccgucggccuauuccuauacugcaaagcccgcuagggacuaguguccaccugucccuccugggcugcuggauugucucguuuuccugccaaauaaacaggaucagcgcuuuacagaucuaaaaaaaaaaaaaaaaaaaaaaaaaaaaaaaaaaaaaaaaaaaaaaaaaaaaaaaaaaaaaaaaugcaucccccccccccccccccccccccccccccccaaaggcucuuuucagagccaccagaauu

SEQ ID NO: 13764 - RNA, 1880 nt, Artificial Sequence
  mRNA product Design e-4 comprising derived and/or modified sequence from HRSV(Memphis-37)__AIY60640.1__F-del_DSCav1_mut0 (opt1)
gggagacuccugucgggcggaaguaggaggaguagaguuuaaaaacaguacucuuuuuccgguucgggacguaguugaagcaacgacaagccggauaaccgcucuugagacaggaagcuuaccauggagcugcccauccucaagaccaacgccaucaccacgauccuggccgcggugacccugugcuucgccagcucccagaacaucaccgaggaguucuaccagagcacgugcuccgccgucagcaagggcuaccucuccgcccugcgcaccgggugguacaccagcgugaucaccaucgagcuguccaacaucaaggagaacaagugcaacggcaccgacgccaaggugaagcucaucaagcaggagcuggacaaguacaagaacgcggucacggagcugcagcuccugaugcagagcaccccggccgccggcuccgggagcgcgaucgccuccggcaucgccgucugcaaggugcugcaccucgagggcgaggugaacaagaucaagaacgcccugcuguccaccaacaaggccgucgugagccucuccaacggggugagcguccugaccuucaaggugcuggaccucaagaacuacaucgacaagcagcugcugcccauccugaacaagcagagcugcuccaucagcaacaucgagaccgucaucgaguuccagcagaagaacaaccgccuccuggagaucacgcgggaguucagcgugaacgcgggcgugaccacccccgucuccaccuacaugcugacgaacagcgagcuccugucccugaucaacgacaugccgaucaccaacgaccagaagaagcucaugagcaacaacgugcagaucgugcgccagcaguccuacagcaucaugugcaucaucaaggaggagguccuggccuacguggugcagcugccccucuacggggucaucgacacccccugcuggaagcugcacaccagcccccugugcacgaccaacaccaaggagggcuccaacaucugccucacccggacggaccgcgggugguacugcgacaacgccggcagcguguccuucuucccgcaggccgagaccugcaagguccagagcaaccggguguucugcgacaccaugaacucccggacccugcccagcgaggugaaccucugcaacaucgacaucuucaaccccaaguacgacugcaagaucaugacguccaagaccgacgucagcuccagcgugaucaccucccugggcgccaucgugagcugcuacgggaagaccaagugcacggcgagcaacaagaaccgcggcaucaucaagaccuucuccaacgggugcgacuacgucagcaacaagggcguggacaccguguccgucggcaacacccuguacuacgugaacaagcaggagggcaagagccucuacgugaagggggagcccaucaucaacuucuacgacccgcuggucuuccccuccgacgaguucgacgccagcaucucccaggugaacgagaagaucaaccagagccuggccuucauccggaaguccgacgagcuccugcacaacgugaacgucggcaagagcaccacgaacaucaugaucaccaccaucaucaucgugaucaucgugauccugcugcuccugaucgccgucgggcuguuccucuacugcaaggcccgcugaggacuaguguccaccugucccuccugggcugcuggauugucucguuuuccugccaaauaaacaggaucagcgcuuuacagaucuaaaaaaaaaaaaaaaaaaaaaaaaaaaaaaaaaaaaaaaaaaaaaaaaaaaaaaaaaaaaaaaaugcaucccccccccccccccccccccccccccccccaaaggcucuuuucagagccaccagaauu

SEQ ID NO: 13765 - RNA, 1880 nt, Artificial Sequence
  mRNA product Design e-4 comprising derived and/or modified sequence from HRSV(Memphis-37)__AIY60640.1__F-del_DSCav1_mut0 (opt1)
gggagacuccugucgggcggaaguaggaggaguagaguuuaaaaacaguacucuuuuuccgguucgggacguaguugaagcaacgacaagccggauaaccgcucuugagacaggaagcuuaccauggagcugcccauccucaagaccaacgccaucaccacgauccuggccgcggugacccugugcuucgccagcucccagaacaucaccgaggaguucuaccagagcacgugcuccgccgucagcaagggcuaccucuccgcccugcgcaccgggugguacaccagcgugaucaccaucgagcuguccaacaucaaggagaacaagugcaacggcaccgacgccaaggugaagcucaucaagcaggagcuggacaaguacaagaacgcggucacggagcugcagcuccugaugcagagcaccccggccgccggguccggcagcgccaucgcguccgggaucgccgugugcaaggugcugcaccucgagggcgaggucaacaagaucaagaacgcccugcugagcaccaacaaggccguggugucccucagcaacggcgucuccgugcugaccuucaaggugcuggaccucaagaacuacaucgacaagcagcugcugcccauccucaacaagcagagcugcuccaucagcaacaucgagacggucaucgaguuccagcagaagaacaaccggcugcuggagaucacccgcgaguucuccgugaacgccggggugaccacccccgucagcacguacaugcucaccaacagcgagcugcugucccucaucaacgacaugcccaucaccaacgaccagaagaagcugaugagcaacaacgugcagaucgugcggcagcaguccuacagcaucaugugcaucaucaaggaggagguccuggcguacguggugcagcucccgcuguacggcgucaucgacacccccugcuggaagcugcacacgagcccccucugcaccaccaacaccaaggagggguccaacaucugccugacgcgcaccgaccggggcugguacugcgacaacgccggguccgugagcuucuucccccaggccgagaccugcaaggugcaguccaaccgcgucuucugcgacaccaugaacagccggacgcucccguccgaggugaaccugugcaacaucgacaucuucaaccccaaguacgacugcaagaucaugaccagcaagaccgacgucuccagcuccgugaucaccagccugggcgccaucguguccugcuacggcaagacgaagugcaccgccagcaacaagaaccgggggaucaucaagaccuucuccaacggcugcgacuacgucagcaacaaggggguggacaccgugagcgucggcaacacgcucuacuacgugaacaagcaggagggcaagucccuguacgugaagggggagcccaucaucaacuucuacgacccccuggucuucccgagcgacgaguucgacgcguccaucagccaggugaacgagaagaucaaccagucccucgccuucauccgcaagagcgacgagcugcugcacaacgugaacgucggcaaguccaccaccaacaucaugaucaccaccaucaucaucgugaucaucgugauccuccugcugcucaucgccgucgggcuguuccuguacugcaaggcccggugaggacuaguguccaccugucccuccugggcugcuggauugucucguuuuccugccaaauaaacaggaucagcgcuuuacagaucuaaaaaaaaaaaaaaaaaaaaaaaaaaaaaaaaaaaaaaaaaaaaaaaaaaaaaaaaaaaaaaaaugcaucccccccccccccccccccccccccccccccaaaggcucuuuucagagccaccagaauu

SEQ ID NO: 13766 - RNA, 1880 nt, Artificial Sequence
  mRNA product Design e-4 comprising derived and/or modified sequence from HRSV(Memphis-37)__AIY60640.1__F-del_DSCav1_mut0 (opt2)
gggagacuccugucgggcggaaguaggaggaguagaguuuaaaaacaguacucuuuuuccgguucgggacguaguugaagcaacgacaagccggauaaccgcucuugagacaggaagcuuaccauggagcuccccauccucaagaccaacgccaucaccaccauccucgccgccgucacccucugcuucgccuccucccagaacaucaccgaggaguucuaccaguccaccugcuccgccgucuccaagggcuaccucuccgcccuccgcaccggcugguacaccuccgucaucaccaucgagcucuccaacaucaaggagaacaagugcaacggcaccgacgccaaggucaagcucaucaagcaggagcucgacaaguacaagaacgccgucaccgagcuccagcuccucaugcaguccacccccgccgccggcuccggcuccgccaucgccuccggcaucgccgucugcaagguccuccaccucgagggcgaggucaacaagaucaagaacgcccuccucuccaccaacaaggccgucgucucccucuccaacggcgucuccguccucaccuucaagguccucgaccucaagaacuacaucgacaagcagcuccuccccauccucaacaagcaguccugcuccaucuccaacaucgagaccgucaucgaguuccagcagaagaacaaccgccuccucgagaucacccgcgaguucuccgucaacgccggcgucaccacccccgucuccaccuacaugcucaccaacuccgagcuccucucccucaucaacgacaugcccaucaccaacgaccagaagaagcucauguccaacaacguccagaucguccgccagcaguccuacuccaucaugugcaucaucaaggaggagguccucgccuacgucguccagcucccccucuacggcgucaucgacacccccugcuggaagcuccacaccuccccccucugcaccaccaacaccaaggagggcuccaacaucugccucacccgcaccgaccgcggcugguacugcgacaacgccggcuccgucuccuucuucccccaggccgagaccugcaagguccaguccaaccgcgucuucugcgacaccaugaacucccgcacccuccccuccgaggucaaccucugcaacaucgacaucuucaaccccaaguacgacugcaagaucaugaccuccaagaccgacgucuccuccuccgucaucaccucccucggcgccaucgucuccugcuacggcaagaccaagugcaccgccuccaacaagaaccgcggcaucaucaagaccuucuccaacggcugcgacuacgucuccaacaagggcgucgacaccgucuccgucggcaacacccucuacuacgucaacaagcaggagggcaagucccucuacgucaagggcgagcccaucaucaacuucuacgacccccucgucuuccccuccgacgaguucgacgccuccaucucccaggucaacgagaagaucaaccagucccucgccuucauccgcaaguccgacgagcuccuccacaacgucaacgucggcaaguccaccaccaacaucaugaucaccaccaucaucaucgucaucaucgucauccuccuccuccucaucgccgucggccucuuccucuacugcaaggcccgcugaggacuaguguccaccugucccuccugggcugcuggauugucucguuuuccugccaaauaaacaggaucagcgcuuuacagaucuaaaaaaaaaaaaaaaaaaaaaaaaaaaaaaaaaaaaaaaaaaaaaaaaaaaaaaaaaaaaaaaaugcaucccccccccccccccccccccccccccccccaaaggcucuuuucagagccaccagaauu

SEQ ID NO: 13767 - RNA, 1880 nt, Artificial Sequence
  mRNA product Design e-4 comprising derived and/or modified sequence from HRSV(Memphis-37)__AIY60640.1__F-del_DSCav1_mut0 (opt3)
gggagacuccugucgggcggaaguaggaggaguagaguuuaaaaacaguacucuuuuuccgguucgggacguaguugaagcaacgacaagccggauaaccgcucuugagacaggaagcuuaccauggagcugcccauccucaagaccaacgccauuacaacuauacuugcugcagugacgcugugcuucgccagcucccagaauaucaccgaagaguuuuaccaaucuacauguucagcggucaguaaaggcuauuugagcgcuuuaagaacugggugguacaccuccguuauuacaaucgaacugucuaacauuaaggagaauaaaugcaacggaaccgacgccaaggugaaacuaaucaagcaggaacucgauaaguauaaaaaugcaguaacugagcugcagcuucugaugcagucgaccccugccgcugguucaggcagcgcaauagccagugggaucgcuguguguaaggucuugcaccucgagggagaagugaacaaaauuaagaaugcccugcuguccacaaacaaagcgguugugucucucagcaauggcgucuccguguuaacguucaagguacuggaccuuaagaacuacaucgauaaacaauugcugccaauucuaaauaagcagucaugcaguaucagcaacauagagacuguuauugaauuucagcagaaaaauaacaggcuccuggagaucacccgggaguucucugugaaugccggugucacaacuccgguguccaccuauaugcuuacaaacucagaacuguugagccucauuaacgacaugcccaucaccaaugaucaaaagaaacugaugaguaacaaugugcagaucguccgccagcagucuuacuccauuauguguauaaucaaggaggaaguuuuagcauaugugguacaacugccucucuacggggugauugacacgccaugcuggaaacuucauacuagcccccuguguacaaccaacacuaaggagggaucgaauaucugcuugacacgaaccgaucguggcugguacugugacaacgcuggcucugucuccuuuuucccucaggccgaaacgugcaaggugcagucaaauagaguguuuugugauaccaugaacaguagaacacugccaagcgaggugaaucucugcaacauagacauuuucaaucccaaauaugauugcaagaucaugacuuccaaaaccgacgucucuagcucagugaucacaagucugggggcaauuguauccuguuacggaaagacuaaaugcaccgcuagcaacaagaauagggguaucauuaagacauuuucuaacggcugugauuauguuucaaauaaagggguggacaccgucagugugggaaacacucuuuacuaugucaacaagcaagagggcaaaagccuguacgugaagggugaaccuauaaucaauuucuaugacccauugguuuuuccguccgaugaguucgacgccucuauuucgcagguuaacgagaaaaucaaucagagccucgcguuuauccggaaguccgaugaacuguuacacaacguaaaugucgggaagucaacgacaaacauuaugauaaccacuaucauuaucgugauuaucguuauacugcuacuccugaucgccgugggacuuuucuuguacugcaaagcacgcugaggacuaguguccaccugucccuccugggcugcuggauugucucguuuuccugccaaauaaacaggaucagcgcuuuacagaucuaaaaaaaaaaaaaaaaaaaaaaaaaaaaaaaaaaaaaaaaaaaaaaaaaaaaaaaaaaaaaaaaugcaucccccccccccccccccccccccccccccccaaaggcucuuuucagagccaccagaauu

SEQ ID NO: 13768 - RNA, 1880 nt, Artificial Sequence
  mRNA product Design e-4 comprising derived and/or modified sequence from HRSV(Memphis-37)__AIY60640.1__F-del_DSCav1_mut0 (opt4)
gggagacuccugucgggcggaaguaggaggaguagaguuuaaaaacaguacucuuuuuccgguucgggacguaguugaagcaacgacaagccggauaaccgcucuugagacaggaagcuuaccauggagcugcccauccugaagaccaacgccaucaccaccauccuggccgccgugacccugugcuucgccagcagccagaacaucaccgaggaguucuaccagagcaccugcagcgccgugagcaagggcuaccugagcgcccugagaaccggcugguacaccagcgugaucaccaucgagcugagcaacaucaaggagaacaagugcaacggcaccgacgccaaggugaagcugaucaagcaggagcuggacaaguacaagaacgccgugaccgagcugcagcugcugaugcagagcacccccgccgccggcagcggcagcgccaucgccagcggcaucgccgugugcaaggugcugcaccuggagggcgaggugaacaagaucaagaacgcccugcugagcaccaacaaggccguggugagccugagcaacggcgugagcgugcugaccuucaaggugcuggaccugaagaacuacaucgacaagcagcugcugcccauccugaacaagcagagcugcagcaucagcaacaucgagaccgugaucgaguuccagcagaagaacaacagacugcuggagaucaccagagaguucagcgugaacgccggcgugaccacccccgugagcaccuacaugcugaccaacagcgagcugcugagccugaucaacgacaugcccaucaccaacgaccagaagaagcugaugagcaacaacgugcagaucgugagacagcagagcuacagcaucaugugcaucaucaaggaggaggugcuggccuacguggugcagcugccccuguacggcgugaucgacacccccugcuggaagcugcacaccagcccccugugcaccaccaacaccaaggagggcagcaacaucugccugaccagaaccgacagaggcugguacugcgacaacgccggcagcgugagcuucuucccccaggccgagaccugcaaggugcagagcaacagaguguucugcgacaccaugaacagcagaacccugcccagcgaggugaaccugugcaacaucgacaucuucaaccccaaguacgacugcaagaucaugaccagcaagaccgacgugagcagcagcgugaucaccagccugggcgccaucgugagcugcuacggcaagaccaagugcaccgccagcaacaagaacagaggcaucaucaagaccuucagcaacggcugcgacuacgugagcaacaagggcguggacaccgugagcgugggcaacacccuguacuacgugaacaagcaggagggcaagagccuguacgugaagggcgagcccaucaucaacuucuacgacccccugguguuccccagcgacgaguucgacgccagcaucagccaggugaacgagaagaucaaccagagccuggccuucaucagaaagagcgacgagcugcugcacaacgugaacgugggcaagagcaccaccaacaucaugaucaccaccaucaucaucgugaucaucgugauccugcugcugcugaucgccgugggccuguuccuguacugcaaggccagaugaggacuaguguccaccugucccuccugggcugcuggauugucucguuuuccugccaaauaaacaggaucagcgcuuuacagaucuaaaaaaaaaaaaaaaaaaaaaaaaaaaaaaaaaaaaaaaaaaaaaaaaaaaaaaaaaaaaaaaaugcaucccccccccccccccccccccccccccccccaaaggcucuuuucagagccaccagaauu

SEQ ID NO: 13769 - RNA, 1880 nt, Artificial Sequence
  mRNA product Design e-4 comprising derived and/or modified sequence from HRSV(Memphis-37)__AIY60640.1__F-del_DSCav1_mut0 (opt5)
gggagacuccugucgggcggaaguaggaggaguagaguuuaaaaacaguacucuuuuuccgguucgggacguaguugaagcaacgacaagccggauaaccgcucuugagacaggaagcuuaccauggagcugcccauccucaagaccaacgccauuacaacgauccuggcugccgugacccuuugcuucgcgagcucccagaauauuacagaagaguuuuaccaaucuaccuguagcgcugucuccaaaggcuaucugucugcccucagaacagggugguacaccagcguuaucacaauugaacuguccaacaucaaggagaauaaaugcaacggaaccgacgccaaggugaaacuuaucaagcaggaacuggauaaguauaaaaaugcugugacggagcuccagcugcugaugcagucuaccccugccgcuggcagcggguccgccauugcgagcggaaucgccgucuguaaggugcuccaccuggagggcgaaguuaacaaaauuaagaaugcccuucugucuacaaacaaagcuguggucucccucagcaauggggugucuguucugaccuucaaggugcuugaccugaagaacuacaucgauaaacaacuccugccgauucugaauaagcaguccugcagcaucucuaacauugagacagucaucgaauuucagcagaaaaauaaccggcuccuggagaucacccgcgaguucuccgugaaugcuggagugacgacacccgucagcaccuauaugcuuacaaacuccgaacugcucucucugauuaacgacaugccuaucaccaaugaucaaaagaaacuuaugagcaacaauguucagauugugagacagcaguccuacagcaucauguguauuaucaaggaggaagugcuggccuaugucgugcaacucccccuguacggcguuaucgacaccccuugcuggaaacugcauacaucuccccucuguacgaccaacacaaaggagggcuccaauauuugccugacccggacagaucgcgggugguacugugacaacgcgggaagcgugagcuuuuucccucaggccgaaaccugcaagguccagucuaauagaguguuuugugauacgaugaacuccagaacacugccgucugagguuaaucucugcaacaucgacauuuucaaucccaaauaugauugcaagaucaugaccagcaaaaccgacguguccagcucugucauuacaucccugggcgcuaucgugagcuguuacgggaagaccaaaugcacagccucuaacaagaaucggggaaucauuaagacguuuuccaacggcugugauuaugucagcaauaaagggguggacaccguuuccgugggaaacacacuuuacuaugucaacaagcaagagggcaaaucucuguacgugaagggcgaaccuaucauuaauuucuaugacccccucguuuuuccuagcgaugaguucgacgcuuccaucucucaggugaacgaaaagauuaaucagagccuggccuuuauccgcaaguccgaugagcugcuccacaacgucaauguggggaaaagcaccacaaacauuaugaucaccacgaucauuaucgugauuaucguuauucugcuucugcucaucgccgucggacuguuccuguacugcaaagcuagaugaggacuaguguccaccugucccuccugggcugcuggauugucucguuuuccugccaaauaaacaggaucagcgcuuuacagaucuaaaaaaaaaaaaaaaaaaaaaaaaaaaaaaaaaaaaaaaaaaaaaaaaaaaaaaaaaaaaaaaaugcaucccccccccccccccccccccccccccccccaaaggcucuuuucagagccaccagaauu

SEQ ID NO: 13770 - RNA, 1880 nt, Artificial Sequence
  mRNA product Design e-4 comprising derived and/or modified sequence from HRSV(Memphis-37)__AIY60640.1__F-del_DSCav1_mut0 (opt6)
gggagacuccugucgggcggaaguaggaggaguagaguuuaaaaacaguacucuuuuuccgguucgggacguaguugaagcaacgacaagccggauaaccgcucuugagacaggaagcuuaccauggaacucccaauacuuaaaacaaacgcaaucacaacaauacuagcugcagucacacuaugcuucgccucaucacaaaauauaacagaagaauuuuaucaaucaacaugcuccgcaguaucaaaaggauaucucucugcauuacgaacagguugguacaccucgguaauaacaauagaauuaucaaacauaaaagaaaauaaaugcaauggaaccgaugccaaaguaaaacuaaucaaacaagaacuugacaaauacaaaaacgcaguaacagaacuacaacuauuaaugcaaucaacaccagcagcagguucaggcuccgcaaucgcuucaggaauagccguuuguaaaguacuacacuuagaaggagaaguaaauaaaauaaaaaacgccuuacuaucaacaaacaaagcaguagucucccuuuccaacggaguaucagucuuaacuuuuaaaguacucgacuuaaaaaauuacaucgacaaacaacuacuacccauucuaaauaaacaaucaugcucaauaucaaacaucgaaacaguaaucgaauuucaacaaaaaaauaauagauuacuagaaauaacacgagaauuuuccguaaaugccggaguaacgaccccagucucaacauacauguuaacaaacucagaauuacuaucacucauuaacgauaugccaauaacaaaugaccaaaaaaaacuaaugucaaacaacguccaaauaguacgacaacaaucauacucuaucauguguauaauaaaagaagaaguuuuagcauacguaguacaacuaccacuuuacggagucauagacaccccaugcuggaaacuacacacaucacccuuauguacaacaaacaccaaagaagggucuaacauaugucucacuagaacagaucgaggcugguacugcgacaacgcaggaucaguuagcuuuuucccucaagccgaaaccuguaaaguacaauccaaucgaguauuuugcgacacuaugaacucuagaaccuuacccuccgaaguaaaccuauguaacauagacauauuuaaucccaaauaugauugcaaaaucaugacauccaaaacagauguaucaagcucuguaauaaccucacuaggagcaauaguuucaugcuaugguaaaacaaaaugcaccgccucaaacaaaaauagagggauaaucaaaaccuucucaaauggaugcgacuacguaucaaauaaaggaguagacaccgucuccguaggaaacacacuauacuacguaaacaaacaagaaggaaaaucacuauacguaaaaggagaaccaaucauaaacuucuacgacccacuuguuuucccaucagaugaauuugaugccuccauaucacaaguaaacgaaaaaauaaaccaaucucuagccuucaucagaaaauccgacgaacuuuuacacaacguaaacguagguaaaucaacaaccaacaucaugauaacaacaauaauaauaguaauaauuguaauacuuuuacuacuuaucgccguaggccuauucuuauauuguaaagcaagaugaggacuaguguccaccugucccuccugggcugcuggauugucucguuuuccugccaaauaaacaggaucagcgcuuuacagaucuaaaaaaaaaaaaaaaaaaaaaaaaaaaaaaaaaaaaaaaaaaaaaaaaaaaaaaaaaaaaaaaaugcaucccccccccccccccccccccccccccccccaaaggcucuuuucagagccaccagaauu

SEQ ID NO: 13771 - RNA, 1880 nt, Artificial Sequence
  mRNA product Design e-4 comprising derived and/or modified sequence from HRSV(Memphis-37)__AIY60640.1__F-del_DSCav1_mut0 (opt11)
gggagacuccugucgggcggaaguaggaggaguagaguuuaaaaacaguacucuuuuuccgguucgggacguaguugaagcaacgacaagccggauaaccgcucuugagacaggaagcuuaccauggaacuaccaauccucaaaaccaacgccaucacuacaauccuagccgcgguaacccugugcuucgccuccucacaaaacaucacagaagaauuuuaccaaucaaccugcuccgccguauccaaaggauaccugagcgcccugagaaccggcugguacaccuccgucaucaccauagaacucuccaacaucaaagaaaacaaaugcaacgguacggacgccaaaguuaaacucaucaaacaagaacuugacaaauacaagaacgccgucacagaacugcaacuccucaugcaauccacccccgccgccggcuccggcuccgccauagccuccggcaucgccgucugcaaagucuuacaccuagaaggcgaagucaacaaaaucaaaaacgcacuacuuuccacaaacaaagccgucgucucacucuccaacggcguauccguccucaccuucaaaguacuugaccucaaaaacuacaucgacaaacaacuacuccccauccugaacaaacaauccugcucaaucuccaacaucgaaaccguaaucgaguuccaacagaaaaauaaucgccuccuggagaucacccgcgaguucuccgucaaugcaggagucacaaccccaguaucaaccuacaugcucaccaacuccgaacuccugucgcucaucaacgacaugcccaucacaaacgaccaaaagaaacucauguccaacaacguacaaaucgucagacaacaauccuauucuauaaugugcaucaucaaagaagaaguccucgccuacgucguacaacucccccucuacggcguuaucgacacccccugcuggaaacuccacaccucaccccucugcaccaccaacacaaaagaaggcuccaacaucugccucacucggaccgaccgcggcugguacugcgacaaugccggcagcgucuccuucuucccacaagccgaaaccugcaaaguccaguccaaccgcguauucugcgacacuaugaacuccagaacccuccccuccgaaguaaaccucugcaacaucgacaucuucaacccaaaauacgacugcaaaaucaugaccucaaaaaccgacgucagcucgucagucauaaccagccucggagccauagucucaugcuacggaaaaaccaaaugcaccgccagcaacaaaaaccgcggcauaauaaaaacauucuccaacggcugcgacuauguauccaacaaaggagucgauaccgucuccguaggcaacacccuauacuacgucaacaaacaagaaggcaaaucccucuacgucaaaggugaaccaaucaucaacuucuacgacccucucgucuuccccuccgaugaguucgacgccucaaucagccaaguaaacgaaaagauaaaccaaucacucgccuucauccgcaaauccgacgaacuucuucacaacgucaacgucggcaaaucuaccaccaacauaaugauaaccaccaucaucaucgucaucaucguaauacuccuccuucucaucgccgucggccuauuccuauacugcaaagcccgcuagggacuaguguccaccugucccuccugggcugcuggauugucucguuuuccugccaaauaaacaggaucagcgcuuuacagaucuaaaaaaaaaaaaaaaaaaaaaaaaaaaaaaaaaaaaaaaaaaaaaaaaaaaaaaaaaaaaaaaaugcaucccccccccccccccccccccccccccccccaaaggcucuuuucagagccaccagaauu

SEQ ID NO: 13772 - RNA, 1847 nt, Artificial Sequence
  mRNA product Design e-5 comprising derived and/or modified sequence from HRSV(Memphis-37)__AIY60640.1__F-del_DSCav1_mut0 (opt1)
gggagagcggcucggccauuuugucccagucaguccggaggcugcggcugcagaaguaccgccugcggaguaacugcaaagaagcuuaccauggagcugcccauccucaagaccaacgccaucaccacgauccuggccgcggugacccugugcuucgccagcucccagaacaucaccgaggaguucuaccagagcacgugcuccgccgucagcaagggcuaccucuccgcccugcgcaccgggugguacaccagcgugaucaccaucgagcuguccaacaucaaggagaacaagugcaacggcaccgacgccaaggugaagcucaucaagcaggagcuggacaaguacaagaacgcggucacggagcugcagcuccugaugcagagcaccccggccgccggcuccgggagcgcgaucgccuccggcaucgccgucugcaaggugcugcaccucgagggcgaggugaacaagaucaagaacgcccugcuguccaccaacaaggccgucgugagccucuccaacggggugagcguccugaccuucaaggugcuggaccucaagaacuacaucgacaagcagcugcugcccauccugaacaagcagagcugcuccaucagcaacaucgagaccgucaucgaguuccagcagaagaacaaccgccuccuggagaucacgcgggaguucagcgugaacgcgggcgugaccacccccgucuccaccuacaugcugacgaacagcgagcuccugucccugaucaacgacaugccgaucaccaacgaccagaagaagcucaugagcaacaacgugcagaucgugcgccagcaguccuacagcaucaugugcaucaucaaggaggagguccuggccuacguggugcagcugccccucuacggggucaucgacacccccugcuggaagcugcacaccagcccccugugcacgaccaacaccaaggagggcuccaacaucugccucacccggacggaccgcgggugguacugcgacaacgccggcagcguguccuucuucccgcaggccgagaccugcaagguccagagcaaccggguguucugcgacaccaugaacucccggacccugcccagcgaggugaaccucugcaacaucgacaucuucaaccccaaguacgacugcaagaucaugacguccaagaccgacgucagcuccagcgugaucaccucccugggcgccaucgugagcugcuacgggaagaccaagugcacggcgagcaacaagaaccgcggcaucaucaagaccuucuccaacgggugcgacuacgucagcaacaagggcguggacaccguguccgucggcaacacccuguacuacgugaacaagcaggagggcaagagccucuacgugaagggggagcccaucaucaacuucuacgacccgcuggucuuccccuccgacgaguucgacgccagcaucucccaggugaacgagaagaucaaccagagccuggccuucauccggaaguccgacgagcuccugcacaacgugaacgucggcaagagcaccacgaacaucaugaucaccaccaucaucaucgugaucaucgugauccugcugcuccugaucgccgucgggcuguuccucuacugcaaggcccgcugaggacuaguguccaccugucccuccugggcugcuggauugucucguuuuccugccaaauaaacaggaucagcgcuuuacagaucuaaaaaaaaaaaaaaaaaaaaaaaaaaaaaaaaaaaaaaaaaaaaaaaaaaaaaaaaaaaaaaaaugcaucccccccccccccccccccccccccccccccaaaggcucuuuucagagccaccagaauu

SEQ ID NO: 13773 - RNA, 1847 nt, Artificial Sequence
  mRNA product Design e-5 comprising derived and/or modified sequence from HRSV(Memphis-37)__AIY60640.1__F-del_DSCav1_mut0 (opt1)
gggagagcggcucggccauuuugucccagucaguccggaggcugcggcugcagaaguaccgccugcggaguaacugcaaagaagcuuaccauggagcugcccauccucaagaccaacgccaucaccacgauccuggccgcggugacccugugcuucgccagcucccagaacaucaccgaggaguucuaccagagcacgugcuccgccgucagcaagggcuaccucuccgcccugcgcaccgggugguacaccagcgugaucaccaucgagcuguccaacaucaaggagaacaagugcaacggcaccgacgccaaggugaagcucaucaagcaggagcuggacaaguacaagaacgcggucacggagcugcagcuccugaugcagagcaccccggccgccggguccggcagcgccaucgcguccgggaucgccgugugcaaggugcugcaccucgagggcgaggucaacaagaucaagaacgcccugcugagcaccaacaaggccguggugucccucagcaacggcgucuccgugcugaccuucaaggugcuggaccucaagaacuacaucgacaagcagcugcugcccauccucaacaagcagagcugcuccaucagcaacaucgagacggucaucgaguuccagcagaagaacaaccggcugcuggagaucacccgcgaguucuccgugaacgccggggugaccacccccgucagcacguacaugcucaccaacagcgagcugcugucccucaucaacgacaugcccaucaccaacgaccagaagaagcugaugagcaacaacgugcagaucgugcggcagcaguccuacagcaucaugugcaucaucaaggaggagguccuggcguacguggugcagcucccgcuguacggcgucaucgacacccccugcuggaagcugcacacgagcccccucugcaccaccaacaccaaggagggguccaacaucugccugacgcgcaccgaccggggcugguacugcgacaacgccggguccgugagcuucuucccccaggccgagaccugcaaggugcaguccaaccgcgucuucugcgacaccaugaacagccggacgcucccguccgaggugaaccugugcaacaucgacaucuucaaccccaaguacgacugcaagaucaugaccagcaagaccgacgucuccagcuccgugaucaccagccugggcgccaucguguccugcuacggcaagacgaagugcaccgccagcaacaagaaccgggggaucaucaagaccuucuccaacggcugcgacuacgucagcaacaaggggguggacaccgugagcgucggcaacacgcucuacuacgugaacaagcaggagggcaagucccuguacgugaagggggagcccaucaucaacuucuacgacccccuggucuucccgagcgacgaguucgacgcguccaucagccaggugaacgagaagaucaaccagucccucgccuucauccgcaagagcgacgagcugcugcacaacgugaacgucggcaaguccaccaccaacaucaugaucaccaccaucaucaucgugaucaucgugauccuccugcugcucaucgccgucgggcuguuccuguacugcaaggcccggugaggacuaguguccaccugucccuccugggcugcuggauugucucguuuuccugccaaauaaacaggaucagcgcuuuacagaucuaaaaaaaaaaaaaaaaaaaaaaaaaaaaaaaaaaaaaaaaaaaaaaaaaaaaaaaaaaaaaaaaugcaucccccccccccccccccccccccccccccccaaaggcucuuuucagagccaccagaauu

SEQ ID NO: 13774 - RNA, 1847 nt, Artificial Sequence
  mRNA product Design e-5 comprising derived and/or modified sequence from HRSV(Memphis-37)__AIY60640.1__F-del_DSCav1_mut0 (opt2)
gggagagcggcucggccauuuugucccagucaguccggaggcugcggcugcagaaguaccgccugcggaguaacugcaaagaagcuuaccauggagcuccccauccucaagaccaacgccaucaccaccauccucgccgccgucacccucugcuucgccuccucccagaacaucaccgaggaguucuaccaguccaccugcuccgccgucuccaagggcuaccucuccgcccuccgcaccggcugguacaccuccgucaucaccaucgagcucuccaacaucaaggagaacaagugcaacggcaccgacgccaaggucaagcucaucaagcaggagcucgacaaguacaagaacgccgucaccgagcuccagcuccucaugcaguccacccccgccgccggcuccggcuccgccaucgccuccggcaucgccgucugcaagguccuccaccucgagggcgaggucaacaagaucaagaacgcccuccucuccaccaacaaggccgucgucucccucuccaacggcgucuccguccucaccuucaagguccucgaccucaagaacuacaucgacaagcagcuccuccccauccucaacaagcaguccugcuccaucuccaacaucgagaccgucaucgaguuccagcagaagaacaaccgccuccucgagaucacccgcgaguucuccgucaacgccggcgucaccacccccgucuccaccuacaugcucaccaacuccgagcuccucucccucaucaacgacaugcccaucaccaacgaccagaagaagcucauguccaacaacguccagaucguccgccagcaguccuacuccaucaugugcaucaucaaggaggagguccucgccuacgucguccagcucccccucuacggcgucaucgacacccccugcuggaagcuccacaccuccccccucugcaccaccaacaccaaggagggcuccaacaucugccucacccgcaccgaccgcggcugguacugcgacaacgccggcuccgucuccuucuucccccaggccgagaccugcaagguccaguccaaccgcgucuucugcgacaccaugaacucccgcacccuccccuccgaggucaaccucugcaacaucgacaucuucaaccccaaguacgacugcaagaucaugaccuccaagaccgacgucuccuccuccgucaucaccucccucggcgccaucgucuccugcuacggcaagaccaagugcaccgccuccaacaagaaccgcggcaucaucaagaccuucuccaacggcugcgacuacgucuccaacaagggcgucgacaccgucuccgucggcaacacccucuacuacgucaacaagcaggagggcaagucccucuacgucaagggcgagcccaucaucaacuucuacgacccccucgucuuccccuccgacgaguucgacgccuccaucucccaggucaacgagaagaucaaccagucccucgccuucauccgcaaguccgacgagcuccuccacaacgucaacgucggcaaguccaccaccaacaucaugaucaccaccaucaucaucgucaucaucgucauccuccuccuccucaucgccgucggccucuuccucuacugcaaggcccgcugaggacuaguguccaccugucccuccugggcugcuggauugucucguuuuccugccaaauaaacaggaucagcgcuuuacagaucuaaaaaaaaaaaaaaaaaaaaaaaaaaaaaaaaaaaaaaaaaaaaaaaaaaaaaaaaaaaaaaaaugcaucccccccccccccccccccccccccccccccaaaggcucuuuucagagccaccagaauu

SEQ ID NO: 13775 - RNA, 1847 nt, Artificial Sequence
  mRNA product Design e-5 comprising derived and/or modified sequence from HRSV(Memphis-37)__AIY60640.1__F-del_DSCav1_mut0 (opt3)
gggagagcggcucggccauuuugucccagucaguccggaggcugcggcugcagaaguaccgccugcggaguaacugcaaagaagcuuaccauggagcugcccauccucaagaccaacgccauuacaacuauacuugcugcagugacgcugugcuucgccagcucccagaauaucaccgaagaguuuuaccaaucuacauguucagcggucaguaaaggcuauuugagcgcuuuaagaacugggugguacaccuccguuauuacaaucgaacugucuaacauuaaggagaauaaaugcaacggaaccgacgccaaggugaaacuaaucaagcaggaacucgauaaguauaaaaaugcaguaacugagcugcagcuucugaugcagucgaccccugccgcugguucaggcagcgcaauagccagugggaucgcuguguguaaggucuugcaccucgagggagaagugaacaaaauuaagaaugcccugcuguccacaaacaaagcgguugugucucucagcaauggcgucuccguguuaacguucaagguacuggaccuuaagaacuacaucgauaaacaauugcugccaauucuaaauaagcagucaugcaguaucagcaacauagagacuguuauugaauuucagcagaaaaauaacaggcuccuggagaucacccgggaguucucugugaaugccggugucacaacuccgguguccaccuauaugcuuacaaacucagaacuguugagccucauuaacgacaugcccaucaccaaugaucaaaagaaacugaugaguaacaaugugcagaucguccgccagcagucuuacuccauuauguguauaaucaaggaggaaguuuuagcauaugugguacaacugccucucuacggggugauugacacgccaugcuggaaacuucauacuagcccccuguguacaaccaacacuaaggagggaucgaauaucugcuugacacgaaccgaucguggcugguacugugacaacgcuggcucugucuccuuuuucccucaggccgaaacgugcaaggugcagucaaauagaguguuuugugauaccaugaacaguagaacacugccaagcgaggugaaucucugcaacauagacauuuucaaucccaaauaugauugcaagaucaugacuuccaaaaccgacgucucuagcucagugaucacaagucugggggcaauuguauccuguuacggaaagacuaaaugcaccgcuagcaacaagaauagggguaucauuaagacauuuucuaacggcugugauuauguuucaaauaaagggguggacaccgucagugugggaaacacucuuuacuaugucaacaagcaagagggcaaaagccuguacgugaagggugaaccuauaaucaauuucuaugacccauugguuuuuccguccgaugaguucgacgccucuauuucgcagguuaacgagaaaaucaaucagagccucgcguuuauccggaaguccgaugaacuguuacacaacguaaaugucgggaagucaacgacaaacauuaugauaaccacuaucauuaucgugauuaucguuauacugcuacuccugaucgccgugggacuuuucuuguacugcaaagcacgcugaggacuaguguccaccugucccuccugggcugcuggauugucucguuuuccugccaaauaaacaggaucagcgcuuuacagaucuaaaaaaaaaaaaaaaaaaaaaaaaaaaaaaaaaaaaaaaaaaaaaaaaaaaaaaaaaaaaaaaaugcaucccccccccccccccccccccccccccccccaaaggcucuuuucagagccaccagaauu

SEQ ID NO: 13776 - RNA, 1847 nt, Artificial Sequence
  mRNA product Design e-5 comprising derived and/or modified sequence from HRSV(Memphis-37)__AIY60640.1__F-del_DSCav1_mut0 (opt4)
gggagagcggcucggccauuuugucccagucaguccggaggcugcggcugcagaaguaccgccugcggaguaacugcaaagaagcuuaccauggagcugcccauccugaagaccaacgccaucaccaccauccuggccgccgugacccugugcuucgccagcagccagaacaucaccgaggaguucuaccagagcaccugcagcgccgugagcaagggcuaccugagcgcccugagaaccggcugguacaccagcgugaucaccaucgagcugagcaacaucaaggagaacaagugcaacggcaccgacgccaaggugaagcugaucaagcaggagcuggacaaguacaagaacgccgugaccgagcugcagcugcugaugcagagcacccccgccgccggcagcggcagcgccaucgccagcggcaucgccgugugcaaggugcugcaccuggagggcgaggugaacaagaucaagaacgcccugcugagcaccaacaaggccguggugagccugagcaacggcgugagcgugcugaccuucaaggugcuggaccugaagaacuacaucgacaagcagcugcugcccauccugaacaagcagagcugcagcaucagcaacaucgagaccgugaucgaguuccagcagaagaacaacagacugcuggagaucaccagagaguucagcgugaacgccggcgugaccacccccgugagcaccuacaugcugaccaacagcgagcugcugagccugaucaacgacaugcccaucaccaacgaccagaagaagcugaugagcaacaacgugcagaucgugagacagcagagcuacagcaucaugugcaucaucaaggaggaggugcuggccuacguggugcagcugccccuguacggcgugaucgacacccccugcuggaagcugcacaccagcccccugugcaccaccaacaccaaggagggcagcaacaucugccugaccagaaccgacagaggcugguacugcgacaacgccggcagcgugagcuucuucccccaggccgagaccugcaaggugcagagcaacagaguguucugcgacaccaugaacagcagaacccugcccagcgaggugaaccugugcaacaucgacaucuucaaccccaaguacgacugcaagaucaugaccagcaagaccgacgugagcagcagcgugaucaccagccugggcgccaucgugagcugcuacggcaagaccaagugcaccgccagcaacaagaacagaggcaucaucaagaccuucagcaacggcugcgacuacgugagcaacaagggcguggacaccgugagcgugggcaacacccuguacuacgugaacaagcaggagggcaagagccuguacgugaagggcgagcccaucaucaacuucuacgacccccugguguuccccagcgacgaguucgacgccagcaucagccaggugaacgagaagaucaaccagagccuggccuucaucagaaagagcgacgagcugcugcacaacgugaacgugggcaagagcaccaccaacaucaugaucaccaccaucaucaucgugaucaucgugauccugcugcugcugaucgccgugggccuguuccuguacugcaaggccagaugaggacuaguguccaccugucccuccugggcugcuggauugucucguuuuccugccaaauaaacaggaucagcgcuuuacagaucuaaaaaaaaaaaaaaaaaaaaaaaaaaaaaaaaaaaaaaaaaaaaaaaaaaaaaaaaaaaaaaaaugcaucccccccccccccccccccccccccccccccaaaggcucuuuucagagccaccagaauu

SEQ ID NO: 13777 - RNA, 1847 nt, Artificial Sequence
  mRNA product Design e-5 comprising derived and/or modified sequence from HRSV(Memphis-37)__AIY60640.1__F-del_DSCav1_mut0 (opt5)
gggagagcggcucggccauuuugucccagucaguccggaggcugcggcugcagaaguaccgccugcggaguaacugcaaagaagcuuaccauggagcugcccauccucaagaccaacgccauuacaacgauccuggcugccgugacccuuugcuucgcgagcucccagaauauuacagaagaguuuuaccaaucuaccuguagcgcugucuccaaaggcuaucugucugcccucagaacagggugguacaccagcguuaucacaauugaacuguccaacaucaaggagaauaaaugcaacggaaccgacgccaaggugaaacuuaucaagcaggaacuggauaaguauaaaaaugcugugacggagcuccagcugcugaugcagucuaccccugccgcuggcagcggguccgccauugcgagcggaaucgccgucuguaaggugcuccaccuggagggcgaaguuaacaaaauuaagaaugcccuucugucuacaaacaaagcuguggucucccucagcaauggggugucuguucugaccuucaaggugcuugaccugaagaacuacaucgauaaacaacuccugccgauucugaauaagcaguccugcagcaucucuaacauugagacagucaucgaauuucagcagaaaaauaaccggcuccuggagaucacccgcgaguucuccgugaaugcuggagugacgacacccgucagcaccuauaugcuuacaaacuccgaacugcucucucugauuaacgacaugccuaucaccaaugaucaaaagaaacuuaugagcaacaauguucagauugugagacagcaguccuacagcaucauguguauuaucaaggaggaagugcuggccuaugucgugcaacucccccuguacggcguuaucgacaccccuugcuggaaacugcauacaucuccccucuguacgaccaacacaaaggagggcuccaauauuugccugacccggacagaucgcgggugguacugugacaacgcgggaagcgugagcuuuuucccucaggccgaaaccugcaagguccagucuaauagaguguuuugugauacgaugaacuccagaacacugccgucugagguuaaucucugcaacaucgacauuuucaaucccaaauaugauugcaagaucaugaccagcaaaaccgacguguccagcucugucauuacaucccugggcgcuaucgugagcuguuacgggaagaccaaaugcacagccucuaacaagaaucggggaaucauuaagacguuuuccaacggcugugauuaugucagcaauaaagggguggacaccguuuccgugggaaacacacuuuacuaugucaacaagcaagagggcaaaucucuguacgugaagggcgaaccuaucauuaauuucuaugacccccucguuuuuccuagcgaugaguucgacgcuuccaucucucaggugaacgaaaagauuaaucagagccuggccuuuauccgcaaguccgaugagcugcuccacaacgucaauguggggaaaagcaccacaaacauuaugaucaccacgaucauuaucgugauuaucguuauucugcuucugcucaucgccgucggacuguuccuguacugcaaagcuagaugaggacuaguguccaccugucccuccugggcugcuggauugucucguuuuccugccaaauaaacaggaucagcgcuuuacagaucuaaaaaaaaaaaaaaaaaaaaaaaaaaaaaaaaaaaaaaaaaaaaaaaaaaaaaaaaaaaaaaaaugcaucccccccccccccccccccccccccccccccaaaggcucuuuucagagccaccagaauu

SEQ ID NO: 13778 - RNA, 1847 nt, Artificial Sequence
  mRNA product Design e-5 comprising derived and/or modified sequence from HRSV(Memphis-37)__AIY60640.1__F-del_DSCav1_mut0 (opt6)
gggagagcggcucggccauuuugucccagucaguccggaggcugcggcugcagaaguaccgccugcggaguaacugcaaagaagcuuaccauggaacucccaauacuuaaaacaaacgcaaucacaacaauacuagcugcagucacacuaugcuucgccucaucacaaaauauaacagaagaauuuuaucaaucaacaugcuccgcaguaucaaaaggauaucucucugcauuacgaacagguugguacaccucgguaauaacaauagaauuaucaaacauaaaagaaaauaaaugcaauggaaccgaugccaaaguaaaacuaaucaaacaagaacuugacaaauacaaaaacgcaguaacagaacuacaacuauuaaugcaaucaacaccagcagcagguucaggcuccgcaaucgcuucaggaauagccguuuguaaaguacuacacuuagaaggagaaguaaauaaaauaaaaaacgccuuacuaucaacaaacaaagcaguagucucccuuuccaacggaguaucagucuuaacuuuuaaaguacucgacuuaaaaaauuacaucgacaaacaacuacuacccauucuaaauaaacaaucaugcucaauaucaaacaucgaaacaguaaucgaauuucaacaaaaaaauaauagauuacuagaaauaacacgagaauuuuccguaaaugccggaguaacgaccccagucucaacauacauguuaacaaacucagaauuacuaucacucauuaacgauaugccaauaacaaaugaccaaaaaaaacuaaugucaaacaacguccaaauaguacgacaacaaucauacucuaucauguguauaauaaaagaagaaguuuuagcauacguaguacaacuaccacuuuacggagucauagacaccccaugcuggaaacuacacacaucacccuuauguacaacaaacaccaaagaagggucuaacauaugucucacuagaacagaucgaggcugguacugcgacaacgcaggaucaguuagcuuuuucccucaagccgaaaccuguaaaguacaauccaaucgaguauuuugcgacacuaugaacucuagaaccuuacccuccgaaguaaaccuauguaacauagacauauuuaaucccaaauaugauugcaaaaucaugacauccaaaacagauguaucaagcucuguaauaaccucacuaggagcaauaguuucaugcuaugguaaaacaaaaugcaccgccucaaacaaaaauagagggauaaucaaaaccuucucaaauggaugcgacuacguaucaaauaaaggaguagacaccgucuccguaggaaacacacuauacuacguaaacaaacaagaaggaaaaucacuauacguaaaaggagaaccaaucauaaacuucuacgacccacuuguuuucccaucagaugaauuugaugccuccauaucacaaguaaacgaaaaaauaaaccaaucucuagccuucaucagaaaauccgacgaacuuuuacacaacguaaacguagguaaaucaacaaccaacaucaugauaacaacaauaauaauaguaauaauuguaauacuuuuacuacuuaucgccguaggccuauucuuauauuguaaagcaagaugaggacuaguguccaccugucccuccugggcugcuggauugucucguuuuccugccaaauaaacaggaucagcgcuuuacagaucuaaaaaaaaaaaaaaaaaaaaaaaaaaaaaaaaaaaaaaaaaaaaaaaaaaaaaaaaaaaaaaaaugcaucccccccccccccccccccccccccccccccaaaggcucuuuucagagccaccagaauu

SEQ ID NO: 13779 - RNA, 1847 nt, Artificial Sequence
  mRNA product Design e-5 comprising derived and/or modified sequence from HRSV(Memphis-37)__AIY60640.1__F-del_DSCav1_mut0 (opt11)
gggagagcggcucggccauuuugucccagucaguccggaggcugcggcugcagaaguaccgccugcggaguaacugcaaagaagcuuaccauggaacuaccaauccucaaaaccaacgccaucacuacaauccuagccgcgguaacccugugcuucgccuccucacaaaacaucacagaagaauuuuaccaaucaaccugcuccgccguauccaaaggauaccugagcgcccugagaaccggcugguacaccuccgucaucaccauagaacucuccaacaucaaagaaaacaaaugcaacgguacggacgccaaaguuaaacucaucaaacaagaacuugacaaauacaagaacgccgucacagaacugcaacuccucaugcaauccacccccgccgccggcuccggcuccgccauagccuccggcaucgccgucugcaaagucuuacaccuagaaggcgaagucaacaaaaucaaaaacgcacuacuuuccacaaacaaagccgucgucucacucuccaacggcguauccguccucaccuucaaaguacuugaccucaaaaacuacaucgacaaacaacuacuccccauccugaacaaacaauccugcucaaucuccaacaucgaaaccguaaucgaguuccaacagaaaaauaaucgccuccuggagaucacccgcgaguucuccgucaaugcaggagucacaaccccaguaucaaccuacaugcucaccaacuccgaacuccugucgcucaucaacgacaugcccaucacaaacgaccaaaagaaacucauguccaacaacguacaaaucgucagacaacaauccuauucuauaaugugcaucaucaaagaagaaguccucgccuacgucguacaacucccccucuacggcguuaucgacacccccugcuggaaacuccacaccucaccccucugcaccaccaacacaaaagaaggcuccaacaucugccucacucggaccgaccgcggcugguacugcgacaaugccggcagcgucuccuucuucccacaagccgaaaccugcaaaguccaguccaaccgcguauucugcgacacuaugaacuccagaacccuccccuccgaaguaaaccucugcaacaucgacaucuucaacccaaaauacgacugcaaaaucaugaccucaaaaaccgacgucagcucgucagucauaaccagccucggagccauagucucaugcuacggaaaaaccaaaugcaccgccagcaacaaaaaccgcggcauaauaaaaacauucuccaacggcugcgacuauguauccaacaaaggagucgauaccgucuccguaggcaacacccuauacuacgucaacaaacaagaaggcaaaucccucuacgucaaaggugaaccaaucaucaacuucuacgacccucucgucuuccccuccgaugaguucgacgccucaaucagccaaguaaacgaaaagauaaaccaaucacucgccuucauccgcaaauccgacgaacuucuucacaacgucaacgucggcaaaucuaccaccaacauaaugauaaccaccaucaucaucgucaucaucguaauacuccuccuucucaucgccgucggccuauuccuauacugcaaagcccgcuagggacuaguguccaccugucccuccugggcugcuggauugucucguuuuccugccaaauaaacaggaucagcgcuuuacagaucuaaaaaaaaaaaaaaaaaaaaaaaaaaaaaaaaaaaaaaaaaaaaaaaaaaaaaaaaaaaaaaaaugcaucccccccccccccccccccccccccccccccaaaggcucuuuucagagccaccagaauu

SEQ ID NO: 13780 - RNA, 1914 nt, Artificial Sequence
  mRNA product Design e-6 comprising derived and/or modified sequence from HRSV(Memphis-37)__AIY60640.1__F-del_DSCav1_mut0 (opt1)
gggagagcggcucggccauuuugucccagucaguccggaggcugcggcugcagaaguaccgccugcggaguaacugcaaagaagcuuaccauggagcugcccauccucaagaccaacgccaucaccacgauccuggccgcggugacccugugcuucgccagcucccagaacaucaccgaggaguucuaccagagcacgugcuccgccgucagcaagggcuaccucuccgcccugcgcaccgggugguacaccagcgugaucaccaucgagcuguccaacaucaaggagaacaagugcaacggcaccgacgccaaggugaagcucaucaagcaggagcuggacaaguacaagaacgcggucacggagcugcagcuccugaugcagagcaccccggccgccggcuccgggagcgcgaucgccuccggcaucgccgucugcaaggugcugcaccucgagggcgaggugaacaagaucaagaacgcccugcuguccaccaacaaggccgucgugagccucuccaacggggugagcguccugaccuucaaggugcuggaccucaagaacuacaucgacaagcagcugcugcccauccugaacaagcagagcugcuccaucagcaacaucgagaccgucaucgaguuccagcagaagaacaaccgccuccuggagaucacgcgggaguucagcgugaacgcgggcgugaccacccccgucuccaccuacaugcugacgaacagcgagcuccugucccugaucaacgacaugccgaucaccaacgaccagaagaagcucaugagcaacaacgugcagaucgugcgccagcaguccuacagcaucaugugcaucaucaaggaggagguccuggccuacguggugcagcugccccucuacggggucaucgacacccccugcuggaagcugcacaccagcccccugugcacgaccaacaccaaggagggcuccaacaucugccucacccggacggaccgcgggugguacugcgacaacgccggcagcguguccuucuucccgcaggccgagaccugcaagguccagagcaaccggguguucugcgacaccaugaacucccggacccugcccagcgaggugaaccucugcaacaucgacaucuucaaccccaaguacgacugcaagaucaugacguccaagaccgacgucagcuccagcgugaucaccucccugggcgccaucgugagcugcuacgggaagaccaagugcacggcgagcaacaagaaccgcggcaucaucaagaccuucuccaacgggugcgacuacgucagcaacaagggcguggacaccguguccgucggcaacacccuguacuacgugaacaagcaggagggcaagagccucuacgugaagggggagcccaucaucaacuucuacgacccgcuggucuuccccuccgacgaguucgacgccagcaucucccaggugaacgagaagaucaaccagagccuggccuucauccggaaguccgacgagcuccugcacaacgugaacgucggcaagagcaccacgaacaucaugaucaccaccaucaucaucgugaucaucgugauccugcugcuccugaucgccgucgggcuguuccucuacugcaaggcccgcugaggacuaguacuggcugcaucucccuuuccucuguccuccauccuucucccaggauggugaagggggaccugguacccagugauccccaccccaggauccuaaaucaugacuuaccugcuaauaaaaacucauuggaaaagugagaagaucuaaaaaaaaaaaaaaaaaaaaaaaaaaaaaaaaaaaaaaaaaaaaaaaaaaaaaaaaaaaaaaaaugcaucccccccccccccccccccccccccccccccaaaggcucuuuucagagccaccagaauu

SEQ ID NO: 13781 - RNA, 1914 nt, Artificial Sequence
  mRNA product Design e-6 comprising derived and/or modified sequence from HRSV(Memphis-37)__AIY60640.1__F-del_DSCav1_mut0 (opt1)
gggagagcggcucggccauuuugucccagucaguccggaggcugcggcugcagaaguaccgccugcggaguaacugcaaagaagcuuaccauggagcugcccauccucaagaccaacgccaucaccacgauccuggccgcggugacccugugcuucgccagcucccagaacaucaccgaggaguucuaccagagcacgugcuccgccgucagcaagggcuaccucuccgcccugcgcaccgggugguacaccagcgugaucaccaucgagcuguccaacaucaaggagaacaagugcaacggcaccgacgccaaggugaagcucaucaagcaggagcuggacaaguacaagaacgcggucacggagcugcagcuccugaugcagagcaccccggccgccggguccggcagcgccaucgcguccgggaucgccgugugcaaggugcugcaccucgagggcgaggucaacaagaucaagaacgcccugcugagcaccaacaaggccguggugucccucagcaacggcgucuccgugcugaccuucaaggugcuggaccucaagaacuacaucgacaagcagcugcugcccauccucaacaagcagagcugcuccaucagcaacaucgagacggucaucgaguuccagcagaagaacaaccggcugcuggagaucacccgcgaguucuccgugaacgccggggugaccacccccgucagcacguacaugcucaccaacagcgagcugcugucccucaucaacgacaugcccaucaccaacgaccagaagaagcugaugagcaacaacgugcagaucgugcggcagcaguccuacagcaucaugugcaucaucaaggaggagguccuggcguacguggugcagcucccgcuguacggcgucaucgacacccccugcuggaagcugcacacgagcccccucugcaccaccaacaccaaggagggguccaacaucugccugacgcgcaccgaccggggcugguacugcgacaacgccggguccgugagcuucuucccccaggccgagaccugcaaggugcaguccaaccgcgucuucugcgacaccaugaacagccggacgcucccguccgaggugaaccugugcaacaucgacaucuucaaccccaaguacgacugcaagaucaugaccagcaagaccgacgucuccagcuccgugaucaccagccugggcgccaucguguccugcuacggcaagacgaagugcaccgccagcaacaagaaccgggggaucaucaagaccuucuccaacggcugcgacuacgucagcaacaaggggguggacaccgugagcgucggcaacacgcucuacuacgugaacaagcaggagggcaagucccuguacgugaagggggagcccaucaucaacuucuacgacccccuggucuucccgagcgacgaguucgacgcguccaucagccaggugaacgagaagaucaaccagucccucgccuucauccgcaagagcgacgagcugcugcacaacgugaacgucggcaaguccaccaccaacaucaugaucaccaccaucaucaucgugaucaucgugauccuccugcugcucaucgccgucgggcuguuccuguacugcaaggcccggugaggacuaguacuggcugcaucucccuuuccucuguccuccauccuucucccaggauggugaagggggaccugguacccagugauccccaccccaggauccuaaaucaugacuuaccugcuaauaaaaacucauuggaaaagugagaagaucuaaaaaaaaaaaaaaaaaaaaaaaaaaaaaaaaaaaaaaaaaaaaaaaaaaaaaaaaaaaaaaaaugcaucccccccccccccccccccccccccccccccaaaggcucuuuucagagccaccagaauu

SEQ ID NO: 13782 - RNA, 1914 nt, Artificial Sequence
  mRNA product Design e-6 comprising derived and/or modified sequence from HRSV(Memphis-37)__AIY60640.1__F-del_DSCav1_mut0 (opt2)
gggagagcggcucggccauuuugucccagucaguccggaggcugcggcugcagaaguaccgccugcggaguaacugcaaagaagcuuaccauggagcuccccauccucaagaccaacgccaucaccaccauccucgccgccgucacccucugcuucgccuccucccagaacaucaccgaggaguucuaccaguccaccugcuccgccgucuccaagggcuaccucuccgcccuccgcaccggcugguacaccuccgucaucaccaucgagcucuccaacaucaaggagaacaagugcaacggcaccgacgccaaggucaagcucaucaagcaggagcucgacaaguacaagaacgccgucaccgagcuccagcuccucaugcaguccacccccgccgccggcuccggcuccgccaucgccuccggcaucgccgucugcaagguccuccaccucgagggcgaggucaacaagaucaagaacgcccuccucuccaccaacaaggccgucgucucccucuccaacggcgucuccguccucaccuucaagguccucgaccucaagaacuacaucgacaagcagcuccuccccauccucaacaagcaguccugcuccaucuccaacaucgagaccgucaucgaguuccagcagaagaacaaccgccuccucgagaucacccgcgaguucuccgucaacgccggcgucaccacccccgucuccaccuacaugcucaccaacuccgagcuccucucccucaucaacgacaugcccaucaccaacgaccagaagaagcucauguccaacaacguccagaucguccgccagcaguccuacuccaucaugugcaucaucaaggaggagguccucgccuacgucguccagcucccccucuacggcgucaucgacacccccugcuggaagcuccacaccuccccccucugcaccaccaacaccaaggagggcuccaacaucugccucacccgcaccgaccgcggcugguacugcgacaacgccggcuccgucuccuucuucccccaggccgagaccugcaagguccaguccaaccgcgucuucugcgacaccaugaacucccgcacccuccccuccgaggucaaccucugcaacaucgacaucuucaaccccaaguacgacugcaagaucaugaccuccaagaccgacgucuccuccuccgucaucaccucccucggcgccaucgucuccugcuacggcaagaccaagugcaccgccuccaacaagaaccgcggcaucaucaagaccuucuccaacggcugcgacuacgucuccaacaagggcgucgacaccgucuccgucggcaacacccucuacuacgucaacaagcaggagggcaagucccucuacgucaagggcgagcccaucaucaacuucuacgacccccucgucuuccccuccgacgaguucgacgccuccaucucccaggucaacgagaagaucaaccagucccucgccuucauccgcaaguccgacgagcuccuccacaacgucaacgucggcaaguccaccaccaacaucaugaucaccaccaucaucaucgucaucaucgucauccuccuccuccucaucgccgucggccucuuccucuacugcaaggcccgcugaggacuaguacuggcugcaucucccuuuccucuguccuccauccuucucccaggauggugaagggggaccugguacccagugauccccaccccaggauccuaaaucaugacuuaccugcuaauaaaaacucauuggaaaagugagaagaucuaaaaaaaaaaaaaaaaaaaaaaaaaaaaaaaaaaaaaaaaaaaaaaaaaaaaaaaaaaaaaaaaugcaucccccccccccccccccccccccccccccccaaaggcucuuuucagagccaccagaauu

SEQ ID NO: 13783 - RNA, 1914 nt, Artificial Sequence
  mRNA product Design e-6 comprising derived and/or modified sequence from HRSV(Memphis-37)__AIY60640.1__F-del_DSCav1_mut0 (opt3)
gggagagcggcucggccauuuugucccagucaguccggaggcugcggcugcagaaguaccgccugcggaguaacugcaaagaagcuuaccauggagcugcccauccucaagaccaacgccauuacaacuauacuugcugcagugacgcugugcuucgccagcucccagaauaucaccgaagaguuuuaccaaucuacauguucagcggucaguaaaggcuauuugagcgcuuuaagaacugggugguacaccuccguuauuacaaucgaacugucuaacauuaaggagaauaaaugcaacggaaccgacgccaaggugaaacuaaucaagcaggaacucgauaaguauaaaaaugcaguaacugagcugcagcuucugaugcagucgaccccugccgcugguucaggcagcgcaauagccagugggaucgcuguguguaaggucuugcaccucgagggagaagugaacaaaauuaagaaugcccugcuguccacaaacaaagcgguugugucucucagcaauggcgucuccguguuaacguucaagguacuggaccuuaagaacuacaucgauaaacaauugcugccaauucuaaauaagcagucaugcaguaucagcaacauagagacuguuauugaauuucagcagaaaaauaacaggcuccuggagaucacccgggaguucucugugaaugccggugucacaacuccgguguccaccuauaugcuuacaaacucagaacuguugagccucauuaacgacaugcccaucaccaaugaucaaaagaaacugaugaguaacaaugugcagaucguccgccagcagucuuacuccauuauguguauaaucaaggaggaaguuuuagcauaugugguacaacugccucucuacggggugauugacacgccaugcuggaaacuucauacuagcccccuguguacaaccaacacuaaggagggaucgaauaucugcuugacacgaaccgaucguggcugguacugugacaacgcuggcucugucuccuuuuucccucaggccgaaacgugcaaggugcagucaaauagaguguuuugugauaccaugaacaguagaacacugccaagcgaggugaaucucugcaacauagacauuuucaaucccaaauaugauugcaagaucaugacuuccaaaaccgacgucucuagcucagugaucacaagucugggggcaauuguauccuguuacggaaagacuaaaugcaccgcuagcaacaagaauagggguaucauuaagacauuuucuaacggcugugauuauguuucaaauaaagggguggacaccgucagugugggaaacacucuuuacuaugucaacaagcaagagggcaaaagccuguacgugaagggugaaccuauaaucaauuucuaugacccauugguuuuuccguccgaugaguucgacgccucuauuucgcagguuaacgagaaaaucaaucagagccucgcguuuauccggaaguccgaugaacuguuacacaacguaaaugucgggaagucaacgacaaacauuaugauaaccacuaucauuaucgugauuaucguuauacugcuacuccugaucgccgugggacuuuucuuguacugcaaagcacgcugaggacuaguacuggcugcaucucccuuuccucuguccuccauccuucucccaggauggugaagggggaccugguacccagugauccccaccccaggauccuaaaucaugacuuaccugcuaauaaaaacucauuggaaaagugagaagaucuaaaaaaaaaaaaaaaaaaaaaaaaaaaaaaaaaaaaaaaaaaaaaaaaaaaaaaaaaaaaaaaaugcaucccccccccccccccccccccccccccccccaaaggcucuuuucagagccaccagaauu

SEQ ID NO: 13784 - RNA, 1914 nt, Artificial Sequence
  mRNA product Design e-6 comprising derived and/or modified sequence from HRSV(Memphis-37)__AIY60640.1__F-del_DSCav1_mut0 (opt4)
gggagagcggcucggccauuuugucccagucaguccggaggcugcggcugcagaaguaccgccugcggaguaacugcaaagaagcuuaccauggagcugcccauccugaagaccaacgccaucaccaccauccuggccgccgugacccugugcuucgccagcagccagaacaucaccgaggaguucuaccagagcaccugcagcgccgugagcaagggcuaccugagcgcccugagaaccggcugguacaccagcgugaucaccaucgagcugagcaacaucaaggagaacaagugcaacggcaccgacgccaaggugaagcugaucaagcaggagcuggacaaguacaagaacgccgugaccgagcugcagcugcugaugcagagcacccccgccgccggcagcggcagcgccaucgccagcggcaucgccgugugcaaggugcugcaccuggagggcgaggugaacaagaucaagaacgcccugcugagcaccaacaaggccguggugagccugagcaacggcgugagcgugcugaccuucaaggugcuggaccugaagaacuacaucgacaagcagcugcugcccauccugaacaagcagagcugcagcaucagcaacaucgagaccgugaucgaguuccagcagaagaacaacagacugcuggagaucaccagagaguucagcgugaacgccggcgugaccacccccgugagcaccuacaugcugaccaacagcgagcugcugagccugaucaacgacaugcccaucaccaacgaccagaagaagcugaugagcaacaacgugcagaucgugagacagcagagcuacagcaucaugugcaucaucaaggaggaggugcuggccuacguggugcagcugccccuguacggcgugaucgacacccccugcuggaagcugcacaccagcccccugugcaccaccaacaccaaggagggcagcaacaucugccugaccagaaccgacagaggcugguacugcgacaacgccggcagcgugagcuucuucccccaggccgagaccugcaaggugcagagcaacagaguguucugcgacaccaugaacagcagaacccugcccagcgaggugaaccugugcaacaucgacaucuucaaccccaaguacgacugcaagaucaugaccagcaagaccgacgugagcagcagcgugaucaccagccugggcgccaucgugagcugcuacggcaagaccaagugcaccgccagcaacaagaacagaggcaucaucaagaccuucagcaacggcugcgacuacgugagcaacaagggcguggacaccgugagcgugggcaacacccuguacuacgugaacaagcaggagggcaagagccuguacgugaagggcgagcccaucaucaacuucuacgacccccugguguuccccagcgacgaguucgacgccagcaucagccaggugaacgagaagaucaaccagagccuggccuucaucagaaagagcgacgagcugcugcacaacgugaacgugggcaagagcaccaccaacaucaugaucaccaccaucaucaucgugaucaucgugauccugcugcugcugaucgccgugggccuguuccuguacugcaaggccagaugaggacuaguacuggcugcaucucccuuuccucuguccuccauccuucucccaggauggugaagggggaccugguacccagugauccccaccccaggauccuaaaucaugacuuaccugcuaauaaaaacucauuggaaaagugagaagaucuaaaaaaaaaaaaaaaaaaaaaaaaaaaaaaaaaaaaaaaaaaaaaaaaaaaaaaaaaaaaaaaaugcaucccccccccccccccccccccccccccccccaaaggcucuuuucagagccaccagaauu

SEQ ID NO: 13785 - RNA, 1914 nt, Artificial Sequence
  mRNA product Design e-6 comprising derived and/or modified sequence from HRSV(Memphis-37)__AIY60640.1__F-del_DSCav1_mut0 (opt5)
gggagagcggcucggccauuuugucccagucaguccggaggcugcggcugcagaaguaccgccugcggaguaacugcaaagaagcuuaccauggagcugcccauccucaagaccaacgccauuacaacgauccuggcugccgugacccuuugcuucgcgagcucccagaauauuacagaagaguuuuaccaaucuaccuguagcgcugucuccaaaggcuaucugucugcccucagaacagggugguacaccagcguuaucacaauugaacuguccaacaucaaggagaauaaaugcaacggaaccgacgccaaggugaaacuuaucaagcaggaacuggauaaguauaaaaaugcugugacggagcuccagcugcugaugcagucuaccccugccgcuggcagcggguccgccauugcgagcggaaucgccgucuguaaggugcuccaccuggagggcgaaguuaacaaaauuaagaaugcccuucugucuacaaacaaagcuguggucucccucagcaauggggugucuguucugaccuucaaggugcuugaccugaagaacuacaucgauaaacaacuccugccgauucugaauaagcaguccugcagcaucucuaacauugagacagucaucgaauuucagcagaaaaauaaccggcuccuggagaucacccgcgaguucuccgugaaugcuggagugacgacacccgucagcaccuauaugcuuacaaacuccgaacugcucucucugauuaacgacaugccuaucaccaaugaucaaaagaaacuuaugagcaacaauguucagauugugagacagcaguccuacagcaucauguguauuaucaaggaggaagugcuggccuaugucgugcaacucccccuguacggcguuaucgacaccccuugcuggaaacugcauacaucuccccucuguacgaccaacacaaaggagggcuccaauauuugccugacccggacagaucgcgggugguacugugacaacgcgggaagcgugagcuuuuucccucaggccgaaaccugcaagguccagucuaauagaguguuuugugauacgaugaacuccagaacacugccgucugagguuaaucucugcaacaucgacauuuucaaucccaaauaugauugcaagaucaugaccagcaaaaccgacguguccagcucugucauuacaucccugggcgcuaucgugagcuguuacgggaagaccaaaugcacagccucuaacaagaaucggggaaucauuaagacguuuuccaacggcugugauuaugucagcaauaaagggguggacaccguuuccgugggaaacacacuuuacuaugucaacaagcaagagggcaaaucucuguacgugaagggcgaaccuaucauuaauuucuaugacccccucguuuuuccuagcgaugaguucgacgcuuccaucucucaggugaacgaaaagauuaaucagagccuggccuuuauccgcaaguccgaugagcugcuccacaacgucaauguggggaaaagcaccacaaacauuaugaucaccacgaucauuaucgugauuaucguuauucugcuucugcucaucgccgucggacuguuccuguacugcaaagcuagaugaggacuaguacuggcugcaucucccuuuccucuguccuccauccuucucccaggauggugaagggggaccugguacccagugauccccaccccaggauccuaaaucaugacuuaccugcuaauaaaaacucauuggaaaagugagaagaucuaaaaaaaaaaaaaaaaaaaaaaaaaaaaaaaaaaaaaaaaaaaaaaaaaaaaaaaaaaaaaaaaugcaucccccccccccccccccccccccccccccccaaaggcucuuuucagagccaccagaauu

SEQ ID NO: 13786 - RNA, 1914 nt, Artificial Sequence
  mRNA product Design e-6 comprising derived and/or modified sequence from HRSV(Memphis-37)__AIY60640.1__F-del_DSCav1_mut0 (opt6)
gggagagcggcucggccauuuugucccagucaguccggaggcugcggcugcagaaguaccgccugcggaguaacugcaaagaagcuuaccauggaacucccaauacuuaaaacaaacgcaaucacaacaauacuagcugcagucacacuaugcuucgccucaucacaaaauauaacagaagaauuuuaucaaucaacaugcuccgcaguaucaaaaggauaucucucugcauuacgaacagguugguacaccucgguaauaacaauagaauuaucaaacauaaaagaaaauaaaugcaauggaaccgaugccaaaguaaaacuaaucaaacaagaacuugacaaauacaaaaacgcaguaacagaacuacaacuauuaaugcaaucaacaccagcagcagguucaggcuccgcaaucgcuucaggaauagccguuuguaaaguacuacacuuagaaggagaaguaaauaaaauaaaaaacgccuuacuaucaacaaacaaagcaguagucucccuuuccaacggaguaucagucuuaacuuuuaaaguacucgacuuaaaaaauuacaucgacaaacaacuacuacccauucuaaauaaacaaucaugcucaauaucaaacaucgaaacaguaaucgaauuucaacaaaaaaauaauagauuacuagaaauaacacgagaauuuuccguaaaugccggaguaacgaccccagucucaacauacauguuaacaaacucagaauuacuaucacucauuaacgauaugccaauaacaaaugaccaaaaaaaacuaaugucaaacaacguccaaauaguacgacaacaaucauacucuaucauguguauaauaaaagaagaaguuuuagcauacguaguacaacuaccacuuuacggagucauagacaccccaugcuggaaacuacacacaucacccuuauguacaacaaacaccaaagaagggucuaacauaugucucacuagaacagaucgaggcugguacugcgacaacgcaggaucaguuagcuuuuucccucaagccgaaaccuguaaaguacaauccaaucgaguauuuugcgacacuaugaacucuagaaccuuacccuccgaaguaaaccuauguaacauagacauauuuaaucccaaauaugauugcaaaaucaugacauccaaaacagauguaucaagcucuguaauaaccucacuaggagcaauaguuucaugcuaugguaaaacaaaaugcaccgccucaaacaaaaauagagggauaaucaaaaccuucucaaauggaugcgacuacguaucaaauaaaggaguagacaccgucuccguaggaaacacacuauacuacguaaacaaacaagaaggaaaaucacuauacguaaaaggagaaccaaucauaaacuucuacgacccacuuguuuucccaucagaugaauuugaugccuccauaucacaaguaaacgaaaaaauaaaccaaucucuagccuucaucagaaaauccgacgaacuuuuacacaacguaaacguagguaaaucaacaaccaacaucaugauaacaacaauaauaauaguaauaauuguaauacuuuuacuacuuaucgccguaggccuauucuuauauuguaaagcaagaugaggacuaguacuggcugcaucucccuuuccucuguccuccauccuucucccaggauggugaagggggaccugguacccagugauccccaccccaggauccuaaaucaugacuuaccugcuaauaaaaacucauuggaaaagugagaagaucuaaaaaaaaaaaaaaaaaaaaaaaaaaaaaaaaaaaaaaaaaaaaaaaaaaaaaaaaaaaaaaaaugcaucccccccccccccccccccccccccccccccaaaggcucuuuucagagccaccagaauu

SEQ ID NO: 13787 - RNA, 1914 nt, Artificial Sequence
  mRNA product Design e-6 comprising derived and/or modified sequence from HRSV(Memphis-37)__AIY60640.1__F-del_DSCav1_mut0 (opt11)
gggagagcggcucggccauuuugucccagucaguccggaggcugcggcugcagaaguaccgccugcggaguaacugcaaagaagcuuaccauggaacuaccaauccucaaaaccaacgccaucacuacaauccuagccgcgguaacccugugcuucgccuccucacaaaacaucacagaagaauuuuaccaaucaaccugcuccgccguauccaaaggauaccugagcgcccugagaaccggcugguacaccuccgucaucaccauagaacucuccaacaucaaagaaaacaaaugcaacgguacggacgccaaaguuaaacucaucaaacaagaacuugacaaauacaagaacgccgucacagaacugcaacuccucaugcaauccacccccgccgccggcuccggcuccgccauagccuccggcaucgccgucugcaaagucuuacaccuagaaggcgaagucaacaaaaucaaaaacgcacuacuuuccacaaacaaagccgucgucucacucuccaacggcguauccguccucaccuucaaaguacuugaccucaaaaacuacaucgacaaacaacuacuccccauccugaacaaacaauccugcucaaucuccaacaucgaaaccguaaucgaguuccaacagaaaaauaaucgccuccuggagaucacccgcgaguucuccgucaaugcaggagucacaaccccaguaucaaccuacaugcucaccaacuccgaacuccugucgcucaucaacgacaugcccaucacaaacgaccaaaagaaacucauguccaacaacguacaaaucgucagacaacaauccuauucuauaaugugcaucaucaaagaagaaguccucgccuacgucguacaacucccccucuacggcguuaucgacacccccugcuggaaacuccacaccucaccccucugcaccaccaacacaaaagaaggcuccaacaucugccucacucggaccgaccgcggcugguacugcgacaaugccggcagcgucuccuucuucccacaagccgaaaccugcaaaguccaguccaaccgcguauucugcgacacuaugaacuccagaacccuccccuccgaaguaaaccucugcaacaucgacaucuucaacccaaaauacgacugcaaaaucaugaccucaaaaaccgacgucagcucgucagucauaaccagccucggagccauagucucaugcuacggaaaaaccaaaugcaccgccagcaacaaaaaccgcggcauaauaaaaacauucuccaacggcugcgacuauguauccaacaaaggagucgauaccgucuccguaggcaacacccuauacuacgucaacaaacaagaaggcaaaucccucuacgucaaaggugaaccaaucaucaacuucuacgacccucucgucuuccccuccgaugaguucgacgccucaaucagccaaguaaacgaaaagauaaaccaaucacucgccuucauccgcaaauccgacgaacuucuucacaacgucaacgucggcaaaucuaccaccaacauaaugauaaccaccaucaucaucgucaucaucguaauacuccuccuucucaucgccgucggccuauuccuauacugcaaagcccgcuagggacuaguacuggcugcaucucccuuuccucuguccuccauccuucucccaggauggugaagggggaccugguacccagugauccccaccccaggauccuaaaucaugacuuaccugcuaauaaaaacucauuggaaaagugagaagaucuaaaaaaaaaaaaaaaaaaaaaaaaaaaaaaaaaaaaaaaaaaaaaaaaaaaaaaaaaaaaaaaaugcaucccccccccccccccccccccccccccccccaaaggcucuuuucagagccaccagaauu

SEQ ID NO: 13788 - RNA, 2130 nt, Artificial Sequence
  mRNA product Design f-1 comprising derived and/or modified sequence from HRSV(Memphis-37)__AIY60640.1__F-del_DSCav1_mut0 (opt1)
gggagagcggcucggccauuuugucccagucaguccggaggcugcggcugcagaaguaccgccugcggaguaacugcaaagaagcuuaccauggagcugcccauccucaagaccaacgccaucaccacgauccuggccgcggugacccugugcuucgccagcucccagaacaucaccgaggaguucuaccagagcacgugcuccgccgucagcaagggcuaccucuccgcccugcgcaccgggugguacaccagcgugaucaccaucgagcuguccaacaucaaggagaacaagugcaacggcaccgacgccaaggugaagcucaucaagcaggagcuggacaaguacaagaacgcggucacggagcugcagcuccugaugcagagcaccccggccgccggcuccgggagcgcgaucgccuccggcaucgccgucugcaaggugcugcaccucgagggcgaggugaacaagaucaagaacgcccugcuguccaccaacaaggccgucgugagccucuccaacggggugagcguccugaccuucaaggugcuggaccucaagaacuacaucgacaagcagcugcugcccauccugaacaagcagagcugcuccaucagcaacaucgagaccgucaucgaguuccagcagaagaacaaccgccuccuggagaucacgcgggaguucagcgugaacgcgggcgugaccacccccgucuccaccuacaugcugacgaacagcgagcuccugucccugaucaacgacaugccgaucaccaacgaccagaagaagcucaugagcaacaacgugcagaucgugcgccagcaguccuacagcaucaugugcaucaucaaggaggagguccuggccuacguggugcagcugccccucuacggggucaucgacacccccugcuggaagcugcacaccagcccccugugcacgaccaacaccaaggagggcuccaacaucugccucacccggacggaccgcgggugguacugcgacaacgccggcagcguguccuucuucccgcaggccgagaccugcaagguccagagcaaccggguguucugcgacaccaugaacucccggacccugcccagcgaggugaaccucugcaacaucgacaucuucaaccccaaguacgacugcaagaucaugacguccaagaccgacgucagcuccagcgugaucaccucccugggcgccaucgugagcugcuacgggaagaccaagugcacggcgagcaacaagaaccgcggcaucaucaagaccuucuccaacgggugcgacuacgucagcaacaagggcguggacaccguguccgucggcaacacccuguacuacgugaacaagcaggagggcaagagccucuacgugaagggggagcccaucaucaacuucuacgacccgcuggucuuccccuccgacgaguucgacgccagcaucucccaggugaacgagaagaucaaccagagccuggccuucauccggaaguccgacgagcuccugcacaacgugaacgucggcaagagcaccacgaacaucaugaucaccaccaucaucaucgugaucaucgugauccugcugcuccugaucgccgucgggcuguuccucuacugcaaggcccgcugaggacuagugaagggaacacccaaauuuaauucagccuuaagcacaauuaauuaagagugaaacguaauuguacaagcaguuggucacccaccauagggcaugaucaacaccgcaaccuuuccuuuuucccccagugauucugaaaaaccccucuucccuucagcuugcuuagauguuccaaauuuaguaagcuuaaggcggccuacagaagaaaaagaaaaaaaaggccacaaaaguucccucucacuuucaguaaauaaaauaaaagcagcaacagaaauaaagaaauaaaugaaauucaaaaugaaauaaauauuguguugugcagcauuaaaaaaucaauaaaaauuaaaaaugagcaagaucuaaaaaaaaaaaaaaaaaaaaaaaaaaaaaaaaaaaaaaaaaaaaaaaaaaaaaaaaaaaaaaaaugcaucccccccccccccccccccccccccccccccaaaggcucuuuucagagccaccagaauu

SEQ ID NO: 13789 - RNA, 2130 nt, Artificial Sequence
  mRNA product Design f-1 comprising derived and/or modified sequence from HRSV(Memphis-37)__AIY60640.1__F-del_DSCav1_mut0 (opt1)
gggagagcggcucggccauuuugucccagucaguccggaggcugcggcugcagaaguaccgccugcggaguaacugcaaagaagcuuaccauggagcugcccauccucaagaccaacgccaucaccacgauccuggccgcggugacccugugcuucgccagcucccagaacaucaccgaggaguucuaccagagcacgugcuccgccgucagcaagggcuaccucuccgcccugcgcaccgggugguacaccagcgugaucaccaucgagcuguccaacaucaaggagaacaagugcaacggcaccgacgccaaggugaagcucaucaagcaggagcuggacaaguacaagaacgcggucacggagcugcagcuccugaugcagagcaccccggccgccggguccggcagcgccaucgcguccgggaucgccgugugcaaggugcugcaccucgagggcgaggucaacaagaucaagaacgcccugcugagcaccaacaaggccguggugucccucagcaacggcgucuccgugcugaccuucaaggugcuggaccucaagaacuacaucgacaagcagcugcugcccauccucaacaagcagagcugcuccaucagcaacaucgagacggucaucgaguuccagcagaagaacaaccggcugcuggagaucacccgcgaguucuccgugaacgccggggugaccacccccgucagcacguacaugcucaccaacagcgagcugcugucccucaucaacgacaugcccaucaccaacgaccagaagaagcugaugagcaacaacgugcagaucgugcggcagcaguccuacagcaucaugugcaucaucaaggaggagguccuggcguacguggugcagcucccgcuguacggcgucaucgacacccccugcuggaagcugcacacgagcccccucugcaccaccaacaccaaggagggguccaacaucugccugacgcgcaccgaccggggcugguacugcgacaacgccggguccgugagcuucuucccccaggccgagaccugcaaggugcaguccaaccgcgucuucugcgacaccaugaacagccggacgcucccguccgaggugaaccugugcaacaucgacaucuucaaccccaaguacgacugcaagaucaugaccagcaagaccgacgucuccagcuccgugaucaccagccugggcgccaucguguccugcuacggcaagacgaagugcaccgccagcaacaagaaccgggggaucaucaagaccuucuccaacggcugcgacuacgucagcaacaaggggguggacaccgugagcgucggcaacacgcucuacuacgugaacaagcaggagggcaagucccuguacgugaagggggagcccaucaucaacuucuacgacccccuggucuucccgagcgacgaguucgacgcguccaucagccaggugaacgagaagaucaaccagucccucgccuucauccgcaagagcgacgagcugcugcacaacgugaacgucggcaaguccaccaccaacaucaugaucaccaccaucaucaucgugaucaucgugauccuccugcugcucaucgccgucgggcuguuccuguacugcaaggcccggugaggacuagugaagggaacacccaaauuuaauucagccuuaagcacaauuaauuaagagugaaacguaauuguacaagcaguuggucacccaccauagggcaugaucaacaccgcaaccuuuccuuuuucccccagugauucugaaaaaccccucuucccuucagcuugcuuagauguuccaaauuuaguaagcuuaaggcggccuacagaagaaaaagaaaaaaaaggccacaaaaguucccucucacuuucaguaaauaaaauaaaagcagcaacagaaauaaagaaauaaaugaaauucaaaaugaaauaaauauuguguugugcagcauuaaaaaaucaauaaaaauuaaaaaugagcaagaucuaaaaaaaaaaaaaaaaaaaaaaaaaaaaaaaaaaaaaaaaaaaaaaaaaaaaaaaaaaaaaaaaugcaucccccccccccccccccccccccccccccccaaaggcucuuuucagagccaccagaauu

SEQ ID NO: 13790 - RNA, 2130 nt, Artificial Sequence
  mRNA product Design f-1 comprising derived and/or modified sequence from HRSV(Memphis-37)__AIY60640.1__F-del_DSCav1_mut0 (opt2)
gggagagcggcucggccauuuugucccagucaguccggaggcugcggcugcagaaguaccgccugcggaguaacugcaaagaagcuuaccauggagcuccccauccucaagaccaacgccaucaccaccauccucgccgccgucacccucugcuucgccuccucccagaacaucaccgaggaguucuaccaguccaccugcuccgccgucuccaagggcuaccucuccgcccuccgcaccggcugguacaccuccgucaucaccaucgagcucuccaacaucaaggagaacaagugcaacggcaccgacgccaaggucaagcucaucaagcaggagcucgacaaguacaagaacgccgucaccgagcuccagcuccucaugcaguccacccccgccgccggcuccggcuccgccaucgccuccggcaucgccgucugcaagguccuccaccucgagggcgaggucaacaagaucaagaacgcccuccucuccaccaacaaggccgucgucucccucuccaacggcgucuccguccucaccuucaagguccucgaccucaagaacuacaucgacaagcagcuccuccccauccucaacaagcaguccugcuccaucuccaacaucgagaccgucaucgaguuccagcagaagaacaaccgccuccucgagaucacccgcgaguucuccgucaacgccggcgucaccacccccgucuccaccuacaugcucaccaacuccgagcuccucucccucaucaacgacaugcccaucaccaacgaccagaagaagcucauguccaacaacguccagaucguccgccagcaguccuacuccaucaugugcaucaucaaggaggagguccucgccuacgucguccagcucccccucuacggcgucaucgacacccccugcuggaagcuccacaccuccccccucugcaccaccaacaccaaggagggcuccaacaucugccucacccgcaccgaccgcggcugguacugcgacaacgccggcuccgucuccuucuucccccaggccgagaccugcaagguccaguccaaccgcgucuucugcgacaccaugaacucccgcacccuccccuccgaggucaaccucugcaacaucgacaucuucaaccccaaguacgacugcaagaucaugaccuccaagaccgacgucuccuccuccgucaucaccucccucggcgccaucgucuccugcuacggcaagaccaagugcaccgccuccaacaagaaccgcggcaucaucaagaccuucuccaacggcugcgacuacgucuccaacaagggcgucgacaccgucuccgucggcaacacccucuacuacgucaacaagcaggagggcaagucccucuacgucaagggcgagcccaucaucaacuucuacgacccccucgucuuccccuccgacgaguucgacgccuccaucucccaggucaacgagaagaucaaccagucccucgccuucauccgcaaguccgacgagcuccuccacaacgucaacgucggcaaguccaccaccaacaucaugaucaccaccaucaucaucgucaucaucgucauccuccuccuccucaucgccgucggccucuuccucuacugcaaggcccgcugaggacuagugaagggaacacccaaauuuaauucagccuuaagcacaauuaauuaagagugaaacguaauuguacaagcaguuggucacccaccauagggcaugaucaacaccgcaaccuuuccuuuuucccccagugauucugaaaaaccccucuucccuucagcuugcuuagauguuccaaauuuaguaagcuuaaggcggccuacagaagaaaaagaaaaaaaaggccacaaaaguucccucucacuuucaguaaauaaaauaaaagcagcaacagaaauaaagaaauaaaugaaauucaaaaugaaauaaauauuguguugugcagcauuaaaaaaucaauaaaaauuaaaaaugagcaagaucuaaaaaaaaaaaaaaaaaaaaaaaaaaaaaaaaaaaaaaaaaaaaaaaaaaaaaaaaaaaaaaaaugcaucccccccccccccccccccccccccccccccaaaggcucuuuucagagccaccagaauu

SEQ ID NO: 13791 - RNA, 2130 nt, Artificial Sequence
  mRNA product Design f-1 comprising derived and/or modified sequence from HRSV(Memphis-37)__AIY60640.1__F-del_DSCav1_mut0 (opt3)
gggagagcggcucggccauuuugucccagucaguccggaggcugcggcugcagaaguaccgccugcggaguaacugcaaagaagcuuaccauggagcugcccauccucaagaccaacgccauuacaacuauacuugcugcagugacgcugugcuucgccagcucccagaauaucaccgaagaguuuuaccaaucuacauguucagcggucaguaaaggcuauuugagcgcuuuaagaacugggugguacaccuccguuauuacaaucgaacugucuaacauuaaggagaauaaaugcaacggaaccgacgccaaggugaaacuaaucaagcaggaacucgauaaguauaaaaaugcaguaacugagcugcagcuucugaugcagucgaccccugccgcugguucaggcagcgcaauagccagugggaucgcuguguguaaggucuugcaccucgagggagaagugaacaaaauuaagaaugcccugcuguccacaaacaaagcgguugugucucucagcaauggcgucuccguguuaacguucaagguacuggaccuuaagaacuacaucgauaaacaauugcugccaauucuaaauaagcagucaugcaguaucagcaacauagagacuguuauugaauuucagcagaaaaauaacaggcuccuggagaucacccgggaguucucugugaaugccggugucacaacuccgguguccaccuauaugcuuacaaacucagaacuguugagccucauuaacgacaugcccaucaccaaugaucaaaagaaacugaugaguaacaaugugcagaucguccgccagcagucuuacuccauuauguguauaaucaaggaggaaguuuuagcauaugugguacaacugccucucuacggggugauugacacgccaugcuggaaacuucauacuagcccccuguguacaaccaacacuaaggagggaucgaauaucugcuugacacgaaccgaucguggcugguacugugacaacgcuggcucugucuccuuuuucccucaggccgaaacgugcaaggugcagucaaauagaguguuuugugauaccaugaacaguagaacacugccaagcgaggugaaucucugcaacauagacauuuucaaucccaaauaugauugcaagaucaugacuuccaaaaccgacgucucuagcucagugaucacaagucugggggcaauuguauccuguuacggaaagacuaaaugcaccgcuagcaacaagaauagggguaucauuaagacauuuucuaacggcugugauuauguuucaaauaaagggguggacaccgucagugugggaaacacucuuuacuaugucaacaagcaagagggcaaaagccuguacgugaagggugaaccuauaaucaauuucuaugacccauugguuuuuccguccgaugaguucgacgccucuauuucgcagguuaacgagaaaaucaaucagagccucgcguuuauccggaaguccgaugaacuguuacacaacguaaaugucgggaagucaacgacaaacauuaugauaaccacuaucauuaucgugauuaucguuauacugcuacuccugaucgccgugggacuuuucuuguacugcaaagcacgcugaggacuagugaagggaacacccaaauuuaauucagccuuaagcacaauuaauuaagagugaaacguaauuguacaagcaguuggucacccaccauagggcaugaucaacaccgcaaccuuuccuuuuucccccagugauucugaaaaaccccucuucccuucagcuugcuuagauguuccaaauuuaguaagcuuaaggcggccuacagaagaaaaagaaaaaaaaggccacaaaaguucccucucacuuucaguaaauaaaauaaaagcagcaacagaaauaaagaaauaaaugaaauucaaaaugaaauaaauauuguguugugcagcauuaaaaaaucaauaaaaauuaaaaaugagcaagaucuaaaaaaaaaaaaaaaaaaaaaaaaaaaaaaaaaaaaaaaaaaaaaaaaaaaaaaaaaaaaaaaaugcaucccccccccccccccccccccccccccccccaaaggcucuuuucagagccaccagaauu

SEQ ID NO: 13792 - RNA, 2130 nt, Artificial Sequence
  mRNA product Design f-1 comprising derived and/or modified sequence from HRSV(Memphis-37)__AIY60640.1__F-del_DSCav1_mut0 (opt4)
gggagagcggcucggccauuuugucccagucaguccggaggcugcggcugcagaaguaccgccugcggaguaacugcaaagaagcuuaccauggagcugcccauccugaagaccaacgccaucaccaccauccuggccgccgugacccugugcuucgccagcagccagaacaucaccgaggaguucuaccagagcaccugcagcgccgugagcaagggcuaccugagcgcccugagaaccggcugguacaccagcgugaucaccaucgagcugagcaacaucaaggagaacaagugcaacggcaccgacgccaaggugaagcugaucaagcaggagcuggacaaguacaagaacgccgugaccgagcugcagcugcugaugcagagcacccccgccgccggcagcggcagcgccaucgccagcggcaucgccgugugcaaggugcugcaccuggagggcgaggugaacaagaucaagaacgcccugcugagcaccaacaaggccguggugagccugagcaacggcgugagcgugcugaccuucaaggugcuggaccugaagaacuacaucgacaagcagcugcugcccauccugaacaagcagagcugcagcaucagcaacaucgagaccgugaucgaguuccagcagaagaacaacagacugcuggagaucaccagagaguucagcgugaacgccggcgugaccacccccgugagcaccuacaugcugaccaacagcgagcugcugagccugaucaacgacaugcccaucaccaacgaccagaagaagcugaugagcaacaacgugcagaucgugagacagcagagcuacagcaucaugugcaucaucaaggaggaggugcuggccuacguggugcagcugccccuguacggcgugaucgacacccccugcuggaagcugcacaccagcccccugugcaccaccaacaccaaggagggcagcaacaucugccugaccagaaccgacagaggcugguacugcgacaacgccggcagcgugagcuucuucccccaggccgagaccugcaaggugcagagcaacagaguguucugcgacaccaugaacagcagaacccugcccagcgaggugaaccugugcaacaucgacaucuucaaccccaaguacgacugcaagaucaugaccagcaagaccgacgugagcagcagcgugaucaccagccugggcgccaucgugagcugcuacggcaagaccaagugcaccgccagcaacaagaacagaggcaucaucaagaccuucagcaacggcugcgacuacgugagcaacaagggcguggacaccgugagcgugggcaacacccuguacuacgugaacaagcaggagggcaagagccuguacgugaagggcgagcccaucaucaacuucuacgacccccugguguuccccagcgacgaguucgacgccagcaucagccaggugaacgagaagaucaaccagagccuggccuucaucagaaagagcgacgagcugcugcacaacgugaacgugggcaagagcaccaccaacaucaugaucaccaccaucaucaucgugaucaucgugauccugcugcugcugaucgccgugggccuguuccuguacugcaaggccagaugaggacuagugaagggaacacccaaauuuaauucagccuuaagcacaauuaauuaagagugaaacguaauuguacaagcaguuggucacccaccauagggcaugaucaacaccgcaaccuuuccuuuuucccccagugauucugaaaaaccccucuucccuucagcuugcuuagauguuccaaauuuaguaagcuuaaggcggccuacagaagaaaaagaaaaaaaaggccacaaaaguucccucucacuuucaguaaauaaaauaaaagcagcaacagaaauaaagaaauaaaugaaauucaaaaugaaauaaauauuguguugugcagcauuaaaaaaucaauaaaaauuaaaaaugagcaagaucuaaaaaaaaaaaaaaaaaaaaaaaaaaaaaaaaaaaaaaaaaaaaaaaaaaaaaaaaaaaaaaaaugcaucccccccccccccccccccccccccccccccaaaggcucuuuucagagccaccagaauu

SEQ ID NO: 13793 - RNA, 2130 nt, Artificial Sequence
  mRNA product Design f-1 comprising derived and/or modified sequence from HRSV(Memphis-37)__AIY60640.1__F-del_DSCav1_mut0 (opt5)
gggagagcggcucggccauuuugucccagucaguccggaggcugcggcugcagaaguaccgccugcggaguaacugcaaagaagcuuaccauggagcugcccauccucaagaccaacgccauuacaacgauccuggcugccgugacccuuugcuucgcgagcucccagaauauuacagaagaguuuuaccaaucuaccuguagcgcugucuccaaaggcuaucugucugcccucagaacagggugguacaccagcguuaucacaauugaacuguccaacaucaaggagaauaaaugcaacggaaccgacgccaaggugaaacuuaucaagcaggaacuggauaaguauaaaaaugcugugacggagcuccagcugcugaugcagucuaccccugccgcuggcagcggguccgccauugcgagcggaaucgccgucuguaaggugcuccaccuggagggcgaaguuaacaaaauuaagaaugcccuucugucuacaaacaaagcuguggucucccucagcaauggggugucuguucugaccuucaaggugcuugaccugaagaacuacaucgauaaacaacuccugccgauucugaauaagcaguccugcagcaucucuaacauugagacagucaucgaauuucagcagaaaaauaaccggcuccuggagaucacccgcgaguucuccgugaaugcuggagugacgacacccgucagcaccuauaugcuuacaaacuccgaacugcucucucugauuaacgacaugccuaucaccaaugaucaaaagaaacuuaugagcaacaauguucagauugugagacagcaguccuacagcaucauguguauuaucaaggaggaagugcuggccuaugucgugcaacucccccuguacggcguuaucgacaccccuugcuggaaacugcauacaucuccccucuguacgaccaacacaaaggagggcuccaauauuugccugacccggacagaucgcgggugguacugugacaacgcgggaagcgugagcuuuuucccucaggccgaaaccugcaagguccagucuaauagaguguuuugugauacgaugaacuccagaacacugccgucugagguuaaucucugcaacaucgacauuuucaaucccaaauaugauugcaagaucaugaccagcaaaaccgacguguccagcucugucauuacaucccugggcgcuaucgugagcuguuacgggaagaccaaaugcacagccucuaacaagaaucggggaaucauuaagacguuuuccaacggcugugauuaugucagcaauaaagggguggacaccguuuccgugggaaacacacuuuacuaugucaacaagcaagagggcaaaucucuguacgugaagggcgaaccuaucauuaauuucuaugacccccucguuuuuccuagcgaugaguucgacgcuuccaucucucaggugaacgaaaagauuaaucagagccuggccuuuauccgcaaguccgaugagcugcuccacaacgucaauguggggaaaagcaccacaaacauuaugaucaccacgaucauuaucgugauuaucguuauucugcuucugcucaucgccgucggacuguuccuguacugcaaagcuagaugaggacuagugaagggaacacccaaauuuaauucagccuuaagcacaauuaauuaagagugaaacguaauuguacaagcaguuggucacccaccauagggcaugaucaacaccgcaaccuuuccuuuuucccccagugauucugaaaaaccccucuucccuucagcuugcuuagauguuccaaauuuaguaagcuuaaggcggccuacagaagaaaaagaaaaaaaaggccacaaaaguucccucucacuuucaguaaauaaaauaaaagcagcaacagaaauaaagaaauaaaugaaauucaaaaugaaauaaauauuguguugugcagcauuaaaaaaucaauaaaaauuaaaaaugagcaagaucuaaaaaaaaaaaaaaaaaaaaaaaaaaaaaaaaaaaaaaaaaaaaaaaaaaaaaaaaaaaaaaaaugcaucccccccccccccccccccccccccccccccaaaggcucuuuucagagccaccagaauu

SEQ ID NO: 13794 - RNA, 2130 nt, Artificial Sequence
  mRNA product Design f-1 comprising derived and/or modified sequence from HRSV(Memphis-37)__AIY60640.1__F-del_DSCav1_mut0 (opt6)
gggagagcggcucggccauuuugucccagucaguccggaggcugcggcugcagaaguaccgccugcggaguaacugcaaagaagcuuaccauggaacucccaauacuuaaaacaaacgcaaucacaacaauacuagcugcagucacacuaugcuucgccucaucacaaaauauaacagaagaauuuuaucaaucaacaugcuccgcaguaucaaaaggauaucucucugcauuacgaacagguugguacaccucgguaauaacaauagaauuaucaaacauaaaagaaaauaaaugcaauggaaccgaugccaaaguaaaacuaaucaaacaagaacuugacaaauacaaaaacgcaguaacagaacuacaacuauuaaugcaaucaacaccagcagcagguucaggcuccgcaaucgcuucaggaauagccguuuguaaaguacuacacuuagaaggagaaguaaauaaaauaaaaaacgccuuacuaucaacaaacaaagcaguagucucccuuuccaacggaguaucagucuuaacuuuuaaaguacucgacuuaaaaaauuacaucgacaaacaacuacuacccauucuaaauaaacaaucaugcucaauaucaaacaucgaaacaguaaucgaauuucaacaaaaaaauaauagauuacuagaaauaacacgagaauuuuccguaaaugccggaguaacgaccccagucucaacauacauguuaacaaacucagaauuacuaucacucauuaacgauaugccaauaacaaaugaccaaaaaaaacuaaugucaaacaacguccaaauaguacgacaacaaucauacucuaucauguguauaauaaaagaagaaguuuuagcauacguaguacaacuaccacuuuacggagucauagacaccccaugcuggaaacuacacacaucacccuuauguacaacaaacaccaaagaagggucuaacauaugucucacuagaacagaucgaggcugguacugcgacaacgcaggaucaguuagcuuuuucccucaagccgaaaccuguaaaguacaauccaaucgaguauuuugcgacacuaugaacucuagaaccuuacccuccgaaguaaaccuauguaacauagacauauuuaaucccaaauaugauugcaaaaucaugacauccaaaacagauguaucaagcucuguaauaaccucacuaggagcaauaguuucaugcuaugguaaaacaaaaugcaccgccucaaacaaaaauagagggauaaucaaaaccuucucaaauggaugcgacuacguaucaaauaaaggaguagacaccgucuccguaggaaacacacuauacuacguaaacaaacaagaaggaaaaucacuauacguaaaaggagaaccaaucauaaacuucuacgacccacuuguuuucccaucagaugaauuugaugccuccauaucacaaguaaacgaaaaaauaaaccaaucucuagccuucaucagaaaauccgacgaacuuuuacacaacguaaacguagguaaaucaacaaccaacaucaugauaacaacaauaauaauaguaauaauuguaauacuuuuacuacuuaucgccguaggccuauucuuauauuguaaagcaagaugaggacuagugaagggaacacccaaauuuaauucagccuuaagcacaauuaauuaagagugaaacguaauuguacaagcaguuggucacccaccauagggcaugaucaacaccgcaaccuuuccuuuuucccccagugauucugaaaaaccccucuucccuucagcuugcuuagauguuccaaauuuaguaagcuuaaggcggccuacagaagaaaaagaaaaaaaaggccacaaaaguucccucucacuuucaguaaauaaaauaaaagcagcaacagaaauaaagaaauaaaugaaauucaaaaugaaauaaauauuguguugugcagcauuaaaaaaucaauaaaaauuaaaaaugagcaagaucuaaaaaaaaaaaaaaaaaaaaaaaaaaaaaaaaaaaaaaaaaaaaaaaaaaaaaaaaaaaaaaaaugcaucccccccccccccccccccccccccccccccaaaggcucuuuucagagccaccagaauu

SEQ ID NO: 13795 - RNA, 2130 nt, Artificial Sequence
  mRNA product Design f-1 comprising derived and/or modified sequence from HRSV(Memphis-37)__AIY60640.1__F-del_DSCav1_mut0 (opt11)
gggagagcggcucggccauuuugucccagucaguccggaggcugcggcugcagaaguaccgccugcggaguaacugcaaagaagcuuaccauggaacuaccaauccucaaaaccaacgccaucacuacaauccuagccgcgguaacccugugcuucgccuccucacaaaacaucacagaagaauuuuaccaaucaaccugcuccgccguauccaaaggauaccugagcgcccugagaaccggcugguacaccuccgucaucaccauagaacucuccaacaucaaagaaaacaaaugcaacgguacggacgccaaaguuaaacucaucaaacaagaacuugacaaauacaagaacgccgucacagaacugcaacuccucaugcaauccacccccgccgccggcuccggcuccgccauagccuccggcaucgccgucugcaaagucuuacaccuagaaggcgaagucaacaaaaucaaaaacgcacuacuuuccacaaacaaagccgucgucucacucuccaacggcguauccguccucaccuucaaaguacuugaccucaaaaacuacaucgacaaacaacuacuccccauccugaacaaacaauccugcucaaucuccaacaucgaaaccguaaucgaguuccaacagaaaaauaaucgccuccuggagaucacccgcgaguucuccgucaaugcaggagucacaaccccaguaucaaccuacaugcucaccaacuccgaacuccugucgcucaucaacgacaugcccaucacaaacgaccaaaagaaacucauguccaacaacguacaaaucgucagacaacaauccuauucuauaaugugcaucaucaaagaagaaguccucgccuacgucguacaacucccccucuacggcguuaucgacacccccugcuggaaacuccacaccucaccccucugcaccaccaacacaaaagaaggcuccaacaucugccucacucggaccgaccgcggcugguacugcgacaaugccggcagcgucuccuucuucccacaagccgaaaccugcaaaguccaguccaaccgcguauucugcgacacuaugaacuccagaacccuccccuccgaaguaaaccucugcaacaucgacaucuucaacccaaaauacgacugcaaaaucaugaccucaaaaaccgacgucagcucgucagucauaaccagccucggagccauagucucaugcuacggaaaaaccaaaugcaccgccagcaacaaaaaccgcggcauaauaaaaacauucuccaacggcugcgacuauguauccaacaaaggagucgauaccgucuccguaggcaacacccuauacuacgucaacaaacaagaaggcaaaucccucuacgucaaaggugaaccaaucaucaacuucuacgacccucucgucuuccccuccgaugaguucgacgccucaaucagccaaguaaacgaaaagauaaaccaaucacucgccuucauccgcaaauccgacgaacuucuucacaacgucaacgucggcaaaucuaccaccaacauaaugauaaccaccaucaucaucgucaucaucguaauacuccuccuucucaucgccgucggccuauuccuauacugcaaagcccgcuagggacuagugaagggaacacccaaauuuaauucagccuuaagcacaauuaauuaagagugaaacguaauuguacaagcaguuggucacccaccauagggcaugaucaacaccgcaaccuuuccuuuuucccccagugauucugaaaaaccccucuucccuucagcuugcuuagauguuccaaauuuaguaagcuuaaggcggccuacagaagaaaaagaaaaaaaaggccacaaaaguucccucucacuuucaguaaauaaaauaaaagcagcaacagaaauaaagaaauaaaugaaauucaaaaugaaauaaauauuguguugugcagcauuaaaaaaucaauaaaaauuaaaaaugagcaagaucuaaaaaaaaaaaaaaaaaaaaaaaaaaaaaaaaaaaaaaaaaaaaaaaaaaaaaaaaaaaaaaaaugcaucccccccccccccccccccccccccccccccaaaggcucuuuucagagccaccagaauu

SEQ ID NO: 13796 - RNA, 1910 nt, Artificial Sequence
  mRNA product Design f-2 comprising derived and/or modified sequence from HRSV(Memphis-37)__AIY60640.1__F-del_DSCav1_mut0 (opt1)
gggagagcggcucggccauuuugucccagucaguccggaggcugcggcugcagaaguaccgccugcggaguaacugcaaagaagcuuaccauggagcugcccauccucaagaccaacgccaucaccacgauccuggccgcggugacccugugcuucgccagcucccagaacaucaccgaggaguucuaccagagcacgugcuccgccgucagcaagggcuaccucuccgcccugcgcaccgggugguacaccagcgugaucaccaucgagcuguccaacaucaaggagaacaagugcaacggcaccgacgccaaggugaagcucaucaagcaggagcuggacaaguacaagaacgcggucacggagcugcagcuccugaugcagagcaccccggccgccggcuccgggagcgcgaucgccuccggcaucgccgucugcaaggugcugcaccucgagggcgaggugaacaagaucaagaacgcccugcuguccaccaacaaggccgucgugagccucuccaacggggugagcguccugaccuucaaggugcuggaccucaagaacuacaucgacaagcagcugcugcccauccugaacaagcagagcugcuccaucagcaacaucgagaccgucaucgaguuccagcagaagaacaaccgccuccuggagaucacgcgggaguucagcgugaacgcgggcgugaccacccccgucuccaccuacaugcugacgaacagcgagcuccugucccugaucaacgacaugccgaucaccaacgaccagaagaagcucaugagcaacaacgugcagaucgugcgccagcaguccuacagcaucaugugcaucaucaaggaggagguccuggccuacguggugcagcugccccucuacggggucaucgacacccccugcuggaagcugcacaccagcccccugugcacgaccaacaccaaggagggcuccaacaucugccucacccggacggaccgcgggugguacugcgacaacgccggcagcguguccuucuucccgcaggccgagaccugcaagguccagagcaaccggguguucugcgacaccaugaacucccggacccugcccagcgaggugaaccucugcaacaucgacaucuucaaccccaaguacgacugcaagaucaugacguccaagaccgacgucagcuccagcgugaucaccucccugggcgccaucgugagcugcuacgggaagaccaagugcacggcgagcaacaagaaccgcggcaucaucaagaccuucuccaacgggugcgacuacgucagcaacaagggcguggacaccguguccgucggcaacacccuguacuacgugaacaagcaggagggcaagagccucuacgugaagggggagcccaucaucaacuucuacgacccgcuggucuuccccuccgacgaguucgacgccagcaucucccaggugaacgagaagaucaaccagagccuggccuucauccggaaguccgacgagcuccugcacaacgugaacgucggcaagagcaccacgaacaucaugaucaccaccaucaucaucgugaucaucgugauccugcugcuccugaucgccgucgggcuguuccucuacugcaaggcccgcugaggacuaguggaagcauuuuccuggcugauuaaaagaaauuacucagcuauggucaucuguuccuguuagaaggcuaugcagcauauuauauacuaugcgcauguuaugaaaugcauaauaaaaaauuuuaaaaaaucuaaaagaucuaaaaaaaaaaaaaaaaaaaaaaaaaaaaaaaaaaaaaaaaaaaaaaaaaaaaaaaaaaaaaaaaugcaucccccccccccccccccccccccccccccccaaaggcucuuuucagagccaccagaauu

SEQ ID NO: 13797 - RNA, 1910 nt, Artificial Sequence
  mRNA product Design f-2 comprising derived and/or modified sequence from HRSV(Memphis-37)__AIY60640.1__F-del_DSCav1_mut0 (opt1)
gggagagcggcucggccauuuugucccagucaguccggaggcugcggcugcagaaguaccgccugcggaguaacugcaaagaagcuuaccauggagcugcccauccucaagaccaacgccaucaccacgauccuggccgcggugacccugugcuucgccagcucccagaacaucaccgaggaguucuaccagagcacgugcuccgccgucagcaagggcuaccucuccgcccugcgcaccgggugguacaccagcgugaucaccaucgagcuguccaacaucaaggagaacaagugcaacggcaccgacgccaaggugaagcucaucaagcaggagcuggacaaguacaagaacgcggucacggagcugcagcuccugaugcagagcaccccggccgccggguccggcagcgccaucgcguccgggaucgccgugugcaaggugcugcaccucgagggcgaggucaacaagaucaagaacgcccugcugagcaccaacaaggccguggugucccucagcaacggcgucuccgugcugaccuucaaggugcuggaccucaagaacuacaucgacaagcagcugcugcccauccucaacaagcagagcugcuccaucagcaacaucgagacggucaucgaguuccagcagaagaacaaccggcugcuggagaucacccgcgaguucuccgugaacgccggggugaccacccccgucagcacguacaugcucaccaacagcgagcugcugucccucaucaacgacaugcccaucaccaacgaccagaagaagcugaugagcaacaacgugcagaucgugcggcagcaguccuacagcaucaugugcaucaucaaggaggagguccuggcguacguggugcagcucccgcuguacggcgucaucgacacccccugcuggaagcugcacacgagcccccucugcaccaccaacaccaaggagggguccaacaucugccugacgcgcaccgaccggggcugguacugcgacaacgccggguccgugagcuucuucccccaggccgagaccugcaaggugcaguccaaccgcgucuucugcgacaccaugaacagccggacgcucccguccgaggugaaccugugcaacaucgacaucuucaaccccaaguacgacugcaagaucaugaccagcaagaccgacgucuccagcuccgugaucaccagccugggcgccaucguguccugcuacggcaagacgaagugcaccgccagcaacaagaaccgggggaucaucaagaccuucuccaacggcugcgacuacgucagcaacaaggggguggacaccgugagcgucggcaacacgcucuacuacgugaacaagcaggagggcaagucccuguacgugaagggggagcccaucaucaacuucuacgacccccuggucuucccgagcgacgaguucgacgcguccaucagccaggugaacgagaagaucaaccagucccucgccuucauccgcaagagcgacgagcugcugcacaacgugaacgucggcaaguccaccaccaacaucaugaucaccaccaucaucaucgugaucaucgugauccuccugcugcucaucgccgucgggcuguuccuguacugcaaggcccggugaggacuaguggaagcauuuuccuggcugauuaaaagaaauuacucagcuauggucaucuguuccuguuagaaggcuaugcagcauauuauauacuaugcgcauguuaugaaaugcauaauaaaaaauuuuaaaaaaucuaaaagaucuaaaaaaaaaaaaaaaaaaaaaaaaaaaaaaaaaaaaaaaaaaaaaaaaaaaaaaaaaaaaaaaaugcaucccccccccccccccccccccccccccccccaaaggcucuuuucagagccaccagaauu

SEQ ID NO: 13798 - RNA, 1910 nt, Artificial Sequence
  mRNA product Design f-2 comprising derived and/or modified sequence from HRSV(Memphis-37)__AIY60640.1__F-del_DSCav1_mut0 (opt2)
gggagagcggcucggccauuuugucccagucaguccggaggcugcggcugcagaaguaccgccugcggaguaacugcaaagaagcuuaccauggagcuccccauccucaagaccaacgccaucaccaccauccucgccgccgucacccucugcuucgccuccucccagaacaucaccgaggaguucuaccaguccaccugcuccgccgucuccaagggcuaccucuccgcccuccgcaccggcugguacaccuccgucaucaccaucgagcucuccaacaucaaggagaacaagugcaacggcaccgacgccaaggucaagcucaucaagcaggagcucgacaaguacaagaacgccgucaccgagcuccagcuccucaugcaguccacccccgccgccggcuccggcuccgccaucgccuccggcaucgccgucugcaagguccuccaccucgagggcgaggucaacaagaucaagaacgcccuccucuccaccaacaaggccgucgucucccucuccaacggcgucuccguccucaccuucaagguccucgaccucaagaacuacaucgacaagcagcuccuccccauccucaacaagcaguccugcuccaucuccaacaucgagaccgucaucgaguuccagcagaagaacaaccgccuccucgagaucacccgcgaguucuccgucaacgccggcgucaccacccccgucuccaccuacaugcucaccaacuccgagcuccucucccucaucaacgacaugcccaucaccaacgaccagaagaagcucauguccaacaacguccagaucguccgccagcaguccuacuccaucaugugcaucaucaaggaggagguccucgccuacgucguccagcucccccucuacggcgucaucgacacccccugcuggaagcuccacaccuccccccucugcaccaccaacaccaaggagggcuccaacaucugccucacccgcaccgaccgcggcugguacugcgacaacgccggcuccgucuccuucuucccccaggccgagaccugcaagguccaguccaaccgcgucuucugcgacaccaugaacucccgcacccuccccuccgaggucaaccucugcaacaucgacaucuucaaccccaaguacgacugcaagaucaugaccuccaagaccgacgucuccuccuccgucaucaccucccucggcgccaucgucuccugcuacggcaagaccaagugcaccgccuccaacaagaaccgcggcaucaucaagaccuucuccaacggcugcgacuacgucuccaacaagggcgucgacaccgucuccgucggcaacacccucuacuacgucaacaagcaggagggcaagucccucuacgucaagggcgagcccaucaucaacuucuacgacccccucgucuuccccuccgacgaguucgacgccuccaucucccaggucaacgagaagaucaaccagucccucgccuucauccgcaaguccgacgagcuccuccacaacgucaacgucggcaaguccaccaccaacaucaugaucaccaccaucaucaucgucaucaucgucauccuccuccuccucaucgccgucggccucuuccucuacugcaaggcccgcugaggacuaguggaagcauuuuccuggcugauuaaaagaaauuacucagcuauggucaucuguuccuguuagaaggcuaugcagcauauuauauacuaugcgcauguuaugaaaugcauaauaaaaaauuuuaaaaaaucuaaaagaucuaaaaaaaaaaaaaaaaaaaaaaaaaaaaaaaaaaaaaaaaaaaaaaaaaaaaaaaaaaaaaaaaugcaucccccccccccccccccccccccccccccccaaaggcucuuuucagagccaccagaauu

SEQ ID NO: 13799 - RNA, 1910 nt, Artificial Sequence
  mRNA product Design f-2 comprising derived and/or modified sequence from HRSV(Memphis-37)__AIY60640.1__F-del_DSCav1_mut0 (opt3)
gggagagcggcucggccauuuugucccagucaguccggaggcugcggcugcagaaguaccgccugcggaguaacugcaaagaagcuuaccauggagcugcccauccucaagaccaacgccauuacaacuauacuugcugcagugacgcugugcuucgccagcucccagaauaucaccgaagaguuuuaccaaucuacauguucagcggucaguaaaggcuauuugagcgcuuuaagaacugggugguacaccuccguuauuacaaucgaacugucuaacauuaaggagaauaaaugcaacggaaccgacgccaaggugaaacuaaucaagcaggaacucgauaaguauaaaaaugcaguaacugagcugcagcuucugaugcagucgaccccugccgcugguucaggcagcgcaauagccagugggaucgcuguguguaaggucuugcaccucgagggagaagugaacaaaauuaagaaugcccugcuguccacaaacaaagcgguugugucucucagcaauggcgucuccguguuaacguucaagguacuggaccuuaagaacuacaucgauaaacaauugcugccaauucuaaauaagcagucaugcaguaucagcaacauagagacuguuauugaauuucagcagaaaaauaacaggcuccuggagaucacccgggaguucucugugaaugccggugucacaacuccgguguccaccuauaugcuuacaaacucagaacuguugagccucauuaacgacaugcccaucaccaaugaucaaaagaaacugaugaguaacaaugugcagaucguccgccagcagucuuacuccauuauguguauaaucaaggaggaaguuuuagcauaugugguacaacugccucucuacggggugauugacacgccaugcuggaaacuucauacuagcccccuguguacaaccaacacuaaggagggaucgaauaucugcuugacacgaaccgaucguggcugguacugugacaacgcuggcucugucuccuuuuucccucaggccgaaacgugcaaggugcagucaaauagaguguuuugugauaccaugaacaguagaacacugccaagcgaggugaaucucugcaacauagacauuuucaaucccaaauaugauugcaagaucaugacuuccaaaaccgacgucucuagcucagugaucacaagucugggggcaauuguauccuguuacggaaagacuaaaugcaccgcuagcaacaagaauagggguaucauuaagacauuuucuaacggcugugauuauguuucaaauaaagggguggacaccgucagugugggaaacacucuuuacuaugucaacaagcaagagggcaaaagccuguacgugaagggugaaccuauaaucaauuucuaugacccauugguuuuuccguccgaugaguucgacgccucuauuucgcagguuaacgagaaaaucaaucagagccucgcguuuauccggaaguccgaugaacuguuacacaacguaaaugucgggaagucaacgacaaacauuaugauaaccacuaucauuaucgugauuaucguuauacugcuacuccugaucgccgugggacuuuucuuguacugcaaagcacgcugaggacuaguggaagcauuuuccuggcugauuaaaagaaauuacucagcuauggucaucuguuccuguuagaaggcuaugcagcauauuauauacuaugcgcauguuaugaaaugcauaauaaaaaauuuuaaaaaaucuaaaagaucuaaaaaaaaaaaaaaaaaaaaaaaaaaaaaaaaaaaaaaaaaaaaaaaaaaaaaaaaaaaaaaaaugcaucccccccccccccccccccccccccccccccaaaggcucuuuucagagccaccagaauu

SEQ ID NO: 13800 - RNA, 1910 nt, Artificial Sequence
  mRNA product Design f-2 comprising derived and/or modified sequence from HRSV(Memphis-37)__AIY60640.1__F-del_DSCav1_mut0 (opt4)
gggagagcggcucggccauuuugucccagucaguccggaggcugcggcugcagaaguaccgccugcggaguaacugcaaagaagcuuaccauggagcugcccauccugaagaccaacgccaucaccaccauccuggccgccgugacccugugcuucgccagcagccagaacaucaccgaggaguucuaccagagcaccugcagcgccgugagcaagggcuaccugagcgcccugagaaccggcugguacaccagcgugaucaccaucgagcugagcaacaucaaggagaacaagugcaacggcaccgacgccaaggugaagcugaucaagcaggagcuggacaaguacaagaacgccgugaccgagcugcagcugcugaugcagagcacccccgccgccggcagcggcagcgccaucgccagcggcaucgccgugugcaaggugcugcaccuggagggcgaggugaacaagaucaagaacgcccugcugagcaccaacaaggccguggugagccugagcaacggcgugagcgugcugaccuucaaggugcuggaccugaagaacuacaucgacaagcagcugcugcccauccugaacaagcagagcugcagcaucagcaacaucgagaccgugaucgaguuccagcagaagaacaacagacugcuggagaucaccagagaguucagcgugaacgccggcgugaccacccccgugagcaccuacaugcugaccaacagcgagcugcugagccugaucaacgacaugcccaucaccaacgaccagaagaagcugaugagcaacaacgugcagaucgugagacagcagagcuacagcaucaugugcaucaucaaggaggaggugcuggccuacguggugcagcugccccuguacggcgugaucgacacccccugcuggaagcugcacaccagcccccugugcaccaccaacaccaaggagggcagcaacaucugccugaccagaaccgacagaggcugguacugcgacaacgccggcagcgugagcuucuucccccaggccgagaccugcaaggugcagagcaacagaguguucugcgacaccaugaacagcagaacccugcccagcgaggugaaccugugcaacaucgacaucuucaaccccaaguacgacugcaagaucaugaccagcaagaccgacgugagcagcagcgugaucaccagccugggcgccaucgugagcugcuacggcaagaccaagugcaccgccagcaacaagaacagaggcaucaucaagaccuucagcaacggcugcgacuacgugagcaacaagggcguggacaccgugagcgugggcaacacccuguacuacgugaacaagcaggagggcaagagccuguacgugaagggcgagcccaucaucaacuucuacgacccccugguguuccccagcgacgaguucgacgccagcaucagccaggugaacgagaagaucaaccagagccuggccuucaucagaaagagcgacgagcugcugcacaacgugaacgugggcaagagcaccaccaacaucaugaucaccaccaucaucaucgugaucaucgugauccugcugcugcugaucgccgugggccuguuccuguacugcaaggccagaugaggacuaguggaagcauuuuccuggcugauuaaaagaaauuacucagcuauggucaucuguuccuguuagaaggcuaugcagcauauuauauacuaugcgcauguuaugaaaugcauaauaaaaaauuuuaaaaaaucuaaaagaucuaaaaaaaaaaaaaaaaaaaaaaaaaaaaaaaaaaaaaaaaaaaaaaaaaaaaaaaaaaaaaaaaugcaucccccccccccccccccccccccccccccccaaaggcucuuuucagagccaccagaauu

SEQ ID NO: 13801 - RNA, 1910 nt, Artificial Sequence
  mRNA product Design f-2 comprising derived and/or modified sequence from HRSV(Memphis-37)__AIY60640.1__F-del_DSCav1_mut0 (opt5)
gggagagcggcucggccauuuugucccagucaguccggaggcugcggcugcagaaguaccgccugcggaguaacugcaaagaagcuuaccauggagcugcccauccucaagaccaacgccauuacaacgauccuggcugccgugacccuuugcuucgcgagcucccagaauauuacagaagaguuuuaccaaucuaccuguagcgcugucuccaaaggcuaucugucugcccucagaacagggugguacaccagcguuaucacaauugaacuguccaacaucaaggagaauaaaugcaacggaaccgacgccaaggugaaacuuaucaagcaggaacuggauaaguauaaaaaugcugugacggagcuccagcugcugaugcagucuaccccugccgcuggcagcggguccgccauugcgagcggaaucgccgucuguaaggugcuccaccuggagggcgaaguuaacaaaauuaagaaugcccuucugucuacaaacaaagcuguggucucccucagcaauggggugucuguucugaccuucaaggugcuugaccugaagaacuacaucgauaaacaacuccugccgauucugaauaagcaguccugcagcaucucuaacauugagacagucaucgaauuucagcagaaaaauaaccggcuccuggagaucacccgcgaguucuccgugaaugcuggagugacgacacccgucagcaccuauaugcuuacaaacuccgaacugcucucucugauuaacgacaugccuaucaccaaugaucaaaagaaacuuaugagcaacaauguucagauugugagacagcaguccuacagcaucauguguauuaucaaggaggaagugcuggccuaugucgugcaacucccccuguacggcguuaucgacaccccuugcuggaaacugcauacaucuccccucuguacgaccaacacaaaggagggcuccaauauuugccugacccggacagaucgcgggugguacugugacaacgcgggaagcgugagcuuuuucccucaggccgaaaccugcaagguccagucuaauagaguguuuugugauacgaugaacuccagaacacugccgucugagguuaaucucugcaacaucgacauuuucaaucccaaauaugauugcaagaucaugaccagcaaaaccgacguguccagcucugucauuacaucccugggcgcuaucgugagcuguuacgggaagaccaaaugcacagccucuaacaagaaucggggaaucauuaagacguuuuccaacggcugugauuaugucagcaauaaagggguggacaccguuuccgugggaaacacacuuuacuaugucaacaagcaagagggcaaaucucuguacgugaagggcgaaccuaucauuaauuucuaugacccccucguuuuuccuagcgaugaguucgacgcuuccaucucucaggugaacgaaaagauuaaucagagccuggccuuuauccgcaaguccgaugagcugcuccacaacgucaauguggggaaaagcaccacaaacauuaugaucaccacgaucauuaucgugauuaucguuauucugcuucugcucaucgccgucggacuguuccuguacugcaaagcuagaugaggacuaguggaagcauuuuccuggcugauuaaaagaaauuacucagcuauggucaucuguuccuguuagaaggcuaugcagcauauuauauacuaugcgcauguuaugaaaugcauaauaaaaaauuuuaaaaaaucuaaaagaucuaaaaaaaaaaaaaaaaaaaaaaaaaaaaaaaaaaaaaaaaaaaaaaaaaaaaaaaaaaaaaaaaugcaucccccccccccccccccccccccccccccccaaaggcucuuuucagagccaccagaauu

SEQ ID NO: 13802 - RNA, 1910 nt, Artificial Sequence
  mRNA product Design f-2 comprising derived and/or modified sequence from HRSV(Memphis-37)__AIY60640.1__F-del_DSCav1_mut0 (opt6)
gggagagcggcucggccauuuugucccagucaguccggaggcugcggcugcagaaguaccgccugcggaguaacugcaaagaagcuuaccauggaacucccaauacuuaaaacaaacgcaaucacaacaauacuagcugcagucacacuaugcuucgccucaucacaaaauauaacagaagaauuuuaucaaucaacaugcuccgcaguaucaaaaggauaucucucugcauuacgaacagguugguacaccucgguaauaacaauagaauuaucaaacauaaaagaaaauaaaugcaauggaaccgaugccaaaguaaaacuaaucaaacaagaacuugacaaauacaaaaacgcaguaacagaacuacaacuauuaaugcaaucaacaccagcagcagguucaggcuccgcaaucgcuucaggaauagccguuuguaaaguacuacacuuagaaggagaaguaaauaaaauaaaaaacgccuuacuaucaacaaacaaagcaguagucucccuuuccaacggaguaucagucuuaacuuuuaaaguacucgacuuaaaaaauuacaucgacaaacaacuacuacccauucuaaauaaacaaucaugcucaauaucaaacaucgaaacaguaaucgaauuucaacaaaaaaauaauagauuacuagaaauaacacgagaauuuuccguaaaugccggaguaacgaccccagucucaacauacauguuaacaaacucagaauuacuaucacucauuaacgauaugccaauaacaaaugaccaaaaaaaacuaaugucaaacaacguccaaauaguacgacaacaaucauacucuaucauguguauaauaaaagaagaaguuuuagcauacguaguacaacuaccacuuuacggagucauagacaccccaugcuggaaacuacacacaucacccuuauguacaacaaacaccaaagaagggucuaacauaugucucacuagaacagaucgaggcugguacugcgacaacgcaggaucaguuagcuuuuucccucaagccgaaaccuguaaaguacaauccaaucgaguauuuugcgacacuaugaacucuagaaccuuacccuccgaaguaaaccuauguaacauagacauauuuaaucccaaauaugauugcaaaaucaugacauccaaaacagauguaucaagcucuguaauaaccucacuaggagcaauaguuucaugcuaugguaaaacaaaaugcaccgccucaaacaaaaauagagggauaaucaaaaccuucucaaauggaugcgacuacguaucaaauaaaggaguagacaccgucuccguaggaaacacacuauacuacguaaacaaacaagaaggaaaaucacuauacguaaaaggagaaccaaucauaaacuucuacgacccacuuguuuucccaucagaugaauuugaugccuccauaucacaaguaaacgaaaaaauaaaccaaucucuagccuucaucagaaaauccgacgaacuuuuacacaacguaaacguagguaaaucaacaaccaacaucaugauaacaacaauaauaauaguaauaauuguaauacuuuuacuacuuaucgccguaggccuauucuuauauuguaaagcaagaugaggacuaguggaagcauuuuccuggcugauuaaaagaaauuacucagcuauggucaucuguuccuguuagaaggcuaugcagcauauuauauacuaugcgcauguuaugaaaugcauaauaaaaaauuuuaaaaaaucuaaaagaucuaaaaaaaaaaaaaaaaaaaaaaaaaaaaaaaaaaaaaaaaaaaaaaaaaaaaaaaaaaaaaaaaugcaucccccccccccccccccccccccccccccccaaaggcucuuuucagagccaccagaauu

SEQ ID NO: 13803 - RNA, 1910 nt, Artificial Sequence
  mRNA product Design f-2 comprising derived and/or modified sequence from HRSV(Memphis-37)__AIY60640.1__F-del_DSCav1_mut0 (opt11)
gggagagcggcucggccauuuugucccagucaguccggaggcugcggcugcagaaguaccgccugcggaguaacugcaaagaagcuuaccauggaacuaccaauccucaaaaccaacgccaucacuacaauccuagccgcgguaacccugugcuucgccuccucacaaaacaucacagaagaauuuuaccaaucaaccugcuccgccguauccaaaggauaccugagcgcccugagaaccggcugguacaccuccgucaucaccauagaacucuccaacaucaaagaaaacaaaugcaacgguacggacgccaaaguuaaacucaucaaacaagaacuugacaaauacaagaacgccgucacagaacugcaacuccucaugcaauccacccccgccgccggcuccggcuccgccauagccuccggcaucgccgucugcaaagucuuacaccuagaaggcgaagucaacaaaaucaaaaacgcacuacuuuccacaaacaaagccgucgucucacucuccaacggcguauccguccucaccuucaaaguacuugaccucaaaaacuacaucgacaaacaacuacuccccauccugaacaaacaauccugcucaaucuccaacaucgaaaccguaaucgaguuccaacagaaaaauaaucgccuccuggagaucacccgcgaguucuccgucaaugcaggagucacaaccccaguaucaaccuacaugcucaccaacuccgaacuccugucgcucaucaacgacaugcccaucacaaacgaccaaaagaaacucauguccaacaacguacaaaucgucagacaacaauccuauucuauaaugugcaucaucaaagaagaaguccucgccuacgucguacaacucccccucuacggcguuaucgacacccccugcuggaaacuccacaccucaccccucugcaccaccaacacaaaagaaggcuccaacaucugccucacucggaccgaccgcggcugguacugcgacaaugccggcagcgucuccuucuucccacaagccgaaaccugcaaaguccaguccaaccgcguauucugcgacacuaugaacuccagaacccuccccuccgaaguaaaccucugcaacaucgacaucuucaacccaaaauacgacugcaaaaucaugaccucaaaaaccgacgucagcucgucagucauaaccagccucggagccauagucucaugcuacggaaaaaccaaaugcaccgccagcaacaaaaaccgcggcauaauaaaaacauucuccaacggcugcgacuauguauccaacaaaggagucgauaccgucuccguaggcaacacccuauacuacgucaacaaacaagaaggcaaaucccucuacgucaaaggugaaccaaucaucaacuucuacgacccucucgucuuccccuccgaugaguucgacgccucaaucagccaaguaaacgaaaagauaaaccaaucacucgccuucauccgcaaauccgacgaacuucuucacaacgucaacgucggcaaaucuaccaccaacauaaugauaaccaccaucaucaucgucaucaucguaauacuccuccuucucaucgccgucggccuauuccuauacugcaaagcccgcuagggacuaguggaagcauuuuccuggcugauuaaaagaaauuacucagcuauggucaucuguuccuguuagaaggcuaugcagcauauuauauacuaugcgcauguuaugaaaugcauaauaaaaaauuuuaaaaaaucuaaaagaucuaaaaaaaaaaaaaaaaaaaaaaaaaaaaaaaaaaaaaaaaaaaaaaaaaaaaaaaaaaaaaaaaugcaucccccccccccccccccccccccccccccccaaaggcucuuuucagagccaccagaauu

SEQ ID NO: 13804 - RNA, 1901 nt, Artificial Sequence
  mRNA product Design f-3 comprising derived and/or modified sequence from HRSV(Memphis-37)__AIY60640.1__F-del_DSCav1_mut0 (opt1)
gggagagucccgcagucggcguccagcggcucugcuuguucgugugugugucguugcaggccuuauucaagcuuaccauggagcugcccauccucaagaccaacgccaucaccacgauccuggccgcggugacccugugcuucgccagcucccagaacaucaccgaggaguucuaccagagcacgugcuccgccgucagcaagggcuaccucuccgcccugcgcaccgggugguacaccagcgugaucaccaucgagcuguccaacaucaaggagaacaagugcaacggcaccgacgccaaggugaagcucaucaagcaggagcuggacaaguacaagaacgcggucacggagcugcagcuccugaugcagagcaccccggccgccggcuccgggagcgcgaucgccuccggcaucgccgucugcaaggugcugcaccucgagggcgaggugaacaagaucaagaacgcccugcuguccaccaacaaggccgucgugagccucuccaacggggugagcguccugaccuucaaggugcuggaccucaagaacuacaucgacaagcagcugcugcccauccugaacaagcagagcugcuccaucagcaacaucgagaccgucaucgaguuccagcagaagaacaaccgccuccuggagaucacgcgggaguucagcgugaacgcgggcgugaccacccccgucuccaccuacaugcugacgaacagcgagcuccugucccugaucaacgacaugccgaucaccaacgaccagaagaagcucaugagcaacaacgugcagaucgugcgccagcaguccuacagcaucaugugcaucaucaaggaggagguccuggccuacguggugcagcugccccucuacggggucaucgacacccccugcuggaagcugcacaccagcccccugugcacgaccaacaccaaggagggcuccaacaucugccucacccggacggaccgcgggugguacugcgacaacgccggcagcguguccuucuucccgcaggccgagaccugcaagguccagagcaaccggguguucugcgacaccaugaacucccggacccugcccagcgaggugaaccucugcaacaucgacaucuucaaccccaaguacgacugcaagaucaugacguccaagaccgacgucagcuccagcgugaucaccucccugggcgccaucgugagcugcuacgggaagaccaagugcacggcgagcaacaagaaccgcggcaucaucaagaccuucuccaacgggugcgacuacgucagcaacaagggcguggacaccguguccgucggcaacacccuguacuacgugaacaagcaggagggcaagagccucuacgugaagggggagcccaucaucaacuucuacgacccgcuggucuuccccuccgacgaguucgacgccagcaucucccaggugaacgagaagaucaaccagagccuggccuucauccggaaguccgacgagcuccugcacaacgugaacgucggcaagagcaccacgaacaucaugaucaccaccaucaucaucgugaucaucgugauccugcugcuccugaucgccgucgggcuguuccucuacugcaaggcccgcugaggacuaguacuggcugcaucucccuuuccucuguccuccauccuucucccaggauggugaagggggaccugguacccagugauccccaccccaggauccuaaaucaugacuuaccugcuaauaaaaacucauuggaaaagugagaagaucuaaaaaaaaaaaaaaaaaaaaaaaaaaaaaaaaaaaaaaaaaaaaaaaaaaaaaaaaaaaaaaaaugcaucccccccccccccccccccccccccccccccaaaggcucuuuucagagccaccagaauu

SEQ ID NO: 13805 - RNA, 1901 nt, Artificial Sequence
  mRNA product Design f-3 comprising derived and/or modified sequence from HRSV(Memphis-37)__AIY60640.1__F-del_DSCav1_mut0 (opt1)
gggagagucccgcagucggcguccagcggcucugcuuguucgugugugugucguugcaggccuuauucaagcuuaccauggagcugcccauccucaagaccaacgccaucaccacgauccuggccgcggugacccugugcuucgccagcucccagaacaucaccgaggaguucuaccagagcacgugcuccgccgucagcaagggcuaccucuccgcccugcgcaccgggugguacaccagcgugaucaccaucgagcuguccaacaucaaggagaacaagugcaacggcaccgacgccaaggugaagcucaucaagcaggagcuggacaaguacaagaacgcggucacggagcugcagcuccugaugcagagcaccccggccgccggguccggcagcgccaucgcguccgggaucgccgugugcaaggugcugcaccucgagggcgaggucaacaagaucaagaacgcccugcugagcaccaacaaggccguggugucccucagcaacggcgucuccgugcugaccuucaaggugcuggaccucaagaacuacaucgacaagcagcugcugcccauccucaacaagcagagcugcuccaucagcaacaucgagacggucaucgaguuccagcagaagaacaaccggcugcuggagaucacccgcgaguucuccgugaacgccggggugaccacccccgucagcacguacaugcucaccaacagcgagcugcugucccucaucaacgacaugcccaucaccaacgaccagaagaagcugaugagcaacaacgugcagaucgugcggcagcaguccuacagcaucaugugcaucaucaaggaggagguccuggcguacguggugcagcucccgcuguacggcgucaucgacacccccugcuggaagcugcacacgagcccccucugcaccaccaacaccaaggagggguccaacaucugccugacgcgcaccgaccggggcugguacugcgacaacgccggguccgugagcuucuucccccaggccgagaccugcaaggugcaguccaaccgcgucuucugcgacaccaugaacagccggacgcucccguccgaggugaaccugugcaacaucgacaucuucaaccccaaguacgacugcaagaucaugaccagcaagaccgacgucuccagcuccgugaucaccagccugggcgccaucguguccugcuacggcaagacgaagugcaccgccagcaacaagaaccgggggaucaucaagaccuucuccaacggcugcgacuacgucagcaacaaggggguggacaccgugagcgucggcaacacgcucuacuacgugaacaagcaggagggcaagucccuguacgugaagggggagcccaucaucaacuucuacgacccccuggucuucccgagcgacgaguucgacgcguccaucagccaggugaacgagaagaucaaccagucccucgccuucauccgcaagagcgacgagcugcugcacaacgugaacgucggcaaguccaccaccaacaucaugaucaccaccaucaucaucgugaucaucgugauccuccugcugcucaucgccgucgggcuguuccuguacugcaaggcccggugaggacuaguacuggcugcaucucccuuuccucuguccuccauccuucucccaggauggugaagggggaccugguacccagugauccccaccccaggauccuaaaucaugacuuaccugcuaauaaaaacucauuggaaaagugagaagaucuaaaaaaaaaaaaaaaaaaaaaaaaaaaaaaaaaaaaaaaaaaaaaaaaaaaaaaaaaaaaaaaaugcaucccccccccccccccccccccccccccccccaaaggcucuuuucagagccaccagaauu

SEQ ID NO: 13806 - RNA, 1901 nt, Artificial Sequence
  mRNA product Design f-3 comprising derived and/or modified sequence from HRSV(Memphis-37)__AIY60640.1__F-del_DSCav1_mut0 (opt2)
gggagagucccgcagucggcguccagcggcucugcuuguucgugugugugucguugcaggccuuauucaagcuuaccauggagcuccccauccucaagaccaacgccaucaccaccauccucgccgccgucacccucugcuucgccuccucccagaacaucaccgaggaguucuaccaguccaccugcuccgccgucuccaagggcuaccucuccgcccuccgcaccggcugguacaccuccgucaucaccaucgagcucuccaacaucaaggagaacaagugcaacggcaccgacgccaaggucaagcucaucaagcaggagcucgacaaguacaagaacgccgucaccgagcuccagcuccucaugcaguccacccccgccgccggcuccggcuccgccaucgccuccggcaucgccgucugcaagguccuccaccucgagggcgaggucaacaagaucaagaacgcccuccucuccaccaacaaggccgucgucucccucuccaacggcgucuccguccucaccuucaagguccucgaccucaagaacuacaucgacaagcagcuccuccccauccucaacaagcaguccugcuccaucuccaacaucgagaccgucaucgaguuccagcagaagaacaaccgccuccucgagaucacccgcgaguucuccgucaacgccggcgucaccacccccgucuccaccuacaugcucaccaacuccgagcuccucucccucaucaacgacaugcccaucaccaacgaccagaagaagcucauguccaacaacguccagaucguccgccagcaguccuacuccaucaugugcaucaucaaggaggagguccucgccuacgucguccagcucccccucuacggcgucaucgacacccccugcuggaagcuccacaccuccccccucugcaccaccaacaccaaggagggcuccaacaucugccucacccgcaccgaccgcggcugguacugcgacaacgccggcuccgucuccuucuucccccaggccgagaccugcaagguccaguccaaccgcgucuucugcgacaccaugaacucccgcacccuccccuccgaggucaaccucugcaacaucgacaucuucaaccccaaguacgacugcaagaucaugaccuccaagaccgacgucuccuccuccgucaucaccucccucggcgccaucgucuccugcuacggcaagaccaagugcaccgccuccaacaagaaccgcggcaucaucaagaccuucuccaacggcugcgacuacgucuccaacaagggcgucgacaccgucuccgucggcaacacccucuacuacgucaacaagcaggagggcaagucccucuacgucaagggcgagcccaucaucaacuucuacgacccccucgucuuccccuccgacgaguucgacgccuccaucucccaggucaacgagaagaucaaccagucccucgccuucauccgcaaguccgacgagcuccuccacaacgucaacgucggcaaguccaccaccaacaucaugaucaccaccaucaucaucgucaucaucgucauccuccuccuccucaucgccgucggccucuuccucuacugcaaggcccgcugaggacuaguacuggcugcaucucccuuuccucuguccuccauccuucucccaggauggugaagggggaccugguacccagugauccccaccccaggauccuaaaucaugacuuaccugcuaauaaaaacucauuggaaaagugagaagaucuaaaaaaaaaaaaaaaaaaaaaaaaaaaaaaaaaaaaaaaaaaaaaaaaaaaaaaaaaaaaaaaaugcaucccccccccccccccccccccccccccccccaaaggcucuuuucagagccaccagaauu

SEQ ID NO: 13807 - RNA, 1901 nt, Artificial Sequence
  mRNA product Design f-3 comprising derived and/or modified sequence from HRSV(Memphis-37)__AIY60640.1__F-del_DSCav1_mut0 (opt3)
gggagagucccgcagucggcguccagcggcucugcuuguucgugugugugucguugcaggccuuauucaagcuuaccauggagcugcccauccucaagaccaacgccauuacaacuauacuugcugcagugacgcugugcuucgccagcucccagaauaucaccgaagaguuuuaccaaucuacauguucagcggucaguaaaggcuauuugagcgcuuuaagaacugggugguacaccuccguuauuacaaucgaacugucuaacauuaaggagaauaaaugcaacggaaccgacgccaaggugaaacuaaucaagcaggaacucgauaaguauaaaaaugcaguaacugagcugcagcuucugaugcagucgaccccugccgcugguucaggcagcgcaauagccagugggaucgcuguguguaaggucuugcaccucgagggagaagugaacaaaauuaagaaugcccugcuguccacaaacaaagcgguugugucucucagcaauggcgucuccguguuaacguucaagguacuggaccuuaagaacuacaucgauaaacaauugcugccaauucuaaauaagcagucaugcaguaucagcaacauagagacuguuauugaauuucagcagaaaaauaacaggcuccuggagaucacccgggaguucucugugaaugccggugucacaacuccgguguccaccuauaugcuuacaaacucagaacuguugagccucauuaacgacaugcccaucaccaaugaucaaaagaaacugaugaguaacaaugugcagaucguccgccagcagucuuacuccauuauguguauaaucaaggaggaaguuuuagcauaugugguacaacugccucucuacggggugauugacacgccaugcuggaaacuucauacuagcccccuguguacaaccaacacuaaggagggaucgaauaucugcuugacacgaaccgaucguggcugguacugugacaacgcuggcucugucuccuuuuucccucaggccgaaacgugcaaggugcagucaaauagaguguuuugugauaccaugaacaguagaacacugccaagcgaggugaaucucugcaacauagacauuuucaaucccaaauaugauugcaagaucaugacuuccaaaaccgacgucucuagcucagugaucacaagucugggggcaauuguauccuguuacggaaagacuaaaugcaccgcuagcaacaagaauagggguaucauuaagacauuuucuaacggcugugauuauguuucaaauaaagggguggacaccgucagugugggaaacacucuuuacuaugucaacaagcaagagggcaaaagccuguacgugaagggugaaccuauaaucaauuucuaugacccauugguuuuuccguccgaugaguucgacgccucuauuucgcagguuaacgagaaaaucaaucagagccucgcguuuauccggaaguccgaugaacuguuacacaacguaaaugucgggaagucaacgacaaacauuaugauaaccacuaucauuaucgugauuaucguuauacugcuacuccugaucgccgugggacuuuucuuguacugcaaagcacgcugaggacuaguacuggcugcaucucccuuuccucuguccuccauccuucucccaggauggugaagggggaccugguacccagugauccccaccccaggauccuaaaucaugacuuaccugcuaauaaaaacucauuggaaaagugagaagaucuaaaaaaaaaaaaaaaaaaaaaaaaaaaaaaaaaaaaaaaaaaaaaaaaaaaaaaaaaaaaaaaaugcaucccccccccccccccccccccccccccccccaaaggcucuuuucagagccaccagaauu

SEQ ID NO: 13808 - RNA, 1901 nt, Artificial Sequence
  mRNA product Design f-3 comprising derived and/or modified sequence from HRSV(Memphis-37)__AIY60640.1__F-del_DSCav1_mut0 (opt4)
gggagagucccgcagucggcguccagcggcucugcuuguucgugugugugucguugcaggccuuauucaagcuuaccauggagcugcccauccugaagaccaacgccaucaccaccauccuggccgccgugacccugugcuucgccagcagccagaacaucaccgaggaguucuaccagagcaccugcagcgccgugagcaagggcuaccugagcgcccugagaaccggcugguacaccagcgugaucaccaucgagcugagcaacaucaaggagaacaagugcaacggcaccgacgccaaggugaagcugaucaagcaggagcuggacaaguacaagaacgccgugaccgagcugcagcugcugaugcagagcacccccgccgccggcagcggcagcgccaucgccagcggcaucgccgugugcaaggugcugcaccuggagggcgaggugaacaagaucaagaacgcccugcugagcaccaacaaggccguggugagccugagcaacggcgugagcgugcugaccuucaaggugcuggaccugaagaacuacaucgacaagcagcugcugcccauccugaacaagcagagcugcagcaucagcaacaucgagaccgugaucgaguuccagcagaagaacaacagacugcuggagaucaccagagaguucagcgugaacgccggcgugaccacccccgugagcaccuacaugcugaccaacagcgagcugcugagccugaucaacgacaugcccaucaccaacgaccagaagaagcugaugagcaacaacgugcagaucgugagacagcagagcuacagcaucaugugcaucaucaaggaggaggugcuggccuacguggugcagcugccccuguacggcgugaucgacacccccugcuggaagcugcacaccagcccccugugcaccaccaacaccaaggagggcagcaacaucugccugaccagaaccgacagaggcugguacugcgacaacgccggcagcgugagcuucuucccccaggccgagaccugcaaggugcagagcaacagaguguucugcgacaccaugaacagcagaacccugcccagcgaggugaaccugugcaacaucgacaucuucaaccccaaguacgacugcaagaucaugaccagcaagaccgacgugagcagcagcgugaucaccagccugggcgccaucgugagcugcuacggcaagaccaagugcaccgccagcaacaagaacagaggcaucaucaagaccuucagcaacggcugcgacuacgugagcaacaagggcguggacaccgugagcgugggcaacacccuguacuacgugaacaagcaggagggcaagagccuguacgugaagggcgagcccaucaucaacuucuacgacccccugguguuccccagcgacgaguucgacgccagcaucagccaggugaacgagaagaucaaccagagccuggccuucaucagaaagagcgacgagcugcugcacaacgugaacgugggcaagagcaccaccaacaucaugaucaccaccaucaucaucgugaucaucgugauccugcugcugcugaucgccgugggccuguuccuguacugcaaggccagaugaggacuaguacuggcugcaucucccuuuccucuguccuccauccuucucccaggauggugaagggggaccugguacccagugauccccaccccaggauccuaaaucaugacuuaccugcuaauaaaaacucauuggaaaagugagaagaucuaaaaaaaaaaaaaaaaaaaaaaaaaaaaaaaaaaaaaaaaaaaaaaaaaaaaaaaaaaaaaaaaugcaucccccccccccccccccccccccccccccccaaaggcucuuuucagagccaccagaauu

SEQ ID NO: 13809 - RNA, 1901 nt, Artificial Sequence
  mRNA product Design f-3 comprising derived and/or modified sequence from HRSV(Memphis-37)__AIY60640.1__F-del_DSCav1_mut0 (opt5)
gggagagucccgcagucggcguccagcggcucugcuuguucgugugugugucguugcaggccuuauucaagcuuaccauggagcugcccauccucaagaccaacgccauuacaacgauccuggcugccgugacccuuugcuucgcgagcucccagaauauuacagaagaguuuuaccaaucuaccuguagcgcugucuccaaaggcuaucugucugcccucagaacagggugguacaccagcguuaucacaauugaacuguccaacaucaaggagaauaaaugcaacggaaccgacgccaaggugaaacuuaucaagcaggaacuggauaaguauaaaaaugcugugacggagcuccagcugcugaugcagucuaccccugccgcuggcagcggguccgccauugcgagcggaaucgccgucuguaaggugcuccaccuggagggcgaaguuaacaaaauuaagaaugcccuucugucuacaaacaaagcuguggucucccucagcaauggggugucuguucugaccuucaaggugcuugaccugaagaacuacaucgauaaacaacuccugccgauucugaauaagcaguccugcagcaucucuaacauugagacagucaucgaauuucagcagaaaaauaaccggcuccuggagaucacccgcgaguucuccgugaaugcuggagugacgacacccgucagcaccuauaugcuuacaaacuccgaacugcucucucugauuaacgacaugccuaucaccaaugaucaaaagaaacuuaugagcaacaauguucagauugugagacagcaguccuacagcaucauguguauuaucaaggaggaagugcuggccuaugucgugcaacucccccuguacggcguuaucgacaccccuugcuggaaacugcauacaucuccccucuguacgaccaacacaaaggagggcuccaauauuugccugacccggacagaucgcgggugguacugugacaacgcgggaagcgugagcuuuuucccucaggccgaaaccugcaagguccagucuaauagaguguuuugugauacgaugaacuccagaacacugccgucugagguuaaucucugcaacaucgacauuuucaaucccaaauaugauugcaagaucaugaccagcaaaaccgacguguccagcucugucauuacaucccugggcgcuaucgugagcuguuacgggaagaccaaaugcacagccucuaacaagaaucggggaaucauuaagacguuuuccaacggcugugauuaugucagcaauaaagggguggacaccguuuccgugggaaacacacuuuacuaugucaacaagcaagagggcaaaucucuguacgugaagggcgaaccuaucauuaauuucuaugacccccucguuuuuccuagcgaugaguucgacgcuuccaucucucaggugaacgaaaagauuaaucagagccuggccuuuauccgcaaguccgaugagcugcuccacaacgucaauguggggaaaagcaccacaaacauuaugaucaccacgaucauuaucgugauuaucguuauucugcuucugcucaucgccgucggacuguuccuguacugcaaagcuagaugaggacuaguacuggcugcaucucccuuuccucuguccuccauccuucucccaggauggugaagggggaccugguacccagugauccccaccccaggauccuaaaucaugacuuaccugcuaauaaaaacucauuggaaaagugagaagaucuaaaaaaaaaaaaaaaaaaaaaaaaaaaaaaaaaaaaaaaaaaaaaaaaaaaaaaaaaaaaaaaaugcaucccccccccccccccccccccccccccccccaaaggcucuuuucagagccaccagaauu

SEQ ID NO: 13810 - RNA, 1901 nt, Artificial Sequence
  mRNA product Design f-3 comprising derived and/or modified sequence from HRSV(Memphis-37)__AIY60640.1__F-del_DSCav1_mut0 (opt6)
gggagagucccgcagucggcguccagcggcucugcuuguucgugugugugucguugcaggccuuauucaagcuuaccauggaacucccaauacuuaaaacaaacgcaaucacaacaauacuagcugcagucacacuaugcuucgccucaucacaaaauauaacagaagaauuuuaucaaucaacaugcuccgcaguaucaaaaggauaucucucugcauuacgaacagguugguacaccucgguaauaacaauagaauuaucaaacauaaaagaaaauaaaugcaauggaaccgaugccaaaguaaaacuaaucaaacaagaacuugacaaauacaaaaacgcaguaacagaacuacaacuauuaaugcaaucaacaccagcagcagguucaggcuccgcaaucgcuucaggaauagccguuuguaaaguacuacacuuagaaggagaaguaaauaaaauaaaaaacgccuuacuaucaacaaacaaagcaguagucucccuuuccaacggaguaucagucuuaacuuuuaaaguacucgacuuaaaaaauuacaucgacaaacaacuacuacccauucuaaauaaacaaucaugcucaauaucaaacaucgaaacaguaaucgaauuucaacaaaaaaauaauagauuacuagaaauaacacgagaauuuuccguaaaugccggaguaacgaccccagucucaacauacauguuaacaaacucagaauuacuaucacucauuaacgauaugccaauaacaaaugaccaaaaaaaacuaaugucaaacaacguccaaauaguacgacaacaaucauacucuaucauguguauaauaaaagaagaaguuuuagcauacguaguacaacuaccacuuuacggagucauagacaccccaugcuggaaacuacacacaucacccuuauguacaacaaacaccaaagaagggucuaacauaugucucacuagaacagaucgaggcugguacugcgacaacgcaggaucaguuagcuuuuucccucaagccgaaaccuguaaaguacaauccaaucgaguauuuugcgacacuaugaacucuagaaccuuacccuccgaaguaaaccuauguaacauagacauauuuaaucccaaauaugauugcaaaaucaugacauccaaaacagauguaucaagcucuguaauaaccucacuaggagcaauaguuucaugcuaugguaaaacaaaaugcaccgccucaaacaaaaauagagggauaaucaaaaccuucucaaauggaugcgacuacguaucaaauaaaggaguagacaccgucuccguaggaaacacacuauacuacguaaacaaacaagaaggaaaaucacuauacguaaaaggagaaccaaucauaaacuucuacgacccacuuguuuucccaucagaugaauuugaugccuccauaucacaaguaaacgaaaaaauaaaccaaucucuagccuucaucagaaaauccgacgaacuuuuacacaacguaaacguagguaaaucaacaaccaacaucaugauaacaacaauaauaauaguaauaauuguaauacuuuuacuacuuaucgccguaggccuauucuuauauuguaaagcaagaugaggacuaguacuggcugcaucucccuuuccucuguccuccauccuucucccaggauggugaagggggaccugguacccagugauccccaccccaggauccuaaaucaugacuuaccugcuaauaaaaacucauuggaaaagugagaagaucuaaaaaaaaaaaaaaaaaaaaaaaaaaaaaaaaaaaaaaaaaaaaaaaaaaaaaaaaaaaaaaaaugcaucccccccccccccccccccccccccccccccaaaggcucuuuucagagccaccagaauu

SEQ ID NO: 13811 - RNA, 1901 nt, Artificial Sequence
  mRNA product Design f-3 comprising derived and/or modified sequence from HRSV(Memphis-37)__AIY60640.1__F-del_DSCav1_mut0 (opt11)
gggagagucccgcagucggcguccagcggcucugcuuguucgugugugugucguugcaggccuuauucaagcuuaccauggaacuaccaauccucaaaaccaacgccaucacuacaauccuagccgcgguaacccugugcuucgccuccucacaaaacaucacagaagaauuuuaccaaucaaccugcuccgccguauccaaaggauaccugagcgcccugagaaccggcugguacaccuccgucaucaccauagaacucuccaacaucaaagaaaacaaaugcaacgguacggacgccaaaguuaaacucaucaaacaagaacuugacaaauacaagaacgccgucacagaacugcaacuccucaugcaauccacccccgccgccggcuccggcuccgccauagccuccggcaucgccgucugcaaagucuuacaccuagaaggcgaagucaacaaaaucaaaaacgcacuacuuuccacaaacaaagccgucgucucacucuccaacggcguauccguccucaccuucaaaguacuugaccucaaaaacuacaucgacaaacaacuacuccccauccugaacaaacaauccugcucaaucuccaacaucgaaaccguaaucgaguuccaacagaaaaauaaucgccuccuggagaucacccgcgaguucuccgucaaugcaggagucacaaccccaguaucaaccuacaugcucaccaacuccgaacuccugucgcucaucaacgacaugcccaucacaaacgaccaaaagaaacucauguccaacaacguacaaaucgucagacaacaauccuauucuauaaugugcaucaucaaagaagaaguccucgccuacgucguacaacucccccucuacggcguuaucgacacccccugcuggaaacuccacaccucaccccucugcaccaccaacacaaaagaaggcuccaacaucugccucacucggaccgaccgcggcugguacugcgacaaugccggcagcgucuccuucuucccacaagccgaaaccugcaaaguccaguccaaccgcguauucugcgacacuaugaacuccagaacccuccccuccgaaguaaaccucugcaacaucgacaucuucaacccaaaauacgacugcaaaaucaugaccucaaaaaccgacgucagcucgucagucauaaccagccucggagccauagucucaugcuacggaaaaaccaaaugcaccgccagcaacaaaaaccgcggcauaauaaaaacauucuccaacggcugcgacuauguauccaacaaaggagucgauaccgucuccguaggcaacacccuauacuacgucaacaaacaagaaggcaaaucccucuacgucaaaggugaaccaaucaucaacuucuacgacccucucgucuuccccuccgaugaguucgacgccucaaucagccaaguaaacgaaaagauaaaccaaucacucgccuucauccgcaaauccgacgaacuucuucacaacgucaacgucggcaaaucuaccaccaacauaaugauaaccaccaucaucaucgucaucaucguaauacuccuccuucucaucgccgucggccuauuccuauacugcaaagcccgcuagggacuaguacuggcugcaucucccuuuccucuguccuccauccuucucccaggauggugaagggggaccugguacccagugauccccaccccaggauccuaaaucaugacuuaccugcuaauaaaaacucauuggaaaagugagaagaucuaaaaaaaaaaaaaaaaaaaaaaaaaaaaaaaaaaaaaaaaaaaaaaaaaaaaaaaaaaaaaaaaugcaucccccccccccccccccccccccccccccccaaaggcucuuuucagagccaccagaauu

SEQ ID NO: 13812 - RNA, 2117 nt, Artificial Sequence
  mRNA product Design f-4 comprising derived and/or modified sequence from HRSV(Memphis-37)__AIY60640.1__F-del_DSCav1_mut0 (opt1)
gggagagucccgcagucggcguccagcggcucugcuuguucgugugugugucguugcaggccuuauucaagcuuaccauggagcugcccauccucaagaccaacgccaucaccacgauccuggccgcggugacccugugcuucgccagcucccagaacaucaccgaggaguucuaccagagcacgugcuccgccgucagcaagggcuaccucuccgcccugcgcaccgggugguacaccagcgugaucaccaucgagcuguccaacaucaaggagaacaagugcaacggcaccgacgccaaggugaagcucaucaagcaggagcuggacaaguacaagaacgcggucacggagcugcagcuccugaugcagagcaccccggccgccggcuccgggagcgcgaucgccuccggcaucgccgucugcaaggugcugcaccucgagggcgaggugaacaagaucaagaacgcccugcuguccaccaacaaggccgucgugagccucuccaacggggugagcguccugaccuucaaggugcuggaccucaagaacuacaucgacaagcagcugcugcccauccugaacaagcagagcugcuccaucagcaacaucgagaccgucaucgaguuccagcagaagaacaaccgccuccuggagaucacgcgggaguucagcgugaacgcgggcgugaccacccccgucuccaccuacaugcugacgaacagcgagcuccugucccugaucaacgacaugccgaucaccaacgaccagaagaagcucaugagcaacaacgugcagaucgugcgccagcaguccuacagcaucaugugcaucaucaaggaggagguccuggccuacguggugcagcugccccucuacggggucaucgacacccccugcuggaagcugcacaccagcccccugugcacgaccaacaccaaggagggcuccaacaucugccucacccggacggaccgcgggugguacugcgacaacgccggcagcguguccuucuucccgcaggccgagaccugcaagguccagagcaaccggguguucugcgacaccaugaacucccggacccugcccagcgaggugaaccucugcaacaucgacaucuucaaccccaaguacgacugcaagaucaugacguccaagaccgacgucagcuccagcgugaucaccucccugggcgccaucgugagcugcuacgggaagaccaagugcacggcgagcaacaagaaccgcggcaucaucaagaccuucuccaacgggugcgacuacgucagcaacaagggcguggacaccguguccgucggcaacacccuguacuacgugaacaagcaggagggcaagagccucuacgugaagggggagcccaucaucaacuucuacgacccgcuggucuuccccuccgacgaguucgacgccagcaucucccaggugaacgagaagaucaaccagagccuggccuucauccggaaguccgacgagcuccugcacaacgugaacgucggcaagagcaccacgaacaucaugaucaccaccaucaucaucgugaucaucgugauccugcugcuccugaucgccgucgggcuguuccucuacugcaaggcccgcugaggacuagugaagggaacacccaaauuuaauucagccuuaagcacaauuaauuaagagugaaacguaauuguacaagcaguuggucacccaccauagggcaugaucaacaccgcaaccuuuccuuuuucccccagugauucugaaaaaccccucuucccuucagcuugcuuagauguuccaaauuuaguaagcuuaaggcggccuacagaagaaaaagaaaaaaaaggccacaaaaguucccucucacuuucaguaaauaaaauaaaagcagcaacagaaauaaagaaauaaaugaaauucaaaaugaaauaaauauuguguugugcagcauuaaaaaaucaauaaaaauuaaaaaugagcaagaucuaaaaaaaaaaaaaaaaaaaaaaaaaaaaaaaaaaaaaaaaaaaaaaaaaaaaaaaaaaaaaaaaugcaucccccccccccccccccccccccccccccccaaaggcucuuuucagagccaccagaauu

SEQ ID NO: 13813 - RNA, 2117 nt, Artificial Sequence
  mRNA product Design f-4 comprising derived and/or modified sequence from HRSV(Memphis-37)__AIY60640.1__F-del_DSCav1_mut0 (opt1)
gggagagucccgcagucggcguccagcggcucugcuuguucgugugugugucguugcaggccuuauucaagcuuaccauggagcugcccauccucaagaccaacgccaucaccacgauccuggccgcggugacccugugcuucgccagcucccagaacaucaccgaggaguucuaccagagcacgugcuccgccgucagcaagggcuaccucuccgcccugcgcaccgggugguacaccagcgugaucaccaucgagcuguccaacaucaaggagaacaagugcaacggcaccgacgccaaggugaagcucaucaagcaggagcuggacaaguacaagaacgcggucacggagcugcagcuccugaugcagagcaccccggccgccggguccggcagcgccaucgcguccgggaucgccgugugcaaggugcugcaccucgagggcgaggucaacaagaucaagaacgcccugcugagcaccaacaaggccguggugucccucagcaacggcgucuccgugcugaccuucaaggugcuggaccucaagaacuacaucgacaagcagcugcugcccauccucaacaagcagagcugcuccaucagcaacaucgagacggucaucgaguuccagcagaagaacaaccggcugcuggagaucacccgcgaguucuccgugaacgccggggugaccacccccgucagcacguacaugcucaccaacagcgagcugcugucccucaucaacgacaugcccaucaccaacgaccagaagaagcugaugagcaacaacgugcagaucgugcggcagcaguccuacagcaucaugugcaucaucaaggaggagguccuggcguacguggugcagcucccgcuguacggcgucaucgacacccccugcuggaagcugcacacgagcccccucugcaccaccaacaccaaggagggguccaacaucugccugacgcgcaccgaccggggcugguacugcgacaacgccggguccgugagcuucuucccccaggccgagaccugcaaggugcaguccaaccgcgucuucugcgacaccaugaacagccggacgcucccguccgaggugaaccugugcaacaucgacaucuucaaccccaaguacgacugcaagaucaugaccagcaagaccgacgucuccagcuccgugaucaccagccugggcgccaucguguccugcuacggcaagacgaagugcaccgccagcaacaagaaccgggggaucaucaagaccuucuccaacggcugcgacuacgucagcaacaaggggguggacaccgugagcgucggcaacacgcucuacuacgugaacaagcaggagggcaagucccuguacgugaagggggagcccaucaucaacuucuacgacccccuggucuucccgagcgacgaguucgacgcguccaucagccaggugaacgagaagaucaaccagucccucgccuucauccgcaagagcgacgagcugcugcacaacgugaacgucggcaaguccaccaccaacaucaugaucaccaccaucaucaucgugaucaucgugauccuccugcugcucaucgccgucgggcuguuccuguacugcaaggcccggugaggacuagugaagggaacacccaaauuuaauucagccuuaagcacaauuaauuaagagugaaacguaauuguacaagcaguuggucacccaccauagggcaugaucaacaccgcaaccuuuccuuuuucccccagugauucugaaaaaccccucuucccuucagcuugcuuagauguuccaaauuuaguaagcuuaaggcggccuacagaagaaaaagaaaaaaaaggccacaaaaguucccucucacuuucaguaaauaaaauaaaagcagcaacagaaauaaagaaauaaaugaaauucaaaaugaaauaaauauuguguugugcagcauuaaaaaaucaauaaaaauuaaaaaugagcaagaucuaaaaaaaaaaaaaaaaaaaaaaaaaaaaaaaaaaaaaaaaaaaaaaaaaaaaaaaaaaaaaaaaugcaucccccccccccccccccccccccccccccccaaaggcucuuuucagagccaccagaauu

SEQ ID NO: 13814 - RNA, 2117 nt, Artificial Sequence
  mRNA product Design f-4 comprising derived and/or modified sequence from HRSV(Memphis-37)__AIY60640.1__F-del_DSCav1_mut0 (opt2)
gggagagucccgcagucggcguccagcggcucugcuuguucgugugugugucguugcaggccuuauucaagcuuaccauggagcuccccauccucaagaccaacgccaucaccaccauccucgccgccgucacccucugcuucgccuccucccagaacaucaccgaggaguucuaccaguccaccugcuccgccgucuccaagggcuaccucuccgcccuccgcaccggcugguacaccuccgucaucaccaucgagcucuccaacaucaaggagaacaagugcaacggcaccgacgccaaggucaagcucaucaagcaggagcucgacaaguacaagaacgccgucaccgagcuccagcuccucaugcaguccacccccgccgccggcuccggcuccgccaucgccuccggcaucgccgucugcaagguccuccaccucgagggcgaggucaacaagaucaagaacgcccuccucuccaccaacaaggccgucgucucccucuccaacggcgucuccguccucaccuucaagguccucgaccucaagaacuacaucgacaagcagcuccuccccauccucaacaagcaguccugcuccaucuccaacaucgagaccgucaucgaguuccagcagaagaacaaccgccuccucgagaucacccgcgaguucuccgucaacgccggcgucaccacccccgucuccaccuacaugcucaccaacuccgagcuccucucccucaucaacgacaugcccaucaccaacgaccagaagaagcucauguccaacaacguccagaucguccgccagcaguccuacuccaucaugugcaucaucaaggaggagguccucgccuacgucguccagcucccccucuacggcgucaucgacacccccugcuggaagcuccacaccuccccccucugcaccaccaacaccaaggagggcuccaacaucugccucacccgcaccgaccgcggcugguacugcgacaacgccggcuccgucuccuucuucccccaggccgagaccugcaagguccaguccaaccgcgucuucugcgacaccaugaacucccgcacccuccccuccgaggucaaccucugcaacaucgacaucuucaaccccaaguacgacugcaagaucaugaccuccaagaccgacgucuccuccuccgucaucaccucccucggcgccaucgucuccugcuacggcaagaccaagugcaccgccuccaacaagaaccgcggcaucaucaagaccuucuccaacggcugcgacuacgucuccaacaagggcgucgacaccgucuccgucggcaacacccucuacuacgucaacaagcaggagggcaagucccucuacgucaagggcgagcccaucaucaacuucuacgacccccucgucuuccccuccgacgaguucgacgccuccaucucccaggucaacgagaagaucaaccagucccucgccuucauccgcaaguccgacgagcuccuccacaacgucaacgucggcaaguccaccaccaacaucaugaucaccaccaucaucaucgucaucaucgucauccuccuccuccucaucgccgucggccucuuccucuacugcaaggcccgcugaggacuagugaagggaacacccaaauuuaauucagccuuaagcacaauuaauuaagagugaaacguaauuguacaagcaguuggucacccaccauagggcaugaucaacaccgcaaccuuuccuuuuucccccagugauucugaaaaaccccucuucccuucagcuugcuuagauguuccaaauuuaguaagcuuaaggcggccuacagaagaaaaagaaaaaaaaggccacaaaaguucccucucacuuucaguaaauaaaauaaaagcagcaacagaaauaaagaaauaaaugaaauucaaaaugaaauaaauauuguguugugcagcauuaaaaaaucaauaaaaauuaaaaaugagcaagaucuaaaaaaaaaaaaaaaaaaaaaaaaaaaaaaaaaaaaaaaaaaaaaaaaaaaaaaaaaaaaaaaaugcaucccccccccccccccccccccccccccccccaaaggcucuuuucagagccaccagaauu

SEQ ID NO: 13815 - RNA, 2117 nt, Artificial Sequence
  mRNA product Design f-4 comprising derived and/or modified sequence from HRSV(Memphis-37)__AIY60640.1__F-del_DSCav1_mut0 (opt3)
gggagagucccgcagucggcguccagcggcucugcuuguucgugugugugucguugcaggccuuauucaagcuuaccauggagcugcccauccucaagaccaacgccauuacaacuauacuugcugcagugacgcugugcuucgccagcucccagaauaucaccgaagaguuuuaccaaucuacauguucagcggucaguaaaggcuauuugagcgcuuuaagaacugggugguacaccuccguuauuacaaucgaacugucuaacauuaaggagaauaaaugcaacggaaccgacgccaaggugaaacuaaucaagcaggaacucgauaaguauaaaaaugcaguaacugagcugcagcuucugaugcagucgaccccugccgcugguucaggcagcgcaauagccagugggaucgcuguguguaaggucuugcaccucgagggagaagugaacaaaauuaagaaugcccugcuguccacaaacaaagcgguugugucucucagcaauggcgucuccguguuaacguucaagguacuggaccuuaagaacuacaucgauaaacaauugcugccaauucuaaauaagcagucaugcaguaucagcaacauagagacuguuauugaauuucagcagaaaaauaacaggcuccuggagaucacccgggaguucucugugaaugccggugucacaacuccgguguccaccuauaugcuuacaaacucagaacuguugagccucauuaacgacaugcccaucaccaaugaucaaaagaaacugaugaguaacaaugugcagaucguccgccagcagucuuacuccauuauguguauaaucaaggaggaaguuuuagcauaugugguacaacugccucucuacggggugauugacacgccaugcuggaaacuucauacuagcccccuguguacaaccaacacuaaggagggaucgaauaucugcuugacacgaaccgaucguggcugguacugugacaacgcuggcucugucuccuuuuucccucaggccgaaacgugcaaggugcagucaaauagaguguuuugugauaccaugaacaguagaacacugccaagcgaggugaaucucugcaacauagacauuuucaaucccaaauaugauugcaagaucaugacuuccaaaaccgacgucucuagcucagugaucacaagucugggggcaauuguauccuguuacggaaagacuaaaugcaccgcuagcaacaagaauagggguaucauuaagacauuuucuaacggcugugauuauguuucaaauaaagggguggacaccgucagugugggaaacacucuuuacuaugucaacaagcaagagggcaaaagccuguacgugaagggugaaccuauaaucaauuucuaugacccauugguuuuuccguccgaugaguucgacgccucuauuucgcagguuaacgagaaaaucaaucagagccucgcguuuauccggaaguccgaugaacuguuacacaacguaaaugucgggaagucaacgacaaacauuaugauaaccacuaucauuaucgugauuaucguuauacugcuacuccugaucgccgugggacuuuucuuguacugcaaagcacgcugaggacuagugaagggaacacccaaauuuaauucagccuuaagcacaauuaauuaagagugaaacguaauuguacaagcaguuggucacccaccauagggcaugaucaacaccgcaaccuuuccuuuuucccccagugauucugaaaaaccccucuucccuucagcuugcuuagauguuccaaauuuaguaagcuuaaggcggccuacagaagaaaaagaaaaaaaaggccacaaaaguucccucucacuuucaguaaauaaaauaaaagcagcaacagaaauaaagaaauaaaugaaauucaaaaugaaauaaauauuguguugugcagcauuaaaaaaucaauaaaaauuaaaaaugagcaagaucuaaaaaaaaaaaaaaaaaaaaaaaaaaaaaaaaaaaaaaaaaaaaaaaaaaaaaaaaaaaaaaaaugcaucccccccccccccccccccccccccccccccaaaggcucuuuucagagccaccagaauu

SEQ ID NO: 13816 - RNA, 2117 nt, Artificial Sequence
  mRNA product Design f-4 comprising derived and/or modified sequence from HRSV(Memphis-37)__AIY60640.1__F-del_DSCav1_mut0 (opt4)
gggagagucccgcagucggcguccagcggcucugcuuguucgugugugugucguugcaggccuuauucaagcuuaccauggagcugcccauccugaagaccaacgccaucaccaccauccuggccgccgugacccugugcuucgccagcagccagaacaucaccgaggaguucuaccagagcaccugcagcgccgugagcaagggcuaccugagcgcccugagaaccggcugguacaccagcgugaucaccaucgagcugagcaacaucaaggagaacaagugcaacggcaccgacgccaaggugaagcugaucaagcaggagcuggacaaguacaagaacgccgugaccgagcugcagcugcugaugcagagcacccccgccgccggcagcggcagcgccaucgccagcggcaucgccgugugcaaggugcugcaccuggagggcgaggugaacaagaucaagaacgcccugcugagcaccaacaaggccguggugagccugagcaacggcgugagcgugcugaccuucaaggugcuggaccugaagaacuacaucgacaagcagcugcugcccauccugaacaagcagagcugcagcaucagcaacaucgagaccgugaucgaguuccagcagaagaacaacagacugcuggagaucaccagagaguucagcgugaacgccggcgugaccacccccgugagcaccuacaugcugaccaacagcgagcugcugagccugaucaacgacaugcccaucaccaacgaccagaagaagcugaugagcaacaacgugcagaucgugagacagcagagcuacagcaucaugugcaucaucaaggaggaggugcuggccuacguggugcagcugccccuguacggcgugaucgacacccccugcuggaagcugcacaccagcccccugugcaccaccaacaccaaggagggcagcaacaucugccugaccagaaccgacagaggcugguacugcgacaacgccggcagcgugagcuucuucccccaggccgagaccugcaaggugcagagcaacagaguguucugcgacaccaugaacagcagaacccugcccagcgaggugaaccugugcaacaucgacaucuucaaccccaaguacgacugcaagaucaugaccagcaagaccgacgugagcagcagcgugaucaccagccugggcgccaucgugagcugcuacggcaagaccaagugcaccgccagcaacaagaacagaggcaucaucaagaccuucagcaacggcugcgacuacgugagcaacaagggcguggacaccgugagcgugggcaacacccuguacuacgugaacaagcaggagggcaagagccuguacgugaagggcgagcccaucaucaacuucuacgacccccugguguuccccagcgacgaguucgacgccagcaucagccaggugaacgagaagaucaaccagagccuggccuucaucagaaagagcgacgagcugcugcacaacgugaacgugggcaagagcaccaccaacaucaugaucaccaccaucaucaucgugaucaucgugauccugcugcugcugaucgccgugggccuguuccuguacugcaaggccagaugaggacuagugaagggaacacccaaauuuaauucagccuuaagcacaauuaauuaagagugaaacguaauuguacaagcaguuggucacccaccauagggcaugaucaacaccgcaaccuuuccuuuuucccccagugauucugaaaaaccccucuucccuucagcuugcuuagauguuccaaauuuaguaagcuuaaggcggccuacagaagaaaaagaaaaaaaaggccacaaaaguucccucucacuuucaguaaauaaaauaaaagcagcaacagaaauaaagaaauaaaugaaauucaaaaugaaauaaauauuguguugugcagcauuaaaaaaucaauaaaaauuaaaaaugagcaagaucuaaaaaaaaaaaaaaaaaaaaaaaaaaaaaaaaaaaaaaaaaaaaaaaaaaaaaaaaaaaaaaaaugcaucccccccccccccccccccccccccccccccaaaggcucuuuucagagccaccagaauu

SEQ ID NO: 13817 - RNA, 2117 nt, Artificial Sequence
  mRNA product Design f-4 comprising derived and/or modified sequence from HRSV(Memphis-37)__AIY60640.1__F-del_DSCav1_mut0 (opt5)
gggagagucccgcagucggcguccagcggcucugcuuguucgugugugugucguugcaggccuuauucaagcuuaccauggagcugcccauccucaagaccaacgccauuacaacgauccuggcugccgugacccuuugcuucgcgagcucccagaauauuacagaagaguuuuaccaaucuaccuguagcgcugucuccaaaggcuaucugucugcccucagaacagggugguacaccagcguuaucacaauugaacuguccaacaucaaggagaauaaaugcaacggaaccgacgccaaggugaaacuuaucaagcaggaacuggauaaguauaaaaaugcugugacggagcuccagcugcugaugcagucuaccccugccgcuggcagcggguccgccauugcgagcggaaucgccgucuguaaggugcuccaccuggagggcgaaguuaacaaaauuaagaaugcccuucugucuacaaacaaagcuguggucucccucagcaauggggugucuguucugaccuucaaggugcuugaccugaagaacuacaucgauaaacaacuccugccgauucugaauaagcaguccugcagcaucucuaacauugagacagucaucgaauuucagcagaaaaauaaccggcuccuggagaucacccgcgaguucuccgugaaugcuggagugacgacacccgucagcaccuauaugcuuacaaacuccgaacugcucucucugauuaacgacaugccuaucaccaaugaucaaaagaaacuuaugagcaacaauguucagauugugagacagcaguccuacagcaucauguguauuaucaaggaggaagugcuggccuaugucgugcaacucccccuguacggcguuaucgacaccccuugcuggaaacugcauacaucuccccucuguacgaccaacacaaaggagggcuccaauauuugccugacccggacagaucgcgggugguacugugacaacgcgggaagcgugagcuuuuucccucaggccgaaaccugcaagguccagucuaauagaguguuuugugauacgaugaacuccagaacacugccgucugagguuaaucucugcaacaucgacauuuucaaucccaaauaugauugcaagaucaugaccagcaaaaccgacguguccagcucugucauuacaucccugggcgcuaucgugagcuguuacgggaagaccaaaugcacagccucuaacaagaaucggggaaucauuaagacguuuuccaacggcugugauuaugucagcaauaaagggguggacaccguuuccgugggaaacacacuuuacuaugucaacaagcaagagggcaaaucucuguacgugaagggcgaaccuaucauuaauuucuaugacccccucguuuuuccuagcgaugaguucgacgcuuccaucucucaggugaacgaaaagauuaaucagagccuggccuuuauccgcaaguccgaugagcugcuccacaacgucaauguggggaaaagcaccacaaacauuaugaucaccacgaucauuaucgugauuaucguuauucugcuucugcucaucgccgucggacuguuccuguacugcaaagcuagaugaggacuagugaagggaacacccaaauuuaauucagccuuaagcacaauuaauuaagagugaaacguaauuguacaagcaguuggucacccaccauagggcaugaucaacaccgcaaccuuuccuuuuucccccagugauucugaaaaaccccucuucccuucagcuugcuuagauguuccaaauuuaguaagcuuaaggcggccuacagaagaaaaagaaaaaaaaggccacaaaaguucccucucacuuucaguaaauaaaauaaaagcagcaacagaaauaaagaaauaaaugaaauucaaaaugaaauaaauauuguguugugcagcauuaaaaaaucaauaaaaauuaaaaaugagcaagaucuaaaaaaaaaaaaaaaaaaaaaaaaaaaaaaaaaaaaaaaaaaaaaaaaaaaaaaaaaaaaaaaaugcaucccccccccccccccccccccccccccccccaaaggcucuuuucagagccaccagaauu

SEQ ID NO: 13818 - RNA, 2117 nt, Artificial Sequence
  mRNA product Design f-4 comprising derived and/or modified sequence from HRSV(Memphis-37)__AIY60640.1__F-del_DSCav1_mut0 (opt6)
gggagagucccgcagucggcguccagcggcucugcuuguucgugugugugucguugcaggccuuauucaagcuuaccauggaacucccaauacuuaaaacaaacgcaaucacaacaauacuagcugcagucacacuaugcuucgccucaucacaaaauauaacagaagaauuuuaucaaucaacaugcuccgcaguaucaaaaggauaucucucugcauuacgaacagguugguacaccucgguaauaacaauagaauuaucaaacauaaaagaaaauaaaugcaauggaaccgaugccaaaguaaaacuaaucaaacaagaacuugacaaauacaaaaacgcaguaacagaacuacaacuauuaaugcaaucaacaccagcagcagguucaggcuccgcaaucgcuucaggaauagccguuuguaaaguacuacacuuagaaggagaaguaaauaaaauaaaaaacgccuuacuaucaacaaacaaagcaguagucucccuuuccaacggaguaucagucuuaacuuuuaaaguacucgacuuaaaaaauuacaucgacaaacaacuacuacccauucuaaauaaacaaucaugcucaauaucaaacaucgaaacaguaaucgaauuucaacaaaaaaauaauagauuacuagaaauaacacgagaauuuuccguaaaugccggaguaacgaccccagucucaacauacauguuaacaaacucagaauuacuaucacucauuaacgauaugccaauaacaaaugaccaaaaaaaacuaaugucaaacaacguccaaauaguacgacaacaaucauacucuaucauguguauaauaaaagaagaaguuuuagcauacguaguacaacuaccacuuuacggagucauagacaccccaugcuggaaacuacacacaucacccuuauguacaacaaacaccaaagaagggucuaacauaugucucacuagaacagaucgaggcugguacugcgacaacgcaggaucaguuagcuuuuucccucaagccgaaaccuguaaaguacaauccaaucgaguauuuugcgacacuaugaacucuagaaccuuacccuccgaaguaaaccuauguaacauagacauauuuaaucccaaauaugauugcaaaaucaugacauccaaaacagauguaucaagcucuguaauaaccucacuaggagcaauaguuucaugcuaugguaaaacaaaaugcaccgccucaaacaaaaauagagggauaaucaaaaccuucucaaauggaugcgacuacguaucaaauaaaggaguagacaccgucuccguaggaaacacacuauacuacguaaacaaacaagaaggaaaaucacuauacguaaaaggagaaccaaucauaaacuucuacgacccacuuguuuucccaucagaugaauuugaugccuccauaucacaaguaaacgaaaaaauaaaccaaucucuagccuucaucagaaaauccgacgaacuuuuacacaacguaaacguagguaaaucaacaaccaacaucaugauaacaacaauaauaauaguaauaauuguaauacuuuuacuacuuaucgccguaggccuauucuuauauuguaaagcaagaugaggacuagugaagggaacacccaaauuuaauucagccuuaagcacaauuaauuaagagugaaacguaauuguacaagcaguuggucacccaccauagggcaugaucaacaccgcaaccuuuccuuuuucccccagugauucugaaaaaccccucuucccuucagcuugcuuagauguuccaaauuuaguaagcuuaaggcggccuacagaagaaaaagaaaaaaaaggccacaaaaguucccucucacuuucaguaaauaaaauaaaagcagcaacagaaauaaagaaauaaaugaaauucaaaaugaaauaaauauuguguugugcagcauuaaaaaaucaauaaaaauuaaaaaugagcaagaucuaaaaaaaaaaaaaaaaaaaaaaaaaaaaaaaaaaaaaaaaaaaaaaaaaaaaaaaaaaaaaaaaugcaucccccccccccccccccccccccccccccccaaaggcucuuuucagagccaccagaauu

SEQ ID NO: 13819 - RNA, 2117 nt, Artificial Sequence
  mRNA product Design f-4 comprising derived and/or modified sequence from HRSV(Memphis-37)__AIY60640.1__F-del_DSCav1_mut0 (opt11)
gggagagucccgcagucggcguccagcggcucugcuuguucgugugugugucguugcaggccuuauucaagcuuaccauggaacuaccaauccucaaaaccaacgccaucacuacaauccuagccgcgguaacccugugcuucgccuccucacaaaacaucacagaagaauuuuaccaaucaaccugcuccgccguauccaaaggauaccugagcgcccugagaaccggcugguacaccuccgucaucaccauagaacucuccaacaucaaagaaaacaaaugcaacgguacggacgccaaaguuaaacucaucaaacaagaacuugacaaauacaagaacgccgucacagaacugcaacuccucaugcaauccacccccgccgccggcuccggcuccgccauagccuccggcaucgccgucugcaaagucuuacaccuagaaggcgaagucaacaaaaucaaaaacgcacuacuuuccacaaacaaagccgucgucucacucuccaacggcguauccguccucaccuucaaaguacuugaccucaaaaacuacaucgacaaacaacuacuccccauccugaacaaacaauccugcucaaucuccaacaucgaaaccguaaucgaguuccaacagaaaaauaaucgccuccuggagaucacccgcgaguucuccgucaaugcaggagucacaaccccaguaucaaccuacaugcucaccaacuccgaacuccugucgcucaucaacgacaugcccaucacaaacgaccaaaagaaacucauguccaacaacguacaaaucgucagacaacaauccuauucuauaaugugcaucaucaaagaagaaguccucgccuacgucguacaacucccccucuacggcguuaucgacacccccugcuggaaacuccacaccucaccccucugcaccaccaacacaaaagaaggcuccaacaucugccucacucggaccgaccgcggcugguacugcgacaaugccggcagcgucuccuucuucccacaagccgaaaccugcaaaguccaguccaaccgcguauucugcgacacuaugaacuccagaacccuccccuccgaaguaaaccucugcaacaucgacaucuucaacccaaaauacgacugcaaaaucaugaccucaaaaaccgacgucagcucgucagucauaaccagccucggagccauagucucaugcuacggaaaaaccaaaugcaccgccagcaacaaaaaccgcggcauaauaaaaacauucuccaacggcugcgacuauguauccaacaaaggagucgauaccgucuccguaggcaacacccuauacuacgucaacaaacaagaaggcaaaucccucuacgucaaaggugaaccaaucaucaacuucuacgacccucucgucuuccccuccgaugaguucgacgccucaaucagccaaguaaacgaaaagauaaaccaaucacucgccuucauccgcaaauccgacgaacuucuucacaacgucaacgucggcaaaucuaccaccaacauaaugauaaccaccaucaucaucgucaucaucguaauacuccuccuucucaucgccgucggccuauuccuauacugcaaagcccgcuagggacuagugaagggaacacccaaauuuaauucagccuuaagcacaauuaauuaagagugaaacguaauuguacaagcaguuggucacccaccauagggcaugaucaacaccgcaaccuuuccuuuuucccccagugauucugaaaaaccccucuucccuucagcuugcuuagauguuccaaauuuaguaagcuuaaggcggccuacagaagaaaaagaaaaaaaaggccacaaaaguucccucucacuuucaguaaauaaaauaaaagcagcaacagaaauaaagaaauaaaugaaauucaaaaugaaauaaauauuguguugugcagcauuaaaaaaucaauaaaaauuaaaaaugagcaagaucuaaaaaaaaaaaaaaaaaaaaaaaaaaaaaaaaaaaaaaaaaaaaaaaaaaaaaaaaaaaaaaaaugcaucccccccccccccccccccccccccccccccaaaggcucuuuucagagccaccagaauu

SEQ ID NO: 13820 - RNA, 1893 nt, Artificial Sequence
  mRNA product Design f-5 comprising derived and/or modified sequence from HRSV(Memphis-37)__AIY60640.1__F-del_DSCav1_mut0 (opt1)
gggagacuuucccauucuguagcagaauuugguguugccuguggucuuggucccgcggagaagcuuaccauggagcugcccauccucaagaccaacgccaucaccacgauccuggccgcggugacccugugcuucgccagcucccagaacaucaccgaggaguucuaccagagcacgugcuccgccgucagcaagggcuaccucuccgcccugcgcaccgggugguacaccagcgugaucaccaucgagcuguccaacaucaaggagaacaagugcaacggcaccgacgccaaggugaagcucaucaagcaggagcuggacaaguacaagaacgcggucacggagcugcagcuccugaugcagagcaccccggccgccggcuccgggagcgcgaucgccuccggcaucgccgucugcaaggugcugcaccucgagggcgaggugaacaagaucaagaacgcccugcuguccaccaacaaggccgucgugagccucuccaacggggugagcguccugaccuucaaggugcuggaccucaagaacuacaucgacaagcagcugcugcccauccugaacaagcagagcugcuccaucagcaacaucgagaccgucaucgaguuccagcagaagaacaaccgccuccuggagaucacgcgggaguucagcgugaacgcgggcgugaccacccccgucuccaccuacaugcugacgaacagcgagcuccugucccugaucaacgacaugccgaucaccaacgaccagaagaagcucaugagcaacaacgugcagaucgugcgccagcaguccuacagcaucaugugcaucaucaaggaggagguccuggccuacguggugcagcugccccucuacggggucaucgacacccccugcuggaagcugcacaccagcccccugugcacgaccaacaccaaggagggcuccaacaucugccucacccggacggaccgcgggugguacugcgacaacgccggcagcguguccuucuucccgcaggccgagaccugcaagguccagagcaaccggguguucugcgacaccaugaacucccggacccugcccagcgaggugaaccucugcaacaucgacaucuucaaccccaaguacgacugcaagaucaugacguccaagaccgacgucagcuccagcgugaucaccucccugggcgccaucgugagcugcuacgggaagaccaagugcacggcgagcaacaagaaccgcggcaucaucaagaccuucuccaacgggugcgacuacgucagcaacaagggcguggacaccguguccgucggcaacacccuguacuacgugaacaagcaggagggcaagagccucuacgugaagggggagcccaucaucaacuucuacgacccgcuggucuuccccuccgacgaguucgacgccagcaucucccaggugaacgagaagaucaaccagagccuggccuucauccggaaguccgacgagcuccugcacaacgugaacgucggcaagagcaccacgaacaucaugaucaccaccaucaucaucgugaucaucgugauccugcugcuccugaucgccgucgggcuguuccucuacugcaaggcccgcugaggacuaguacuggcugcaucucccuuuccucuguccuccauccuucucccaggauggugaagggggaccugguacccagugauccccaccccaggauccuaaaucaugacuuaccugcuaauaaaaacucauuggaaaagugagaagaucuaaaaaaaaaaaaaaaaaaaaaaaaaaaaaaaaaaaaaaaaaaaaaaaaaaaaaaaaaaaaaaaaugcaucccccccccccccccccccccccccccccccaaaggcucuuuucagagccaccagaauu

SEQ ID NO: 13821 - RNA, 1893 nt, Artificial Sequence
  mRNA product Design f-5 comprising derived and/or modified sequence from HRSV(Memphis-37)__AIY60640.1__F-del_DSCav1_mut0 (opt1)
gggagacuuucccauucuguagcagaauuugguguugccuguggucuuggucccgcggagaagcuuaccauggagcugcccauccucaagaccaacgccaucaccacgauccuggccgcggugacccugugcuucgccagcucccagaacaucaccgaggaguucuaccagagcacgugcuccgccgucagcaagggcuaccucuccgcccugcgcaccgggugguacaccagcgugaucaccaucgagcuguccaacaucaaggagaacaagugcaacggcaccgacgccaaggugaagcucaucaagcaggagcuggacaaguacaagaacgcggucacggagcugcagcuccugaugcagagcaccccggccgccggguccggcagcgccaucgcguccgggaucgccgugugcaaggugcugcaccucgagggcgaggucaacaagaucaagaacgcccugcugagcaccaacaaggccguggugucccucagcaacggcgucuccgugcugaccuucaaggugcuggaccucaagaacuacaucgacaagcagcugcugcccauccucaacaagcagagcugcuccaucagcaacaucgagacggucaucgaguuccagcagaagaacaaccggcugcuggagaucacccgcgaguucuccgugaacgccggggugaccacccccgucagcacguacaugcucaccaacagcgagcugcugucccucaucaacgacaugcccaucaccaacgaccagaagaagcugaugagcaacaacgugcagaucgugcggcagcaguccuacagcaucaugugcaucaucaaggaggagguccuggcguacguggugcagcucccgcuguacggcgucaucgacacccccugcuggaagcugcacacgagcccccucugcaccaccaacaccaaggagggguccaacaucugccugacgcgcaccgaccggggcugguacugcgacaacgccggguccgugagcuucuucccccaggccgagaccugcaaggugcaguccaaccgcgucuucugcgacaccaugaacagccggacgcucccguccgaggugaaccugugcaacaucgacaucuucaaccccaaguacgacugcaagaucaugaccagcaagaccgacgucuccagcuccgugaucaccagccugggcgccaucguguccugcuacggcaagacgaagugcaccgccagcaacaagaaccgggggaucaucaagaccuucuccaacggcugcgacuacgucagcaacaaggggguggacaccgugagcgucggcaacacgcucuacuacgugaacaagcaggagggcaagucccuguacgugaagggggagcccaucaucaacuucuacgacccccuggucuucccgagcgacgaguucgacgcguccaucagccaggugaacgagaagaucaaccagucccucgccuucauccgcaagagcgacgagcugcugcacaacgugaacgucggcaaguccaccaccaacaucaugaucaccaccaucaucaucgugaucaucgugauccuccugcugcucaucgccgucgggcuguuccuguacugcaaggcccggugaggacuaguacuggcugcaucucccuuuccucuguccuccauccuucucccaggauggugaagggggaccugguacccagugauccccaccccaggauccuaaaucaugacuuaccugcuaauaaaaacucauuggaaaagugagaagaucuaaaaaaaaaaaaaaaaaaaaaaaaaaaaaaaaaaaaaaaaaaaaaaaaaaaaaaaaaaaaaaaaugcaucccccccccccccccccccccccccccccccaaaggcucuuuucagagccaccagaauu

SEQ ID NO: 13822 - RNA, 1893 nt, Artificial Sequence
  mRNA product Design f-5 comprising derived and/or modified sequence from HRSV(Memphis-37)__AIY60640.1__F-del_DSCav1_mut0 (opt2)
gggagacuuucccauucuguagcagaauuugguguugccuguggucuuggucccgcggagaagcuuaccauggagcuccccauccucaagaccaacgccaucaccaccauccucgccgccgucacccucugcuucgccuccucccagaacaucaccgaggaguucuaccaguccaccugcuccgccgucuccaagggcuaccucuccgcccuccgcaccggcugguacaccuccgucaucaccaucgagcucuccaacaucaaggagaacaagugcaacggcaccgacgccaaggucaagcucaucaagcaggagcucgacaaguacaagaacgccgucaccgagcuccagcuccucaugcaguccacccccgccgccggcuccggcuccgccaucgccuccggcaucgccgucugcaagguccuccaccucgagggcgaggucaacaagaucaagaacgcccuccucuccaccaacaaggccgucgucucccucuccaacggcgucuccguccucaccuucaagguccucgaccucaagaacuacaucgacaagcagcuccuccccauccucaacaagcaguccugcuccaucuccaacaucgagaccgucaucgaguuccagcagaagaacaaccgccuccucgagaucacccgcgaguucuccgucaacgccggcgucaccacccccgucuccaccuacaugcucaccaacuccgagcuccucucccucaucaacgacaugcccaucaccaacgaccagaagaagcucauguccaacaacguccagaucguccgccagcaguccuacuccaucaugugcaucaucaaggaggagguccucgccuacgucguccagcucccccucuacggcgucaucgacacccccugcuggaagcuccacaccuccccccucugcaccaccaacaccaaggagggcuccaacaucugccucacccgcaccgaccgcggcugguacugcgacaacgccggcuccgucuccuucuucccccaggccgagaccugcaagguccaguccaaccgcgucuucugcgacaccaugaacucccgcacccuccccuccgaggucaaccucugcaacaucgacaucuucaaccccaaguacgacugcaagaucaugaccuccaagaccgacgucuccuccuccgucaucaccucccucggcgccaucgucuccugcuacggcaagaccaagugcaccgccuccaacaagaaccgcggcaucaucaagaccuucuccaacggcugcgacuacgucuccaacaagggcgucgacaccgucuccgucggcaacacccucuacuacgucaacaagcaggagggcaagucccucuacgucaagggcgagcccaucaucaacuucuacgacccccucgucuuccccuccgacgaguucgacgccuccaucucccaggucaacgagaagaucaaccagucccucgccuucauccgcaaguccgacgagcuccuccacaacgucaacgucggcaaguccaccaccaacaucaugaucaccaccaucaucaucgucaucaucgucauccuccuccuccucaucgccgucggccucuuccucuacugcaaggcccgcugaggacuaguacuggcugcaucucccuuuccucuguccuccauccuucucccaggauggugaagggggaccugguacccagugauccccaccccaggauccuaaaucaugacuuaccugcuaauaaaaacucauuggaaaagugagaagaucuaaaaaaaaaaaaaaaaaaaaaaaaaaaaaaaaaaaaaaaaaaaaaaaaaaaaaaaaaaaaaaaaugcaucccccccccccccccccccccccccccccccaaaggcucuuuucagagccaccagaauu

SEQ ID NO: 13823 - RNA, 1893 nt, Artificial Sequence
  mRNA product Design f-5 comprising derived and/or modified sequence from HRSV(Memphis-37)__AIY60640.1__F-del_DSCav1_mut0 (opt3)
gggagacuuucccauucuguagcagaauuugguguugccuguggucuuggucccgcggagaagcuuaccauggagcugcccauccucaagaccaacgccauuacaacuauacuugcugcagugacgcugugcuucgccagcucccagaauaucaccgaagaguuuuaccaaucuacauguucagcggucaguaaaggcuauuugagcgcuuuaagaacugggugguacaccuccguuauuacaaucgaacugucuaacauuaaggagaauaaaugcaacggaaccgacgccaaggugaaacuaaucaagcaggaacucgauaaguauaaaaaugcaguaacugagcugcagcuucugaugcagucgaccccugccgcugguucaggcagcgcaauagccagugggaucgcuguguguaaggucuugcaccucgagggagaagugaacaaaauuaagaaugcccugcuguccacaaacaaagcgguugugucucucagcaauggcgucuccguguuaacguucaagguacuggaccuuaagaacuacaucgauaaacaauugcugccaauucuaaauaagcagucaugcaguaucagcaacauagagacuguuauugaauuucagcagaaaaauaacaggcuccuggagaucacccgggaguucucugugaaugccggugucacaacuccgguguccaccuauaugcuuacaaacucagaacuguugagccucauuaacgacaugcccaucaccaaugaucaaaagaaacugaugaguaacaaugugcagaucguccgccagcagucuuacuccauuauguguauaaucaaggaggaaguuuuagcauaugugguacaacugccucucuacggggugauugacacgccaugcuggaaacuucauacuagcccccuguguacaaccaacacuaaggagggaucgaauaucugcuugacacgaaccgaucguggcugguacugugacaacgcuggcucugucuccuuuuucccucaggccgaaacgugcaaggugcagucaaauagaguguuuugugauaccaugaacaguagaacacugccaagcgaggugaaucucugcaacauagacauuuucaaucccaaauaugauugcaagaucaugacuuccaaaaccgacgucucuagcucagugaucacaagucugggggcaauuguauccuguuacggaaagacuaaaugcaccgcuagcaacaagaauagggguaucauuaagacauuuucuaacggcugugauuauguuucaaauaaagggguggacaccgucagugugggaaacacucuuuacuaugucaacaagcaagagggcaaaagccuguacgugaagggugaaccuauaaucaauuucuaugacccauugguuuuuccguccgaugaguucgacgccucuauuucgcagguuaacgagaaaaucaaucagagccucgcguuuauccggaaguccgaugaacuguuacacaacguaaaugucgggaagucaacgacaaacauuaugauaaccacuaucauuaucgugauuaucguuauacugcuacuccugaucgccgugggacuuuucuuguacugcaaagcacgcugaggacuaguacuggcugcaucucccuuuccucuguccuccauccuucucccaggauggugaagggggaccugguacccagugauccccaccccaggauccuaaaucaugacuuaccugcuaauaaaaacucauuggaaaagugagaagaucuaaaaaaaaaaaaaaaaaaaaaaaaaaaaaaaaaaaaaaaaaaaaaaaaaaaaaaaaaaaaaaaaugcaucccccccccccccccccccccccccccccccaaaggcucuuuucagagccaccagaauu

SEQ ID NO: 13824 - RNA, 1893 nt, Artificial Sequence
  mRNA product Design f-5 comprising derived and/or modified sequence from HRSV(Memphis-37)__AIY60640.1__F-del_DSCav1_mut0 (opt4)
gggagacuuucccauucuguagcagaauuugguguugccuguggucuuggucccgcggagaagcuuaccauggagcugcccauccugaagaccaacgccaucaccaccauccuggccgccgugacccugugcuucgccagcagccagaacaucaccgaggaguucuaccagagcaccugcagcgccgugagcaagggcuaccugagcgcccugagaaccggcugguacaccagcgugaucaccaucgagcugagcaacaucaaggagaacaagugcaacggcaccgacgccaaggugaagcugaucaagcaggagcuggacaaguacaagaacgccgugaccgagcugcagcugcugaugcagagcacccccgccgccggcagcggcagcgccaucgccagcggcaucgccgugugcaaggugcugcaccuggagggcgaggugaacaagaucaagaacgcccugcugagcaccaacaaggccguggugagccugagcaacggcgugagcgugcugaccuucaaggugcuggaccugaagaacuacaucgacaagcagcugcugcccauccugaacaagcagagcugcagcaucagcaacaucgagaccgugaucgaguuccagcagaagaacaacagacugcuggagaucaccagagaguucagcgugaacgccggcgugaccacccccgugagcaccuacaugcugaccaacagcgagcugcugagccugaucaacgacaugcccaucaccaacgaccagaagaagcugaugagcaacaacgugcagaucgugagacagcagagcuacagcaucaugugcaucaucaaggaggaggugcuggccuacguggugcagcugccccuguacggcgugaucgacacccccugcuggaagcugcacaccagcccccugugcaccaccaacaccaaggagggcagcaacaucugccugaccagaaccgacagaggcugguacugcgacaacgccggcagcgugagcuucuucccccaggccgagaccugcaaggugcagagcaacagaguguucugcgacaccaugaacagcagaacccugcccagcgaggugaaccugugcaacaucgacaucuucaaccccaaguacgacugcaagaucaugaccagcaagaccgacgugagcagcagcgugaucaccagccugggcgccaucgugagcugcuacggcaagaccaagugcaccgccagcaacaagaacagaggcaucaucaagaccuucagcaacggcugcgacuacgugagcaacaagggcguggacaccgugagcgugggcaacacccuguacuacgugaacaagcaggagggcaagagccuguacgugaagggcgagcccaucaucaacuucuacgacccccugguguuccccagcgacgaguucgacgccagcaucagccaggugaacgagaagaucaaccagagccuggccuucaucagaaagagcgacgagcugcugcacaacgugaacgugggcaagagcaccaccaacaucaugaucaccaccaucaucaucgugaucaucgugauccugcugcugcugaucgccgugggccuguuccuguacugcaaggccagaugaggacuaguacuggcugcaucucccuuuccucuguccuccauccuucucccaggauggugaagggggaccugguacccagugauccccaccccaggauccuaaaucaugacuuaccugcuaauaaaaacucauuggaaaagugagaagaucuaaaaaaaaaaaaaaaaaaaaaaaaaaaaaaaaaaaaaaaaaaaaaaaaaaaaaaaaaaaaaaaaugcaucccccccccccccccccccccccccccccccaaaggcucuuuucagagccaccagaauu

SEQ ID NO: 13825 - RNA, 1893 nt, Artificial Sequence
  mRNA product Design f-5 comprising derived and/or modified sequence from HRSV(Memphis-37)__AIY60640.1__F-del_DSCav1_mut0 (opt5)
gggagacuuucccauucuguagcagaauuugguguugccuguggucuuggucccgcggagaagcuuaccauggagcugcccauccucaagaccaacgccauuacaacgauccuggcugccgugacccuuugcuucgcgagcucccagaauauuacagaagaguuuuaccaaucuaccuguagcgcugucuccaaaggcuaucugucugcccucagaacagggugguacaccagcguuaucacaauugaacuguccaacaucaaggagaauaaaugcaacggaaccgacgccaaggugaaacuuaucaagcaggaacuggauaaguauaaaaaugcugugacggagcuccagcugcugaugcagucuaccccugccgcuggcagcggguccgccauugcgagcggaaucgccgucuguaaggugcuccaccuggagggcgaaguuaacaaaauuaagaaugcccuucugucuacaaacaaagcuguggucucccucagcaauggggugucuguucugaccuucaaggugcuugaccugaagaacuacaucgauaaacaacuccugccgauucugaauaagcaguccugcagcaucucuaacauugagacagucaucgaauuucagcagaaaaauaaccggcuccuggagaucacccgcgaguucuccgugaaugcuggagugacgacacccgucagcaccuauaugcuuacaaacuccgaacugcucucucugauuaacgacaugccuaucaccaaugaucaaaagaaacuuaugagcaacaauguucagauugugagacagcaguccuacagcaucauguguauuaucaaggaggaagugcuggccuaugucgugcaacucccccuguacggcguuaucgacaccccuugcuggaaacugcauacaucuccccucuguacgaccaacacaaaggagggcuccaauauuugccugacccggacagaucgcgggugguacugugacaacgcgggaagcgugagcuuuuucccucaggccgaaaccugcaagguccagucuaauagaguguuuugugauacgaugaacuccagaacacugccgucugagguuaaucucugcaacaucgacauuuucaaucccaaauaugauugcaagaucaugaccagcaaaaccgacguguccagcucugucauuacaucccugggcgcuaucgugagcuguuacgggaagaccaaaugcacagccucuaacaagaaucggggaaucauuaagacguuuuccaacggcugugauuaugucagcaauaaagggguggacaccguuuccgugggaaacacacuuuacuaugucaacaagcaagagggcaaaucucuguacgugaagggcgaaccuaucauuaauuucuaugacccccucguuuuuccuagcgaugaguucgacgcuuccaucucucaggugaacgaaaagauuaaucagagccuggccuuuauccgcaaguccgaugagcugcuccacaacgucaauguggggaaaagcaccacaaacauuaugaucaccacgaucauuaucgugauuaucguuauucugcuucugcucaucgccgucggacuguuccuguacugcaaagcuagaugaggacuaguacuggcugcaucucccuuuccucuguccuccauccuucucccaggauggugaagggggaccugguacccagugauccccaccccaggauccuaaaucaugacuuaccugcuaauaaaaacucauuggaaaagugagaagaucuaaaaaaaaaaaaaaaaaaaaaaaaaaaaaaaaaaaaaaaaaaaaaaaaaaaaaaaaaaaaaaaaugcaucccccccccccccccccccccccccccccccaaaggcucuuuucagagccaccagaauu

SEQ ID NO: 13826 - RNA, 1893 nt, Artificial Sequence
  mRNA product Design f-5 comprising derived and/or modified sequence from HRSV(Memphis-37)__AIY60640.1__F-del_DSCav1_mut0 (opt6)
gggagacuuucccauucuguagcagaauuugguguugccuguggucuuggucccgcggagaagcuuaccauggaacucccaauacuuaaaacaaacgcaaucacaacaauacuagcugcagucacacuaugcuucgccucaucacaaaauauaacagaagaauuuuaucaaucaacaugcuccgcaguaucaaaaggauaucucucugcauuacgaacagguugguacaccucgguaauaacaauagaauuaucaaacauaaaagaaaauaaaugcaauggaaccgaugccaaaguaaaacuaaucaaacaagaacuugacaaauacaaaaacgcaguaacagaacuacaacuauuaaugcaaucaacaccagcagcagguucaggcuccgcaaucgcuucaggaauagccguuuguaaaguacuacacuuagaaggagaaguaaauaaaauaaaaaacgccuuacuaucaacaaacaaagcaguagucucccuuuccaacggaguaucagucuuaacuuuuaaaguacucgacuuaaaaaauuacaucgacaaacaacuacuacccauucuaaauaaacaaucaugcucaauaucaaacaucgaaacaguaaucgaauuucaacaaaaaaauaauagauuacuagaaauaacacgagaauuuuccguaaaugccggaguaacgaccccagucucaacauacauguuaacaaacucagaauuacuaucacucauuaacgauaugccaauaacaaaugaccaaaaaaaacuaaugucaaacaacguccaaauaguacgacaacaaucauacucuaucauguguauaauaaaagaagaaguuuuagcauacguaguacaacuaccacuuuacggagucauagacaccccaugcuggaaacuacacacaucacccuuauguacaacaaacaccaaagaagggucuaacauaugucucacuagaacagaucgaggcugguacugcgacaacgcaggaucaguuagcuuuuucccucaagccgaaaccuguaaaguacaauccaaucgaguauuuugcgacacuaugaacucuagaaccuuacccuccgaaguaaaccuauguaacauagacauauuuaaucccaaauaugauugcaaaaucaugacauccaaaacagauguaucaagcucuguaauaaccucacuaggagcaauaguuucaugcuaugguaaaacaaaaugcaccgccucaaacaaaaauagagggauaaucaaaaccuucucaaauggaugcgacuacguaucaaauaaaggaguagacaccgucuccguaggaaacacacuauacuacguaaacaaacaagaaggaaaaucacuauacguaaaaggagaaccaaucauaaacuucuacgacccacuuguuuucccaucagaugaauuugaugccuccauaucacaaguaaacgaaaaaauaaaccaaucucuagccuucaucagaaaauccgacgaacuuuuacacaacguaaacguagguaaaucaacaaccaacaucaugauaacaacaauaauaauaguaauaauuguaauacuuuuacuacuuaucgccguaggccuauucuuauauuguaaagcaagaugaggacuaguacuggcugcaucucccuuuccucuguccuccauccuucucccaggauggugaagggggaccugguacccagugauccccaccccaggauccuaaaucaugacuuaccugcuaauaaaaacucauuggaaaagugagaagaucuaaaaaaaaaaaaaaaaaaaaaaaaaaaaaaaaaaaaaaaaaaaaaaaaaaaaaaaaaaaaaaaaugcaucccccccccccccccccccccccccccccccaaaggcucuuuucagagccaccagaauu

SEQ ID NO: 13827 - RNA, 1893 nt, Artificial Sequence
  mRNA product Design f-5 comprising derived and/or modified sequence from HRSV(Memphis-37)__AIY60640.1__F-del_DSCav1_mut0 (opt11)
gggagacuuucccauucuguagcagaauuugguguugccuguggucuuggucccgcggagaagcuuaccauggaacuaccaauccucaaaaccaacgccaucacuacaauccuagccgcgguaacccugugcuucgccuccucacaaaacaucacagaagaauuuuaccaaucaaccugcuccgccguauccaaaggauaccugagcgcccugagaaccggcugguacaccuccgucaucaccauagaacucuccaacaucaaagaaaacaaaugcaacgguacggacgccaaaguuaaacucaucaaacaagaacuugacaaauacaagaacgccgucacagaacugcaacuccucaugcaauccacccccgccgccggcuccggcuccgccauagccuccggcaucgccgucugcaaagucuuacaccuagaaggcgaagucaacaaaaucaaaaacgcacuacuuuccacaaacaaagccgucgucucacucuccaacggcguauccguccucaccuucaaaguacuugaccucaaaaacuacaucgacaaacaacuacuccccauccugaacaaacaauccugcucaaucuccaacaucgaaaccguaaucgaguuccaacagaaaaauaaucgccuccuggagaucacccgcgaguucuccgucaaugcaggagucacaaccccaguaucaaccuacaugcucaccaacuccgaacuccugucgcucaucaacgacaugcccaucacaaacgaccaaaagaaacucauguccaacaacguacaaaucgucagacaacaauccuauucuauaaugugcaucaucaaagaagaaguccucgccuacgucguacaacucccccucuacggcguuaucgacacccccugcuggaaacuccacaccucaccccucugcaccaccaacacaaaagaaggcuccaacaucugccucacucggaccgaccgcggcugguacugcgacaaugccggcagcgucuccuucuucccacaagccgaaaccugcaaaguccaguccaaccgcguauucugcgacacuaugaacuccagaacccuccccuccgaaguaaaccucugcaacaucgacaucuucaacccaaaauacgacugcaaaaucaugaccucaaaaaccgacgucagcucgucagucauaaccagccucggagccauagucucaugcuacggaaaaaccaaaugcaccgccagcaacaaaaaccgcggcauaauaaaaacauucuccaacggcugcgacuauguauccaacaaaggagucgauaccgucuccguaggcaacacccuauacuacgucaacaaacaagaaggcaaaucccucuacgucaaaggugaaccaaucaucaacuucuacgacccucucgucuuccccuccgaugaguucgacgccucaaucagccaaguaaacgaaaagauaaaccaaucacucgccuucauccgcaaauccgacgaacuucuucacaacgucaacgucggcaaaucuaccaccaacauaaugauaaccaccaucaucaucgucaucaucguaauacuccuccuucucaucgccgucggccuauuccuauacugcaaagcccgcuagggacuaguacuggcugcaucucccuuuccucuguccuccauccuucucccaggauggugaagggggaccugguacccagugauccccaccccaggauccuaaaucaugacuuaccugcuaauaaaaacucauuggaaaagugagaagaucuaaaaaaaaaaaaaaaaaaaaaaaaaaaaaaaaaaaaaaaaaaaaaaaaaaaaaaaaaaaaaaaaugcaucccccccccccccccccccccccccccccccaaaggcucuuuucagagccaccagaauu

SEQ ID NO: 13828 - RNA, 1889 nt, Artificial Sequence
  mRNA product Design g-1 comprising derived and/or modified sequence from HRSV(Memphis-37)__AIY60640.1__F-del_DSCav1_mut0 (opt1)
gggagacuuucccauucuguagcagaauuugguguugccuguggucuuggucccgcggagaagcuuaccauggagcugcccauccucaagaccaacgccaucaccacgauccuggccgcggugacccugugcuucgccagcucccagaacaucaccgaggaguucuaccagagcacgugcuccgccgucagcaagggcuaccucuccgcccugcgcaccgggugguacaccagcgugaucaccaucgagcuguccaacaucaaggagaacaagugcaacggcaccgacgccaaggugaagcucaucaagcaggagcuggacaaguacaagaacgcggucacggagcugcagcuccugaugcagagcaccccggccgccggcuccgggagcgcgaucgccuccggcaucgccgucugcaaggugcugcaccucgagggcgaggugaacaagaucaagaacgcccugcuguccaccaacaaggccgucgugagccucuccaacggggugagcguccugaccuucaaggugcuggaccucaagaacuacaucgacaagcagcugcugcccauccugaacaagcagagcugcuccaucagcaacaucgagaccgucaucgaguuccagcagaagaacaaccgccuccuggagaucacgcgggaguucagcgugaacgcgggcgugaccacccccgucuccaccuacaugcugacgaacagcgagcuccugucccugaucaacgacaugccgaucaccaacgaccagaagaagcucaugagcaacaacgugcagaucgugcgccagcaguccuacagcaucaugugcaucaucaaggaggagguccuggccuacguggugcagcugccccucuacggggucaucgacacccccugcuggaagcugcacaccagcccccugugcacgaccaacaccaaggagggcuccaacaucugccucacccggacggaccgcgggugguacugcgacaacgccggcagcguguccuucuucccgcaggccgagaccugcaagguccagagcaaccggguguucugcgacaccaugaacucccggacccugcccagcgaggugaaccucugcaacaucgacaucuucaaccccaaguacgacugcaagaucaugacguccaagaccgacgucagcuccagcgugaucaccucccugggcgccaucgugagcugcuacgggaagaccaagugcacggcgagcaacaagaaccgcggcaucaucaagaccuucuccaacgggugcgacuacgucagcaacaagggcguggacaccguguccgucggcaacacccuguacuacgugaacaagcaggagggcaagagccucuacgugaagggggagcccaucaucaacuucuacgacccgcuggucuuccccuccgacgaguucgacgccagcaucucccaggugaacgagaagaucaaccagagccuggccuucauccggaaguccgacgagcuccugcacaacgugaacgucggcaagagcaccacgaacaucaugaucaccaccaucaucaucgugaucaucgugauccugcugcuccugaucgccgucgggcuguuccucuacugcaaggcccgcugaggacuaguggaagcauuuuccuggcugauuaaaagaaauuacucagcuauggucaucuguuccuguuagaaggcuaugcagcauauuauauacuaugcgcauguuaugaaaugcauaauaaaaaauuuuaaaaaaucuaaaagaucuaaaaaaaaaaaaaaaaaaaaaaaaaaaaaaaaaaaaaaaaaaaaaaaaaaaaaaaaaaaaaaaaugcaucccccccccccccccccccccccccccccccaaaggcucuuuucagagccaccagaauu

SEQ ID NO: 13829 - RNA, 1889 nt, Artificial Sequence
  mRNA product Design g-1 comprising derived and/or modified sequence from HRSV(Memphis-37)__AIY60640.1__F-del_DSCav1_mut0 (opt1)
gggagacuuucccauucuguagcagaauuugguguugccuguggucuuggucccgcggagaagcuuaccauggagcugcccauccucaagaccaacgccaucaccacgauccuggccgcggugacccugugcuucgccagcucccagaacaucaccgaggaguucuaccagagcacgugcuccgccgucagcaagggcuaccucuccgcccugcgcaccgggugguacaccagcgugaucaccaucgagcuguccaacaucaaggagaacaagugcaacggcaccgacgccaaggugaagcucaucaagcaggagcuggacaaguacaagaacgcggucacggagcugcagcuccugaugcagagcaccccggccgccggguccggcagcgccaucgcguccgggaucgccgugugcaaggugcugcaccucgagggcgaggucaacaagaucaagaacgcccugcugagcaccaacaaggccguggugucccucagcaacggcgucuccgugcugaccuucaaggugcuggaccucaagaacuacaucgacaagcagcugcugcccauccucaacaagcagagcugcuccaucagcaacaucgagacggucaucgaguuccagcagaagaacaaccggcugcuggagaucacccgcgaguucuccgugaacgccggggugaccacccccgucagcacguacaugcucaccaacagcgagcugcugucccucaucaacgacaugcccaucaccaacgaccagaagaagcugaugagcaacaacgugcagaucgugcggcagcaguccuacagcaucaugugcaucaucaaggaggagguccuggcguacguggugcagcucccgcuguacggcgucaucgacacccccugcuggaagcugcacacgagcccccucugcaccaccaacaccaaggagggguccaacaucugccugacgcgcaccgaccggggcugguacugcgacaacgccggguccgugagcuucuucccccaggccgagaccugcaaggugcaguccaaccgcgucuucugcgacaccaugaacagccggacgcucccguccgaggugaaccugugcaacaucgacaucuucaaccccaaguacgacugcaagaucaugaccagcaagaccgacgucuccagcuccgugaucaccagccugggcgccaucguguccugcuacggcaagacgaagugcaccgccagcaacaagaaccgggggaucaucaagaccuucuccaacggcugcgacuacgucagcaacaaggggguggacaccgugagcgucggcaacacgcucuacuacgugaacaagcaggagggcaagucccuguacgugaagggggagcccaucaucaacuucuacgacccccuggucuucccgagcgacgaguucgacgcguccaucagccaggugaacgagaagaucaaccagucccucgccuucauccgcaagagcgacgagcugcugcacaacgugaacgucggcaaguccaccaccaacaucaugaucaccaccaucaucaucgugaucaucgugauccuccugcugcucaucgccgucgggcuguuccuguacugcaaggcccggugaggacuaguggaagcauuuuccuggcugauuaaaagaaauuacucagcuauggucaucuguuccuguuagaaggcuaugcagcauauuauauacuaugcgcauguuaugaaaugcauaauaaaaaauuuuaaaaaaucuaaaagaucuaaaaaaaaaaaaaaaaaaaaaaaaaaaaaaaaaaaaaaaaaaaaaaaaaaaaaaaaaaaaaaaaugcaucccccccccccccccccccccccccccccccaaaggcucuuuucagagccaccagaauu

SEQ ID NO: 13830 - RNA, 1889 nt, Artificial Sequence
  mRNA product Design g-1 comprising derived and/or modified sequence from HRSV(Memphis-37)__AIY60640.1__F-del_DSCav1_mut0 (opt2)
gggagacuuucccauucuguagcagaauuugguguugccuguggucuuggucccgcggagaagcuuaccauggagcuccccauccucaagaccaacgccaucaccaccauccucgccgccgucacccucugcuucgccuccucccagaacaucaccgaggaguucuaccaguccaccugcuccgccgucuccaagggcuaccucuccgcccuccgcaccggcugguacaccuccgucaucaccaucgagcucuccaacaucaaggagaacaagugcaacggcaccgacgccaaggucaagcucaucaagcaggagcucgacaaguacaagaacgccgucaccgagcuccagcuccucaugcaguccacccccgccgccggcuccggcuccgccaucgccuccggcaucgccgucugcaagguccuccaccucgagggcgaggucaacaagaucaagaacgcccuccucuccaccaacaaggccgucgucucccucuccaacggcgucuccguccucaccuucaagguccucgaccucaagaacuacaucgacaagcagcuccuccccauccucaacaagcaguccugcuccaucuccaacaucgagaccgucaucgaguuccagcagaagaacaaccgccuccucgagaucacccgcgaguucuccgucaacgccggcgucaccacccccgucuccaccuacaugcucaccaacuccgagcuccucucccucaucaacgacaugcccaucaccaacgaccagaagaagcucauguccaacaacguccagaucguccgccagcaguccuacuccaucaugugcaucaucaaggaggagguccucgccuacgucguccagcucccccucuacggcgucaucgacacccccugcuggaagcuccacaccuccccccucugcaccaccaacaccaaggagggcuccaacaucugccucacccgcaccgaccgcggcugguacugcgacaacgccggcuccgucuccuucuucccccaggccgagaccugcaagguccaguccaaccgcgucuucugcgacaccaugaacucccgcacccuccccuccgaggucaaccucugcaacaucgacaucuucaaccccaaguacgacugcaagaucaugaccuccaagaccgacgucuccuccuccgucaucaccucccucggcgccaucgucuccugcuacggcaagaccaagugcaccgccuccaacaagaaccgcggcaucaucaagaccuucuccaacggcugcgacuacgucuccaacaagggcgucgacaccgucuccgucggcaacacccucuacuacgucaacaagcaggagggcaagucccucuacgucaagggcgagcccaucaucaacuucuacgacccccucgucuuccccuccgacgaguucgacgccuccaucucccaggucaacgagaagaucaaccagucccucgccuucauccgcaaguccgacgagcuccuccacaacgucaacgucggcaaguccaccaccaacaucaugaucaccaccaucaucaucgucaucaucgucauccuccuccuccucaucgccgucggccucuuccucuacugcaaggcccgcugaggacuaguggaagcauuuuccuggcugauuaaaagaaauuacucagcuauggucaucuguuccuguuagaaggcuaugcagcauauuauauacuaugcgcauguuaugaaaugcauaauaaaaaauuuuaaaaaaucuaaaagaucuaaaaaaaaaaaaaaaaaaaaaaaaaaaaaaaaaaaaaaaaaaaaaaaaaaaaaaaaaaaaaaaaugcaucccccccccccccccccccccccccccccccaaaggcucuuuucagagccaccagaauu

SEQ ID NO: 13831 - RNA, 1889 nt, Artificial Sequence
  mRNA product Design g-1 comprising derived and/or modified sequence from HRSV(Memphis-37)__AIY60640.1__F-del_DSCav1_mut0 (opt3)
gggagacuuucccauucuguagcagaauuugguguugccuguggucuuggucccgcggagaagcuuaccauggagcugcccauccucaagaccaacgccauuacaacuauacuugcugcagugacgcugugcuucgccagcucccagaauaucaccgaagaguuuuaccaaucuacauguucagcggucaguaaaggcuauuugagcgcuuuaagaacugggugguacaccuccguuauuacaaucgaacugucuaacauuaaggagaauaaaugcaacggaaccgacgccaaggugaaacuaaucaagcaggaacucgauaaguauaaaaaugcaguaacugagcugcagcuucugaugcagucgaccccugccgcugguucaggcagcgcaauagccagugggaucgcuguguguaaggucuugcaccucgagggagaagugaacaaaauuaagaaugcccugcuguccacaaacaaagcgguugugucucucagcaauggcgucuccguguuaacguucaagguacuggaccuuaagaacuacaucgauaaacaauugcugccaauucuaaauaagcagucaugcaguaucagcaacauagagacuguuauugaauuucagcagaaaaauaacaggcuccuggagaucacccgggaguucucugugaaugccggugucacaacuccgguguccaccuauaugcuuacaaacucagaacuguugagccucauuaacgacaugcccaucaccaaugaucaaaagaaacugaugaguaacaaugugcagaucguccgccagcagucuuacuccauuauguguauaaucaaggaggaaguuuuagcauaugugguacaacugccucucuacggggugauugacacgccaugcuggaaacuucauacuagcccccuguguacaaccaacacuaaggagggaucgaauaucugcuugacacgaaccgaucguggcugguacugugacaacgcuggcucugucuccuuuuucccucaggccgaaacgugcaaggugcagucaaauagaguguuuugugauaccaugaacaguagaacacugccaagcgaggugaaucucugcaacauagacauuuucaaucccaaauaugauugcaagaucaugacuuccaaaaccgacgucucuagcucagugaucacaagucugggggcaauuguauccuguuacggaaagacuaaaugcaccgcuagcaacaagaauagggguaucauuaagacauuuucuaacggcugugauuauguuucaaauaaagggguggacaccgucagugugggaaacacucuuuacuaugucaacaagcaagagggcaaaagccuguacgugaagggugaaccuauaaucaauuucuaugacccauugguuuuuccguccgaugaguucgacgccucuauuucgcagguuaacgagaaaaucaaucagagccucgcguuuauccggaaguccgaugaacuguuacacaacguaaaugucgggaagucaacgacaaacauuaugauaaccacuaucauuaucgugauuaucguuauacugcuacuccugaucgccgugggacuuuucuuguacugcaaagcacgcugaggacuaguggaagcauuuuccuggcugauuaaaagaaauuacucagcuauggucaucuguuccuguuagaaggcuaugcagcauauuauauacuaugcgcauguuaugaaaugcauaauaaaaaauuuuaaaaaaucuaaaagaucuaaaaaaaaaaaaaaaaaaaaaaaaaaaaaaaaaaaaaaaaaaaaaaaaaaaaaaaaaaaaaaaaugcaucccccccccccccccccccccccccccccccaaaggcucuuuucagagccaccagaauu

SEQ ID NO: 13832 - RNA, 1889 nt, Artificial Sequence
  mRNA product Design g-1 comprising derived and/or modified sequence from HRSV(Memphis-37)__AIY60640.1__F-del_DSCav1_mut0 (opt4)
gggagacuuucccauucuguagcagaauuugguguugccuguggucuuggucccgcggagaagcuuaccauggagcugcccauccugaagaccaacgccaucaccaccauccuggccgccgugacccugugcuucgccagcagccagaacaucaccgaggaguucuaccagagcaccugcagcgccgugagcaagggcuaccugagcgcccugagaaccggcugguacaccagcgugaucaccaucgagcugagcaacaucaaggagaacaagugcaacggcaccgacgccaaggugaagcugaucaagcaggagcuggacaaguacaagaacgccgugaccgagcugcagcugcugaugcagagcacccccgccgccggcagcggcagcgccaucgccagcggcaucgccgugugcaaggugcugcaccuggagggcgaggugaacaagaucaagaacgcccugcugagcaccaacaaggccguggugagccugagcaacggcgugagcgugcugaccuucaaggugcuggaccugaagaacuacaucgacaagcagcugcugcccauccugaacaagcagagcugcagcaucagcaacaucgagaccgugaucgaguuccagcagaagaacaacagacugcuggagaucaccagagaguucagcgugaacgccggcgugaccacccccgugagcaccuacaugcugaccaacagcgagcugcugagccugaucaacgacaugcccaucaccaacgaccagaagaagcugaugagcaacaacgugcagaucgugagacagcagagcuacagcaucaugugcaucaucaaggaggaggugcuggccuacguggugcagcugccccuguacggcgugaucgacacccccugcuggaagcugcacaccagcccccugugcaccaccaacaccaaggagggcagcaacaucugccugaccagaaccgacagaggcugguacugcgacaacgccggcagcgugagcuucuucccccaggccgagaccugcaaggugcagagcaacagaguguucugcgacaccaugaacagcagaacccugcccagcgaggugaaccugugcaacaucgacaucuucaaccccaaguacgacugcaagaucaugaccagcaagaccgacgugagcagcagcgugaucaccagccugggcgccaucgugagcugcuacggcaagaccaagugcaccgccagcaacaagaacagaggcaucaucaagaccuucagcaacggcugcgacuacgugagcaacaagggcguggacaccgugagcgugggcaacacccuguacuacgugaacaagcaggagggcaagagccuguacgugaagggcgagcccaucaucaacuucuacgacccccugguguuccccagcgacgaguucgacgccagcaucagccaggugaacgagaagaucaaccagagccuggccuucaucagaaagagcgacgagcugcugcacaacgugaacgugggcaagagcaccaccaacaucaugaucaccaccaucaucaucgugaucaucgugauccugcugcugcugaucgccgugggccuguuccuguacugcaaggccagaugaggacuaguggaagcauuuuccuggcugauuaaaagaaauuacucagcuauggucaucuguuccuguuagaaggcuaugcagcauauuauauacuaugcgcauguuaugaaaugcauaauaaaaaauuuuaaaaaaucuaaaagaucuaaaaaaaaaaaaaaaaaaaaaaaaaaaaaaaaaaaaaaaaaaaaaaaaaaaaaaaaaaaaaaaaugcaucccccccccccccccccccccccccccccccaaaggcucuuuucagagccaccagaauu

SEQ ID NO: 13833 - RNA, 1889 nt, Artificial Sequence
  mRNA product Design g-1 comprising derived and/or modified sequence from HRSV(Memphis-37)__AIY60640.1__F-del_DSCav1_mut0 (opt5)
gggagacuuucccauucuguagcagaauuugguguugccuguggucuuggucccgcggagaagcuuaccauggagcugcccauccucaagaccaacgccauuacaacgauccuggcugccgugacccuuugcuucgcgagcucccagaauauuacagaagaguuuuaccaaucuaccuguagcgcugucuccaaaggcuaucugucugcccucagaacagggugguacaccagcguuaucacaauugaacuguccaacaucaaggagaauaaaugcaacggaaccgacgccaaggugaaacuuaucaagcaggaacuggauaaguauaaaaaugcugugacggagcuccagcugcugaugcagucuaccccugccgcuggcagcggguccgccauugcgagcggaaucgccgucuguaaggugcuccaccuggagggcgaaguuaacaaaauuaagaaugcccuucugucuacaaacaaagcuguggucucccucagcaauggggugucuguucugaccuucaaggugcuugaccugaagaacuacaucgauaaacaacuccugccgauucugaauaagcaguccugcagcaucucuaacauugagacagucaucgaauuucagcagaaaaauaaccggcuccuggagaucacccgcgaguucuccgugaaugcuggagugacgacacccgucagcaccuauaugcuuacaaacuccgaacugcucucucugauuaacgacaugccuaucaccaaugaucaaaagaaacuuaugagcaacaauguucagauugugagacagcaguccuacagcaucauguguauuaucaaggaggaagugcuggccuaugucgugcaacucccccuguacggcguuaucgacaccccuugcuggaaacugcauacaucuccccucuguacgaccaacacaaaggagggcuccaauauuugccugacccggacagaucgcgggugguacugugacaacgcgggaagcgugagcuuuuucccucaggccgaaaccugcaagguccagucuaauagaguguuuugugauacgaugaacuccagaacacugccgucugagguuaaucucugcaacaucgacauuuucaaucccaaauaugauugcaagaucaugaccagcaaaaccgacguguccagcucugucauuacaucccugggcgcuaucgugagcuguuacgggaagaccaaaugcacagccucuaacaagaaucggggaaucauuaagacguuuuccaacggcugugauuaugucagcaauaaagggguggacaccguuuccgugggaaacacacuuuacuaugucaacaagcaagagggcaaaucucuguacgugaagggcgaaccuaucauuaauuucuaugacccccucguuuuuccuagcgaugaguucgacgcuuccaucucucaggugaacgaaaagauuaaucagagccuggccuuuauccgcaaguccgaugagcugcuccacaacgucaauguggggaaaagcaccacaaacauuaugaucaccacgaucauuaucgugauuaucguuauucugcuucugcucaucgccgucggacuguuccuguacugcaaagcuagaugaggacuaguggaagcauuuuccuggcugauuaaaagaaauuacucagcuauggucaucuguuccuguuagaaggcuaugcagcauauuauauacuaugcgcauguuaugaaaugcauaauaaaaaauuuuaaaaaaucuaaaagaucuaaaaaaaaaaaaaaaaaaaaaaaaaaaaaaaaaaaaaaaaaaaaaaaaaaaaaaaaaaaaaaaaugcaucccccccccccccccccccccccccccccccaaaggcucuuuucagagccaccagaauu

SEQ ID NO: 13834 - RNA, 1889 nt, Artificial Sequence
  mRNA product Design g-1 comprising derived and/or modified sequence from HRSV(Memphis-37)__AIY60640.1__F-del_DSCav1_mut0 (opt6)
gggagacuuucccauucuguagcagaauuugguguugccuguggucuuggucccgcggagaagcuuaccauggaacucccaauacuuaaaacaaacgcaaucacaacaauacuagcugcagucacacuaugcuucgccucaucacaaaauauaacagaagaauuuuaucaaucaacaugcuccgcaguaucaaaaggauaucucucugcauuacgaacagguugguacaccucgguaauaacaauagaauuaucaaacauaaaagaaaauaaaugcaauggaaccgaugccaaaguaaaacuaaucaaacaagaacuugacaaauacaaaaacgcaguaacagaacuacaacuauuaaugcaaucaacaccagcagcagguucaggcuccgcaaucgcuucaggaauagccguuuguaaaguacuacacuuagaaggagaaguaaauaaaauaaaaaacgccuuacuaucaacaaacaaagcaguagucucccuuuccaacggaguaucagucuuaacuuuuaaaguacucgacuuaaaaaauuacaucgacaaacaacuacuacccauucuaaauaaacaaucaugcucaauaucaaacaucgaaacaguaaucgaauuucaacaaaaaaauaauagauuacuagaaauaacacgagaauuuuccguaaaugccggaguaacgaccccagucucaacauacauguuaacaaacucagaauuacuaucacucauuaacgauaugccaauaacaaaugaccaaaaaaaacuaaugucaaacaacguccaaauaguacgacaacaaucauacucuaucauguguauaauaaaagaagaaguuuuagcauacguaguacaacuaccacuuuacggagucauagacaccccaugcuggaaacuacacacaucacccuuauguacaacaaacaccaaagaagggucuaacauaugucucacuagaacagaucgaggcugguacugcgacaacgcaggaucaguuagcuuuuucccucaagccgaaaccuguaaaguacaauccaaucgaguauuuugcgacacuaugaacucuagaaccuuacccuccgaaguaaaccuauguaacauagacauauuuaaucccaaauaugauugcaaaaucaugacauccaaaacagauguaucaagcucuguaauaaccucacuaggagcaauaguuucaugcuaugguaaaacaaaaugcaccgccucaaacaaaaauagagggauaaucaaaaccuucucaaauggaugcgacuacguaucaaauaaaggaguagacaccgucuccguaggaaacacacuauacuacguaaacaaacaagaaggaaaaucacuauacguaaaaggagaaccaaucauaaacuucuacgacccacuuguuuucccaucagaugaauuugaugccuccauaucacaaguaaacgaaaaaauaaaccaaucucuagccuucaucagaaaauccgacgaacuuuuacacaacguaaacguagguaaaucaacaaccaacaucaugauaacaacaauaauaauaguaauaauuguaauacuuuuacuacuuaucgccguaggccuauucuuauauuguaaagcaagaugaggacuaguggaagcauuuuccuggcugauuaaaagaaauuacucagcuauggucaucuguuccuguuagaaggcuaugcagcauauuauauacuaugcgcauguuaugaaaugcauaauaaaaaauuuuaaaaaaucuaaaagaucuaaaaaaaaaaaaaaaaaaaaaaaaaaaaaaaaaaaaaaaaaaaaaaaaaaaaaaaaaaaaaaaaugcaucccccccccccccccccccccccccccccccaaaggcucuuuucagagccaccagaauu

SEQ ID NO: 13835 - RNA, 1889 nt, Artificial Sequence
  mRNA product Design g-1 comprising derived and/or modified sequence from HRSV(Memphis-37)__AIY60640.1__F-del_DSCav1_mut0 (opt11)
gggagacuuucccauucuguagcagaauuugguguugccuguggucuuggucccgcggagaagcuuaccauggaacuaccaauccucaaaaccaacgccaucacuacaauccuagccgcgguaacccugugcuucgccuccucacaaaacaucacagaagaauuuuaccaaucaaccugcuccgccguauccaaaggauaccugagcgcccugagaaccggcugguacaccuccgucaucaccauagaacucuccaacaucaaagaaaacaaaugcaacgguacggacgccaaaguuaaacucaucaaacaagaacuugacaaauacaagaacgccgucacagaacugcaacuccucaugcaauccacccccgccgccggcuccggcuccgccauagccuccggcaucgccgucugcaaagucuuacaccuagaaggcgaagucaacaaaaucaaaaacgcacuacuuuccacaaacaaagccgucgucucacucuccaacggcguauccguccucaccuucaaaguacuugaccucaaaaacuacaucgacaaacaacuacuccccauccugaacaaacaauccugcucaaucuccaacaucgaaaccguaaucgaguuccaacagaaaaauaaucgccuccuggagaucacccgcgaguucuccgucaaugcaggagucacaaccccaguaucaaccuacaugcucaccaacuccgaacuccugucgcucaucaacgacaugcccaucacaaacgaccaaaagaaacucauguccaacaacguacaaaucgucagacaacaauccuauucuauaaugugcaucaucaaagaagaaguccucgccuacgucguacaacucccccucuacggcguuaucgacacccccugcuggaaacuccacaccucaccccucugcaccaccaacacaaaagaaggcuccaacaucugccucacucggaccgaccgcggcugguacugcgacaaugccggcagcgucuccuucuucccacaagccgaaaccugcaaaguccaguccaaccgcguauucugcgacacuaugaacuccagaacccuccccuccgaaguaaaccucugcaacaucgacaucuucaacccaaaauacgacugcaaaaucaugaccucaaaaaccgacgucagcucgucagucauaaccagccucggagccauagucucaugcuacggaaaaaccaaaugcaccgccagcaacaaaaaccgcggcauaauaaaaacauucuccaacggcugcgacuauguauccaacaaaggagucgauaccgucuccguaggcaacacccuauacuacgucaacaaacaagaaggcaaaucccucuacgucaaaggugaaccaaucaucaacuucuacgacccucucgucuuccccuccgaugaguucgacgccucaaucagccaaguaaacgaaaagauaaaccaaucacucgccuucauccgcaaauccgacgaacuucuucacaacgucaacgucggcaaaucuaccaccaacauaaugauaaccaccaucaucaucgucaucaucguaauacuccuccuucucaucgccgucggccuauuccuauacugcaaagcccgcuagggacuaguggaagcauuuuccuggcugauuaaaagaaauuacucagcuauggucaucuguuccuguuagaaggcuaugcagcauauuauauacuaugcgcauguuaugaaaugcauaauaaaaaauuuuaaaaaaucuaaaagaucuaaaaaaaaaaaaaaaaaaaaaaaaaaaaaaaaaaaaaaaaaaaaaaaaaaaaaaaaaaaaaaaaugcaucccccccccccccccccccccccccccccccaaaggcucuuuucagagccaccagaauu

SEQ ID NO: 13836 - RNA, 1904 nt, Artificial Sequence
  mRNA product Design g-2 comprising derived and/or modified sequence from HRSV(Memphis-37)__AIY60640.1__F-del_DSCav1_mut0 (opt1)
gggagaguccgcucagccagguugcagaagcggcuuagcguguguccuaaucuucucucugcguguagguaggccugugccgcaaacaagcuuaccauggagcugcccauccucaagaccaacgccaucaccacgauccuggccgcggugacccugugcuucgccagcucccagaacaucaccgaggaguucuaccagagcacgugcuccgccgucagcaagggcuaccucuccgcccugcgcaccgggugguacaccagcgugaucaccaucgagcuguccaacaucaaggagaacaagugcaacggcaccgacgccaaggugaagcucaucaagcaggagcuggacaaguacaagaacgcggucacggagcugcagcuccugaugcagagcaccccggccgccggcuccgggagcgcgaucgccuccggcaucgccgucugcaaggugcugcaccucgagggcgaggugaacaagaucaagaacgcccugcuguccaccaacaaggccgucgugagccucuccaacggggugagcguccugaccuucaaggugcuggaccucaagaacuacaucgacaagcagcugcugcccauccugaacaagcagagcugcuccaucagcaacaucgagaccgucaucgaguuccagcagaagaacaaccgccuccuggagaucacgcgggaguucagcgugaacgcgggcgugaccacccccgucuccaccuacaugcugacgaacagcgagcuccugucccugaucaacgacaugccgaucaccaacgaccagaagaagcucaugagcaacaacgugcagaucgugcgccagcaguccuacagcaucaugugcaucaucaaggaggagguccuggccuacguggugcagcugccccucuacggggucaucgacacccccugcuggaagcugcacaccagcccccugugcacgaccaacaccaaggagggcuccaacaucugccucacccggacggaccgcgggugguacugcgacaacgccggcagcguguccuucuucccgcaggccgagaccugcaagguccagagcaaccggguguucugcgacaccaugaacucccggacccugcccagcgaggugaaccucugcaacaucgacaucuucaaccccaaguacgacugcaagaucaugacguccaagaccgacgucagcuccagcgugaucaccucccugggcgccaucgugagcugcuacgggaagaccaagugcacggcgagcaacaagaaccgcggcaucaucaagaccuucuccaacgggugcgacuacgucagcaacaagggcguggacaccguguccgucggcaacacccuguacuacgugaacaagcaggagggcaagagccucuacgugaagggggagcccaucaucaacuucuacgacccgcuggucuuccccuccgacgaguucgacgccagcaucucccaggugaacgagaagaucaaccagagccuggccuucauccggaaguccgacgagcuccugcacaacgugaacgucggcaagagcaccacgaacaucaugaucaccaccaucaucaucgugaucaucgugauccugcugcuccugaucgccgucgggcuguuccucuacugcaaggcccgcugaggacuaguaauaaggaaacuguaugaaugucugugggcaggaagugaagagauccuucuguaaagguuuuuggaauuaugucugcugaauaauaaacuuuuuugaaauaauaaaucugguagaaaaaugagaucuaaaaaaaaaaaaaaaaaaaaaaaaaaaaaaaaaaaaaaaaaaaaaaaaaaaaaaaaaaaaaaaaugcaucccccccccccccccccccccccccccccccaaaggcucuuuucagagccaccagaauu

SEQ ID NO: 13837 - RNA, 1904 nt, Artificial Sequence
  mRNA product Design g-2 comprising derived and/or modified sequence from HRSV(Memphis-37)__AIY60640.1__F-del_DSCav1_mut0 (opt1)
gggagaguccgcucagccagguugcagaagcggcuuagcguguguccuaaucuucucucugcguguagguaggccugugccgcaaacaagcuuaccauggagcugcccauccucaagaccaacgccaucaccacgauccuggccgcggugacccugugcuucgccagcucccagaacaucaccgaggaguucuaccagagcacgugcuccgccgucagcaagggcuaccucuccgcccugcgcaccgggugguacaccagcgugaucaccaucgagcuguccaacaucaaggagaacaagugcaacggcaccgacgccaaggugaagcucaucaagcaggagcuggacaaguacaagaacgcggucacggagcugcagcuccugaugcagagcaccccggccgccggguccggcagcgccaucgcguccgggaucgccgugugcaaggugcugcaccucgagggcgaggucaacaagaucaagaacgcccugcugagcaccaacaaggccguggugucccucagcaacggcgucuccgugcugaccuucaaggugcuggaccucaagaacuacaucgacaagcagcugcugcccauccucaacaagcagagcugcuccaucagcaacaucgagacggucaucgaguuccagcagaagaacaaccggcugcuggagaucacccgcgaguucuccgugaacgccggggugaccacccccgucagcacguacaugcucaccaacagcgagcugcugucccucaucaacgacaugcccaucaccaacgaccagaagaagcugaugagcaacaacgugcagaucgugcggcagcaguccuacagcaucaugugcaucaucaaggaggagguccuggcguacguggugcagcucccgcuguacggcgucaucgacacccccugcuggaagcugcacacgagcccccucugcaccaccaacaccaaggagggguccaacaucugccugacgcgcaccgaccggggcugguacugcgacaacgccggguccgugagcuucuucccccaggccgagaccugcaaggugcaguccaaccgcgucuucugcgacaccaugaacagccggacgcucccguccgaggugaaccugugcaacaucgacaucuucaaccccaaguacgacugcaagaucaugaccagcaagaccgacgucuccagcuccgugaucaccagccugggcgccaucguguccugcuacggcaagacgaagugcaccgccagcaacaagaaccgggggaucaucaagaccuucuccaacggcugcgacuacgucagcaacaaggggguggacaccgugagcgucggcaacacgcucuacuacgugaacaagcaggagggcaagucccuguacgugaagggggagcccaucaucaacuucuacgacccccuggucuucccgagcgacgaguucgacgcguccaucagccaggugaacgagaagaucaaccagucccucgccuucauccgcaagagcgacgagcugcugcacaacgugaacgucggcaaguccaccaccaacaucaugaucaccaccaucaucaucgugaucaucgugauccuccugcugcucaucgccgucgggcuguuccuguacugcaaggcccggugaggacuaguaauaaggaaacuguaugaaugucugugggcaggaagugaagagauccuucuguaaagguuuuuggaauuaugucugcugaauaauaaacuuuuuugaaauaauaaaucugguagaaaaaugagaucuaaaaaaaaaaaaaaaaaaaaaaaaaaaaaaaaaaaaaaaaaaaaaaaaaaaaaaaaaaaaaaaaugcaucccccccccccccccccccccccccccccccaaaggcucuuuucagagccaccagaauu

SEQ ID NO: 13838 - RNA, 1904 nt, Artificial Sequence
  mRNA product Design g-2 comprising derived and/or modified sequence from HRSV(Memphis-37)__AIY60640.1__F-del_DSCav1_mut0 (opt2)
gggagaguccgcucagccagguugcagaagcggcuuagcguguguccuaaucuucucucugcguguagguaggccugugccgcaaacaagcuuaccauggagcuccccauccucaagaccaacgccaucaccaccauccucgccgccgucacccucugcuucgccuccucccagaacaucaccgaggaguucuaccaguccaccugcuccgccgucuccaagggcuaccucuccgcccuccgcaccggcugguacaccuccgucaucaccaucgagcucuccaacaucaaggagaacaagugcaacggcaccgacgccaaggucaagcucaucaagcaggagcucgacaaguacaagaacgccgucaccgagcuccagcuccucaugcaguccacccccgccgccggcuccggcuccgccaucgccuccggcaucgccgucugcaagguccuccaccucgagggcgaggucaacaagaucaagaacgcccuccucuccaccaacaaggccgucgucucccucuccaacggcgucuccguccucaccuucaagguccucgaccucaagaacuacaucgacaagcagcuccuccccauccucaacaagcaguccugcuccaucuccaacaucgagaccgucaucgaguuccagcagaagaacaaccgccuccucgagaucacccgcgaguucuccgucaacgccggcgucaccacccccgucuccaccuacaugcucaccaacuccgagcuccucucccucaucaacgacaugcccaucaccaacgaccagaagaagcucauguccaacaacguccagaucguccgccagcaguccuacuccaucaugugcaucaucaaggaggagguccucgccuacgucguccagcucccccucuacggcgucaucgacacccccugcuggaagcuccacaccuccccccucugcaccaccaacaccaaggagggcuccaacaucugccucacccgcaccgaccgcggcugguacugcgacaacgccggcuccgucuccuucuucccccaggccgagaccugcaagguccaguccaaccgcgucuucugcgacaccaugaacucccgcacccuccccuccgaggucaaccucugcaacaucgacaucuucaaccccaaguacgacugcaagaucaugaccuccaagaccgacgucuccuccuccgucaucaccucccucggcgccaucgucuccugcuacggcaagaccaagugcaccgccuccaacaagaaccgcggcaucaucaagaccuucuccaacggcugcgacuacgucuccaacaagggcgucgacaccgucuccgucggcaacacccucuacuacgucaacaagcaggagggcaagucccucuacgucaagggcgagcccaucaucaacuucuacgacccccucgucuuccccuccgacgaguucgacgccuccaucucccaggucaacgagaagaucaaccagucccucgccuucauccgcaaguccgacgagcuccuccacaacgucaacgucggcaaguccaccaccaacaucaugaucaccaccaucaucaucgucaucaucgucauccuccuccuccucaucgccgucggccucuuccucuacugcaaggcccgcugaggacuaguaauaaggaaacuguaugaaugucugugggcaggaagugaagagauccuucuguaaagguuuuuggaauuaugucugcugaauaauaaacuuuuuugaaauaauaaaucugguagaaaaaugagaucuaaaaaaaaaaaaaaaaaaaaaaaaaaaaaaaaaaaaaaaaaaaaaaaaaaaaaaaaaaaaaaaaugcaucccccccccccccccccccccccccccccccaaaggcucuuuucagagccaccagaauu

SEQ ID NO: 13839 - RNA, 1904 nt, Artificial Sequence
  mRNA product Design g-2 comprising derived and/or modified sequence from HRSV(Memphis-37)__AIY60640.1__F-del_DSCav1_mut0 (opt3)
gggagaguccgcucagccagguugcagaagcggcuuagcguguguccuaaucuucucucugcguguagguaggccugugccgcaaacaagcuuaccauggagcugcccauccucaagaccaacgccauuacaacuauacuugcugcagugacgcugugcuucgccagcucccagaauaucaccgaagaguuuuaccaaucuacauguucagcggucaguaaaggcuauuugagcgcuuuaagaacugggugguacaccuccguuauuacaaucgaacugucuaacauuaaggagaauaaaugcaacggaaccgacgccaaggugaaacuaaucaagcaggaacucgauaaguauaaaaaugcaguaacugagcugcagcuucugaugcagucgaccccugccgcugguucaggcagcgcaauagccagugggaucgcuguguguaaggucuugcaccucgagggagaagugaacaaaauuaagaaugcccugcuguccacaaacaaagcgguugugucucucagcaauggcgucuccguguuaacguucaagguacuggaccuuaagaacuacaucgauaaacaauugcugccaauucuaaauaagcagucaugcaguaucagcaacauagagacuguuauugaauuucagcagaaaaauaacaggcuccuggagaucacccgggaguucucugugaaugccggugucacaacuccgguguccaccuauaugcuuacaaacucagaacuguugagccucauuaacgacaugcccaucaccaaugaucaaaagaaacugaugaguaacaaugugcagaucguccgccagcagucuuacuccauuauguguauaaucaaggaggaaguuuuagcauaugugguacaacugccucucuacggggugauugacacgccaugcuggaaacuucauacuagcccccuguguacaaccaacacuaaggagggaucgaauaucugcuugacacgaaccgaucguggcugguacugugacaacgcuggcucugucuccuuuuucccucaggccgaaacgugcaaggugcagucaaauagaguguuuugugauaccaugaacaguagaacacugccaagcgaggugaaucucugcaacauagacauuuucaaucccaaauaugauugcaagaucaugacuuccaaaaccgacgucucuagcucagugaucacaagucugggggcaauuguauccuguuacggaaagacuaaaugcaccgcuagcaacaagaauagggguaucauuaagacauuuucuaacggcugugauuauguuucaaauaaagggguggacaccgucagugugggaaacacucuuuacuaugucaacaagcaagagggcaaaagccuguacgugaagggugaaccuauaaucaauuucuaugacccauugguuuuuccguccgaugaguucgacgccucuauuucgcagguuaacgagaaaaucaaucagagccucgcguuuauccggaaguccgaugaacuguuacacaacguaaaugucgggaagucaacgacaaacauuaugauaaccacuaucauuaucgugauuaucguuauacugcuacuccugaucgccgugggacuuuucuuguacugcaaagcacgcugaggacuaguaauaaggaaacuguaugaaugucugugggcaggaagugaagagauccuucuguaaagguuuuuggaauuaugucugcugaauaauaaacuuuuuugaaauaauaaaucugguagaaaaaugagaucuaaaaaaaaaaaaaaaaaaaaaaaaaaaaaaaaaaaaaaaaaaaaaaaaaaaaaaaaaaaaaaaaugcaucccccccccccccccccccccccccccccccaaaggcucuuuucagagccaccagaauu

SEQ ID NO: 13840 - RNA, 1904 nt, Artificial Sequence
  mRNA product Design g-2 comprising derived and/or modified sequence from HRSV(Memphis-37)__AIY60640.1__F-del_DSCav1_mut0 (opt4)
gggagaguccgcucagccagguugcagaagcggcuuagcguguguccuaaucuucucucugcguguagguaggccugugccgcaaacaagcuuaccauggagcugcccauccugaagaccaacgccaucaccaccauccuggccgccgugacccugugcuucgccagcagccagaacaucaccgaggaguucuaccagagcaccugcagcgccgugagcaagggcuaccugagcgcccugagaaccggcugguacaccagcgugaucaccaucgagcugagcaacaucaaggagaacaagugcaacggcaccgacgccaaggugaagcugaucaagcaggagcuggacaaguacaagaacgccgugaccgagcugcagcugcugaugcagagcacccccgccgccggcagcggcagcgccaucgccagcggcaucgccgugugcaaggugcugcaccuggagggcgaggugaacaagaucaagaacgcccugcugagcaccaacaaggccguggugagccugagcaacggcgugagcgugcugaccuucaaggugcuggaccugaagaacuacaucgacaagcagcugcugcccauccugaacaagcagagcugcagcaucagcaacaucgagaccgugaucgaguuccagcagaagaacaacagacugcuggagaucaccagagaguucagcgugaacgccggcgugaccacccccgugagcaccuacaugcugaccaacagcgagcugcugagccugaucaacgacaugcccaucaccaacgaccagaagaagcugaugagcaacaacgugcagaucgugagacagcagagcuacagcaucaugugcaucaucaaggaggaggugcuggccuacguggugcagcugccccuguacggcgugaucgacacccccugcuggaagcugcacaccagcccccugugcaccaccaacaccaaggagggcagcaacaucugccugaccagaaccgacagaggcugguacugcgacaacgccggcagcgugagcuucuucccccaggccgagaccugcaaggugcagagcaacagaguguucugcgacaccaugaacagcagaacccugcccagcgaggugaaccugugcaacaucgacaucuucaaccccaaguacgacugcaagaucaugaccagcaagaccgacgugagcagcagcgugaucaccagccugggcgccaucgugagcugcuacggcaagaccaagugcaccgccagcaacaagaacagaggcaucaucaagaccuucagcaacggcugcgacuacgugagcaacaagggcguggacaccgugagcgugggcaacacccuguacuacgugaacaagcaggagggcaagagccuguacgugaagggcgagcccaucaucaacuucuacgacccccugguguuccccagcgacgaguucgacgccagcaucagccaggugaacgagaagaucaaccagagccuggccuucaucagaaagagcgacgagcugcugcacaacgugaacgugggcaagagcaccaccaacaucaugaucaccaccaucaucaucgugaucaucgugauccugcugcugcugaucgccgugggccuguuccuguacugcaaggccagaugaggacuaguaauaaggaaacuguaugaaugucugugggcaggaagugaagagauccuucuguaaagguuuuuggaauuaugucugcugaauaauaaacuuuuuugaaauaauaaaucugguagaaaaaugagaucuaaaaaaaaaaaaaaaaaaaaaaaaaaaaaaaaaaaaaaaaaaaaaaaaaaaaaaaaaaaaaaaaugcaucccccccccccccccccccccccccccccccaaaggcucuuuucagagccaccagaauu

SEQ ID NO: 13841 - RNA, 1904 nt, Artificial Sequence
  mRNA product Design g-2 comprising derived and/or modified sequence from HRSV(Memphis-37)__AIY60640.1__F-del_DSCav1_mut0 (opt5)
gggagaguccgcucagccagguugcagaagcggcuuagcguguguccuaaucuucucucugcguguagguaggccugugccgcaaacaagcuuaccauggagcugcccauccucaagaccaacgccauuacaacgauccuggcugccgugacccuuugcuucgcgagcucccagaauauuacagaagaguuuuaccaaucuaccuguagcgcugucuccaaaggcuaucugucugcccucagaacagggugguacaccagcguuaucacaauugaacuguccaacaucaaggagaauaaaugcaacggaaccgacgccaaggugaaacuuaucaagcaggaacuggauaaguauaaaaaugcugugacggagcuccagcugcugaugcagucuaccccugccgcuggcagcggguccgccauugcgagcggaaucgccgucuguaaggugcuccaccuggagggcgaaguuaacaaaauuaagaaugcccuucugucuacaaacaaagcuguggucucccucagcaauggggugucuguucugaccuucaaggugcuugaccugaagaacuacaucgauaaacaacuccugccgauucugaauaagcaguccugcagcaucucuaacauugagacagucaucgaauuucagcagaaaaauaaccggcuccuggagaucacccgcgaguucuccgugaaugcuggagugacgacacccgucagcaccuauaugcuuacaaacuccgaacugcucucucugauuaacgacaugccuaucaccaaugaucaaaagaaacuuaugagcaacaauguucagauugugagacagcaguccuacagcaucauguguauuaucaaggaggaagugcuggccuaugucgugcaacucccccuguacggcguuaucgacaccccuugcuggaaacugcauacaucuccccucuguacgaccaacacaaaggagggcuccaauauuugccugacccggacagaucgcgggugguacugugacaacgcgggaagcgugagcuuuuucccucaggccgaaaccugcaagguccagucuaauagaguguuuugugauacgaugaacuccagaacacugccgucugagguuaaucucugcaacaucgacauuuucaaucccaaauaugauugcaagaucaugaccagcaaaaccgacguguccagcucugucauuacaucccugggcgcuaucgugagcuguuacgggaagaccaaaugcacagccucuaacaagaaucggggaaucauuaagacguuuuccaacggcugugauuaugucagcaauaaagggguggacaccguuuccgugggaaacacacuuuacuaugucaacaagcaagagggcaaaucucuguacgugaagggcgaaccuaucauuaauuucuaugacccccucguuuuuccuagcgaugaguucgacgcuuccaucucucaggugaacgaaaagauuaaucagagccuggccuuuauccgcaaguccgaugagcugcuccacaacgucaauguggggaaaagcaccacaaacauuaugaucaccacgaucauuaucgugauuaucguuauucugcuucugcucaucgccgucggacuguuccuguacugcaaagcuagaugaggacuaguaauaaggaaacuguaugaaugucugugggcaggaagugaagagauccuucuguaaagguuuuuggaauuaugucugcugaauaauaaacuuuuuugaaauaauaaaucugguagaaaaaugagaucuaaaaaaaaaaaaaaaaaaaaaaaaaaaaaaaaaaaaaaaaaaaaaaaaaaaaaaaaaaaaaaaaugcaucccccccccccccccccccccccccccccccaaaggcucuuuucagagccaccagaauu

SEQ ID NO: 13842 - RNA, 1904 nt, Artificial Sequence
  mRNA product Design g-2 comprising derived and/or modified sequence from HRSV(Memphis-37)__AIY60640.1__F-del_DSCav1_mut0 (opt6)
gggagaguccgcucagccagguugcagaagcggcuuagcguguguccuaaucuucucucugcguguagguaggccugugccgcaaacaagcuuaccauggaacucccaauacuuaaaacaaacgcaaucacaacaauacuagcugcagucacacuaugcuucgccucaucacaaaauauaacagaagaauuuuaucaaucaacaugcuccgcaguaucaaaaggauaucucucugcauuacgaacagguugguacaccucgguaauaacaauagaauuaucaaacauaaaagaaaauaaaugcaauggaaccgaugccaaaguaaaacuaaucaaacaagaacuugacaaauacaaaaacgcaguaacagaacuacaacuauuaaugcaaucaacaccagcagcagguucaggcuccgcaaucgcuucaggaauagccguuuguaaaguacuacacuuagaaggagaaguaaauaaaauaaaaaacgccuuacuaucaacaaacaaagcaguagucucccuuuccaacggaguaucagucuuaacuuuuaaaguacucgacuuaaaaaauuacaucgacaaacaacuacuacccauucuaaauaaacaaucaugcucaauaucaaacaucgaaacaguaaucgaauuucaacaaaaaaauaauagauuacuagaaauaacacgagaauuuuccguaaaugccggaguaacgaccccagucucaacauacauguuaacaaacucagaauuacuaucacucauuaacgauaugccaauaacaaaugaccaaaaaaaacuaaugucaaacaacguccaaauaguacgacaacaaucauacucuaucauguguauaauaaaagaagaaguuuuagcauacguaguacaacuaccacuuuacggagucauagacaccccaugcuggaaacuacacacaucacccuuauguacaacaaacaccaaagaagggucuaacauaugucucacuagaacagaucgaggcugguacugcgacaacgcaggaucaguuagcuuuuucccucaagccgaaaccuguaaaguacaauccaaucgaguauuuugcgacacuaugaacucuagaaccuuacccuccgaaguaaaccuauguaacauagacauauuuaaucccaaauaugauugcaaaaucaugacauccaaaacagauguaucaagcucuguaauaaccucacuaggagcaauaguuucaugcuaugguaaaacaaaaugcaccgccucaaacaaaaauagagggauaaucaaaaccuucucaaauggaugcgacuacguaucaaauaaaggaguagacaccgucuccguaggaaacacacuauacuacguaaacaaacaagaaggaaaaucacuauacguaaaaggagaaccaaucauaaacuucuacgacccacuuguuuucccaucagaugaauuugaugccuccauaucacaaguaaacgaaaaaauaaaccaaucucuagccuucaucagaaaauccgacgaacuuuuacacaacguaaacguagguaaaucaacaaccaacaucaugauaacaacaauaauaauaguaauaauuguaauacuuuuacuacuuaucgccguaggccuauucuuauauuguaaagcaagaugaggacuaguaauaaggaaacuguaugaaugucugugggcaggaagugaagagauccuucuguaaagguuuuuggaauuaugucugcugaauaauaaacuuuuuugaaauaauaaaucugguagaaaaaugagaucuaaaaaaaaaaaaaaaaaaaaaaaaaaaaaaaaaaaaaaaaaaaaaaaaaaaaaaaaaaaaaaaaugcaucccccccccccccccccccccccccccccccaaaggcucuuuucagagccaccagaauu

SEQ ID NO: 13843 - RNA, 1904 nt, Artificial Sequence
  mRNA product Design g-2 comprising derived and/or modified sequence from HRSV(Memphis-37)__AIY60640.1__F-del_DSCav1_mut0 (opt11)
gggagaguccgcucagccagguugcagaagcggcuuagcguguguccuaaucuucucucugcguguagguaggccugugccgcaaacaagcuuaccauggaacuaccaauccucaaaaccaacgccaucacuacaauccuagccgcgguaacccugugcuucgccuccucacaaaacaucacagaagaauuuuaccaaucaaccugcuccgccguauccaaaggauaccugagcgcccugagaaccggcugguacaccuccgucaucaccauagaacucuccaacaucaaagaaaacaaaugcaacgguacggacgccaaaguuaaacucaucaaacaagaacuugacaaauacaagaacgccgucacagaacugcaacuccucaugcaauccacccccgccgccggcuccggcuccgccauagccuccggcaucgccgucugcaaagucuuacaccuagaaggcgaagucaacaaaaucaaaaacgcacuacuuuccacaaacaaagccgucgucucacucuccaacggcguauccguccucaccuucaaaguacuugaccucaaaaacuacaucgacaaacaacuacuccccauccugaacaaacaauccugcucaaucuccaacaucgaaaccguaaucgaguuccaacagaaaaauaaucgccuccuggagaucacccgcgaguucuccgucaaugcaggagucacaaccccaguaucaaccuacaugcucaccaacuccgaacuccugucgcucaucaacgacaugcccaucacaaacgaccaaaagaaacucauguccaacaacguacaaaucgucagacaacaauccuauucuauaaugugcaucaucaaagaagaaguccucgccuacgucguacaacucccccucuacggcguuaucgacacccccugcuggaaacuccacaccucaccccucugcaccaccaacacaaaagaaggcuccaacaucugccucacucggaccgaccgcggcugguacugcgacaaugccggcagcgucuccuucuucccacaagccgaaaccugcaaaguccaguccaaccgcguauucugcgacacuaugaacuccagaacccuccccuccgaaguaaaccucugcaacaucgacaucuucaacccaaaauacgacugcaaaaucaugaccucaaaaaccgacgucagcucgucagucauaaccagccucggagccauagucucaugcuacggaaaaaccaaaugcaccgccagcaacaaaaaccgcggcauaauaaaaacauucuccaacggcugcgacuauguauccaacaaaggagucgauaccgucuccguaggcaacacccuauacuacgucaacaaacaagaaggcaaaucccucuacgucaaaggugaaccaaucaucaacuucuacgacccucucgucuuccccuccgaugaguucgacgccucaaucagccaaguaaacgaaaagauaaaccaaucacucgccuucauccgcaaauccgacgaacuucuucacaacgucaacgucggcaaaucuaccaccaacauaaugauaaccaccaucaucaucgucaucaucguaauacuccuccuucucaucgccgucggccuauuccuauacugcaaagcccgcuagggacuaguaauaaggaaacuguaugaaugucugugggcaggaagugaagagauccuucuguaaagguuuuuggaauuaugucugcugaauaauaaacuuuuuugaaauaauaaaucugguagaaaaaugagaucuaaaaaaaaaaaaaaaaaaaaaaaaaaaaaaaaaaaaaaaaaaaaaaaaaaaaaaaaaaaaaaaaugcaucccccccccccccccccccccccccccccccaaaggcucuuuucagagccaccagaauu

SEQ ID NO: 13844 - RNA, 2136 nt, Artificial Sequence
  mRNA product Design g-3 comprising derived and/or modified sequence from HRSV(Memphis-37)__AIY60640.1__F-del_DSCav1_mut0 (opt1)
gggagaguccgcucagccagguugcagaagcggcuuagcguguguccuaaucuucucucugcguguagguaggccugugccgcaaacaagcuuaccauggagcugcccauccucaagaccaacgccaucaccacgauccuggccgcggugacccugugcuucgccagcucccagaacaucaccgaggaguucuaccagagcacgugcuccgccgucagcaagggcuaccucuccgcccugcgcaccgggugguacaccagcgugaucaccaucgagcuguccaacaucaaggagaacaagugcaacggcaccgacgccaaggugaagcucaucaagcaggagcuggacaaguacaagaacgcggucacggagcugcagcuccugaugcagagcaccccggccgccggcuccgggagcgcgaucgccuccggcaucgccgucugcaaggugcugcaccucgagggcgaggugaacaagaucaagaacgcccugcuguccaccaacaaggccgucgugagccucuccaacggggugagcguccugaccuucaaggugcuggaccucaagaacuacaucgacaagcagcugcugcccauccugaacaagcagagcugcuccaucagcaacaucgagaccgucaucgaguuccagcagaagaacaaccgccuccuggagaucacgcgggaguucagcgugaacgcgggcgugaccacccccgucuccaccuacaugcugacgaacagcgagcuccugucccugaucaacgacaugccgaucaccaacgaccagaagaagcucaugagcaacaacgugcagaucgugcgccagcaguccuacagcaucaugugcaucaucaaggaggagguccuggccuacguggugcagcugccccucuacggggucaucgacacccccugcuggaagcugcacaccagcccccugugcacgaccaacaccaaggagggcuccaacaucugccucacccggacggaccgcgggugguacugcgacaacgccggcagcguguccuucuucccgcaggccgagaccugcaagguccagagcaaccggguguucugcgacaccaugaacucccggacccugcccagcgaggugaaccucugcaacaucgacaucuucaaccccaaguacgacugcaagaucaugacguccaagaccgacgucagcuccagcgugaucaccucccugggcgccaucgugagcugcuacgggaagaccaagugcacggcgagcaacaagaaccgcggcaucaucaagaccuucuccaacgggugcgacuacgucagcaacaagggcguggacaccguguccgucggcaacacccuguacuacgugaacaagcaggagggcaagagccucuacgugaagggggagcccaucaucaacuucuacgacccgcuggucuuccccuccgacgaguucgacgccagcaucucccaggugaacgagaagaucaaccagagccuggccuucauccggaaguccgacgagcuccugcacaacgugaacgucggcaagagcaccacgaacaucaugaucaccaccaucaucaucgugaucaucgugauccugcugcuccugaucgccgucgggcuguuccucuacugcaaggcccgcugaggacuagugaagggaacacccaaauuuaauucagccuuaagcacaauuaauuaagagugaaacguaauuguacaagcaguuggucacccaccauagggcaugaucaacaccgcaaccuuuccuuuuucccccagugauucugaaaaaccccucuucccuucagcuugcuuagauguuccaaauuuaguaagcuuaaggcggccuacagaagaaaaagaaaaaaaaggccacaaaaguucccucucacuuucaguaaauaaaauaaaagcagcaacagaaauaaagaaauaaaugaaauucaaaaugaaauaaauauuguguugugcagcauuaaaaaaucaauaaaaauuaaaaaugagcaagaucuaaaaaaaaaaaaaaaaaaaaaaaaaaaaaaaaaaaaaaaaaaaaaaaaaaaaaaaaaaaaaaaaugcaucccccccccccccccccccccccccccccccaaaggcucuuuucagagccaccagaauu

SEQ ID NO: 13845 - RNA, 2136 nt, Artificial Sequence
  mRNA product Design g-3 comprising derived and/or modified sequence from HRSV(Memphis-37)__AIY60640.1__F-del_DSCav1_mut0 (opt1)
gggagaguccgcucagccagguugcagaagcggcuuagcguguguccuaaucuucucucugcguguagguaggccugugccgcaaacaagcuuaccauggagcugcccauccucaagaccaacgccaucaccacgauccuggccgcggugacccugugcuucgccagcucccagaacaucaccgaggaguucuaccagagcacgugcuccgccgucagcaagggcuaccucuccgcccugcgcaccgggugguacaccagcgugaucaccaucgagcuguccaacaucaaggagaacaagugcaacggcaccgacgccaaggugaagcucaucaagcaggagcuggacaaguacaagaacgcggucacggagcugcagcuccugaugcagagcaccccggccgccggguccggcagcgccaucgcguccgggaucgccgugugcaaggugcugcaccucgagggcgaggucaacaagaucaagaacgcccugcugagcaccaacaaggccguggugucccucagcaacggcgucuccgugcugaccuucaaggugcuggaccucaagaacuacaucgacaagcagcugcugcccauccucaacaagcagagcugcuccaucagcaacaucgagacggucaucgaguuccagcagaagaacaaccggcugcuggagaucacccgcgaguucuccgugaacgccggggugaccacccccgucagcacguacaugcucaccaacagcgagcugcugucccucaucaacgacaugcccaucaccaacgaccagaagaagcugaugagcaacaacgugcagaucgugcggcagcaguccuacagcaucaugugcaucaucaaggaggagguccuggcguacguggugcagcucccgcuguacggcgucaucgacacccccugcuggaagcugcacacgagcccccucugcaccaccaacaccaaggagggguccaacaucugccugacgcgcaccgaccggggcugguacugcgacaacgccggguccgugagcuucuucccccaggccgagaccugcaaggugcaguccaaccgcgucuucugcgacaccaugaacagccggacgcucccguccgaggugaaccugugcaacaucgacaucuucaaccccaaguacgacugcaagaucaugaccagcaagaccgacgucuccagcuccgugaucaccagccugggcgccaucguguccugcuacggcaagacgaagugcaccgccagcaacaagaaccgggggaucaucaagaccuucuccaacggcugcgacuacgucagcaacaaggggguggacaccgugagcgucggcaacacgcucuacuacgugaacaagcaggagggcaagucccuguacgugaagggggagcccaucaucaacuucuacgacccccuggucuucccgagcgacgaguucgacgcguccaucagccaggugaacgagaagaucaaccagucccucgccuucauccgcaagagcgacgagcugcugcacaacgugaacgucggcaaguccaccaccaacaucaugaucaccaccaucaucaucgugaucaucgugauccuccugcugcucaucgccgucgggcuguuccuguacugcaaggcccggugaggacuagugaagggaacacccaaauuuaauucagccuuaagcacaauuaauuaagagugaaacguaauuguacaagcaguuggucacccaccauagggcaugaucaacaccgcaaccuuuccuuuuucccccagugauucugaaaaaccccucuucccuucagcuugcuuagauguuccaaauuuaguaagcuuaaggcggccuacagaagaaaaagaaaaaaaaggccacaaaaguucccucucacuuucaguaaauaaaauaaaagcagcaacagaaauaaagaaauaaaugaaauucaaaaugaaauaaauauuguguugugcagcauuaaaaaaucaauaaaaauuaaaaaugagcaagaucuaaaaaaaaaaaaaaaaaaaaaaaaaaaaaaaaaaaaaaaaaaaaaaaaaaaaaaaaaaaaaaaaugcaucccccccccccccccccccccccccccccccaaaggcucuuuucagagccaccagaauu

SEQ ID NO: 13846 - RNA, 2136 nt, Artificial Sequence
  mRNA product Design g-3 comprising derived and/or modified sequence from HRSV(Memphis-37)__AIY60640.1__F-del_DSCav1_mut0 (opt2)
gggagaguccgcucagccagguugcagaagcggcuuagcguguguccuaaucuucucucugcguguagguaggccugugccgcaaacaagcuuaccauggagcuccccauccucaagaccaacgccaucaccaccauccucgccgccgucacccucugcuucgccuccucccagaacaucaccgaggaguucuaccaguccaccugcuccgccgucuccaagggcuaccucuccgcccuccgcaccggcugguacaccuccgucaucaccaucgagcucuccaacaucaaggagaacaagugcaacggcaccgacgccaaggucaagcucaucaagcaggagcucgacaaguacaagaacgccgucaccgagcuccagcuccucaugcaguccacccccgccgccggcuccggcuccgccaucgccuccggcaucgccgucugcaagguccuccaccucgagggcgaggucaacaagaucaagaacgcccuccucuccaccaacaaggccgucgucucccucuccaacggcgucuccguccucaccuucaagguccucgaccucaagaacuacaucgacaagcagcuccuccccauccucaacaagcaguccugcuccaucuccaacaucgagaccgucaucgaguuccagcagaagaacaaccgccuccucgagaucacccgcgaguucuccgucaacgccggcgucaccacccccgucuccaccuacaugcucaccaacuccgagcuccucucccucaucaacgacaugcccaucaccaacgaccagaagaagcucauguccaacaacguccagaucguccgccagcaguccuacuccaucaugugcaucaucaaggaggagguccucgccuacgucguccagcucccccucuacggcgucaucgacacccccugcuggaagcuccacaccuccccccucugcaccaccaacaccaaggagggcuccaacaucugccucacccgcaccgaccgcggcugguacugcgacaacgccggcuccgucuccuucuucccccaggccgagaccugcaagguccaguccaaccgcgucuucugcgacaccaugaacucccgcacccuccccuccgaggucaaccucugcaacaucgacaucuucaaccccaaguacgacugcaagaucaugaccuccaagaccgacgucuccuccuccgucaucaccucccucggcgccaucgucuccugcuacggcaagaccaagugcaccgccuccaacaagaaccgcggcaucaucaagaccuucuccaacggcugcgacuacgucuccaacaagggcgucgacaccgucuccgucggcaacacccucuacuacgucaacaagcaggagggcaagucccucuacgucaagggcgagcccaucaucaacuucuacgacccccucgucuuccccuccgacgaguucgacgccuccaucucccaggucaacgagaagaucaaccagucccucgccuucauccgcaaguccgacgagcuccuccacaacgucaacgucggcaaguccaccaccaacaucaugaucaccaccaucaucaucgucaucaucgucauccuccuccuccucaucgccgucggccucuuccucuacugcaaggcccgcugaggacuagugaagggaacacccaaauuuaauucagccuuaagcacaauuaauuaagagugaaacguaauuguacaagcaguuggucacccaccauagggcaugaucaacaccgcaaccuuuccuuuuucccccagugauucugaaaaaccccucuucccuucagcuugcuuagauguuccaaauuuaguaagcuuaaggcggccuacagaagaaaaagaaaaaaaaggccacaaaaguucccucucacuuucaguaaauaaaauaaaagcagcaacagaaauaaagaaauaaaugaaauucaaaaugaaauaaauauuguguugugcagcauuaaaaaaucaauaaaaauuaaaaaugagcaagaucuaaaaaaaaaaaaaaaaaaaaaaaaaaaaaaaaaaaaaaaaaaaaaaaaaaaaaaaaaaaaaaaaugcaucccccccccccccccccccccccccccccccaaaggcucuuuucagagccaccagaauu

SEQ ID NO: 13847 - RNA, 2136 nt, Artificial Sequence
  mRNA product Design g-3 comprising derived and/or modified sequence from HRSV(Memphis-37)__AIY60640.1__F-del_DSCav1_mut0 (opt3)
gggagaguccgcucagccagguugcagaagcggcuuagcguguguccuaaucuucucucugcguguagguaggccugugccgcaaacaagcuuaccauggagcugcccauccucaagaccaacgccauuacaacuauacuugcugcagugacgcugugcuucgccagcucccagaauaucaccgaagaguuuuaccaaucuacauguucagcggucaguaaaggcuauuugagcgcuuuaagaacugggugguacaccuccguuauuacaaucgaacugucuaacauuaaggagaauaaaugcaacggaaccgacgccaaggugaaacuaaucaagcaggaacucgauaaguauaaaaaugcaguaacugagcugcagcuucugaugcagucgaccccugccgcugguucaggcagcgcaauagccagugggaucgcuguguguaaggucuugcaccucgagggagaagugaacaaaauuaagaaugcccugcuguccacaaacaaagcgguugugucucucagcaauggcgucuccguguuaacguucaagguacuggaccuuaagaacuacaucgauaaacaauugcugccaauucuaaauaagcagucaugcaguaucagcaacauagagacuguuauugaauuucagcagaaaaauaacaggcuccuggagaucacccgggaguucucugugaaugccggugucacaacuccgguguccaccuauaugcuuacaaacucagaacuguugagccucauuaacgacaugcccaucaccaaugaucaaaagaaacugaugaguaacaaugugcagaucguccgccagcagucuuacuccauuauguguauaaucaaggaggaaguuuuagcauaugugguacaacugccucucuacggggugauugacacgccaugcuggaaacuucauacuagcccccuguguacaaccaacacuaaggagggaucgaauaucugcuugacacgaaccgaucguggcugguacugugacaacgcuggcucugucuccuuuuucccucaggccgaaacgugcaaggugcagucaaauagaguguuuugugauaccaugaacaguagaacacugccaagcgaggugaaucucugcaacauagacauuuucaaucccaaauaugauugcaagaucaugacuuccaaaaccgacgucucuagcucagugaucacaagucugggggcaauuguauccuguuacggaaagacuaaaugcaccgcuagcaacaagaauagggguaucauuaagacauuuucuaacggcugugauuauguuucaaauaaagggguggacaccgucagugugggaaacacucuuuacuaugucaacaagcaagagggcaaaagccuguacgugaagggugaaccuauaaucaauuucuaugacccauugguuuuuccguccgaugaguucgacgccucuauuucgcagguuaacgagaaaaucaaucagagccucgcguuuauccggaaguccgaugaacuguuacacaacguaaaugucgggaagucaacgacaaacauuaugauaaccacuaucauuaucgugauuaucguuauacugcuacuccugaucgccgugggacuuuucuuguacugcaaagcacgcugaggacuagugaagggaacacccaaauuuaauucagccuuaagcacaauuaauuaagagugaaacguaauuguacaagcaguuggucacccaccauagggcaugaucaacaccgcaaccuuuccuuuuucccccagugauucugaaaaaccccucuucccuucagcuugcuuagauguuccaaauuuaguaagcuuaaggcggccuacagaagaaaaagaaaaaaaaggccacaaaaguucccucucacuuucaguaaauaaaauaaaagcagcaacagaaauaaagaaauaaaugaaauucaaaaugaaauaaauauuguguugugcagcauuaaaaaaucaauaaaaauuaaaaaugagcaagaucuaaaaaaaaaaaaaaaaaaaaaaaaaaaaaaaaaaaaaaaaaaaaaaaaaaaaaaaaaaaaaaaaugcaucccccccccccccccccccccccccccccccaaaggcucuuuucagagccaccagaauu

SEQ ID NO: 13848 - RNA, 2136 nt, Artificial Sequence
  mRNA product Design g-3 comprising derived and/or modified sequence from HRSV(Memphis-37)__AIY60640.1__F-del_DSCav1_mut0 (opt4)
gggagaguccgcucagccagguugcagaagcggcuuagcguguguccuaaucuucucucugcguguagguaggccugugccgcaaacaagcuuaccauggagcugcccauccugaagaccaacgccaucaccaccauccuggccgccgugacccugugcuucgccagcagccagaacaucaccgaggaguucuaccagagcaccugcagcgccgugagcaagggcuaccugagcgcccugagaaccggcugguacaccagcgugaucaccaucgagcugagcaacaucaaggagaacaagugcaacggcaccgacgccaaggugaagcugaucaagcaggagcuggacaaguacaagaacgccgugaccgagcugcagcugcugaugcagagcacccccgccgccggcagcggcagcgccaucgccagcggcaucgccgugugcaaggugcugcaccuggagggcgaggugaacaagaucaagaacgcccugcugagcaccaacaaggccguggugagccugagcaacggcgugagcgugcugaccuucaaggugcuggaccugaagaacuacaucgacaagcagcugcugcccauccugaacaagcagagcugcagcaucagcaacaucgagaccgugaucgaguuccagcagaagaacaacagacugcuggagaucaccagagaguucagcgugaacgccggcgugaccacccccgugagcaccuacaugcugaccaacagcgagcugcugagccugaucaacgacaugcccaucaccaacgaccagaagaagcugaugagcaacaacgugcagaucgugagacagcagagcuacagcaucaugugcaucaucaaggaggaggugcuggccuacguggugcagcugccccuguacggcgugaucgacacccccugcuggaagcugcacaccagcccccugugcaccaccaacaccaaggagggcagcaacaucugccugaccagaaccgacagaggcugguacugcgacaacgccggcagcgugagcuucuucccccaggccgagaccugcaaggugcagagcaacagaguguucugcgacaccaugaacagcagaacccugcccagcgaggugaaccugugcaacaucgacaucuucaaccccaaguacgacugcaagaucaugaccagcaagaccgacgugagcagcagcgugaucaccagccugggcgccaucgugagcugcuacggcaagaccaagugcaccgccagcaacaagaacagaggcaucaucaagaccuucagcaacggcugcgacuacgugagcaacaagggcguggacaccgugagcgugggcaacacccuguacuacgugaacaagcaggagggcaagagccuguacgugaagggcgagcccaucaucaacuucuacgacccccugguguuccccagcgacgaguucgacgccagcaucagccaggugaacgagaagaucaaccagagccuggccuucaucagaaagagcgacgagcugcugcacaacgugaacgugggcaagagcaccaccaacaucaugaucaccaccaucaucaucgugaucaucgugauccugcugcugcugaucgccgugggccuguuccuguacugcaaggccagaugaggacuagugaagggaacacccaaauuuaauucagccuuaagcacaauuaauuaagagugaaacguaauuguacaagcaguuggucacccaccauagggcaugaucaacaccgcaaccuuuccuuuuucccccagugauucugaaaaaccccucuucccuucagcuugcuuagauguuccaaauuuaguaagcuuaaggcggccuacagaagaaaaagaaaaaaaaggccacaaaaguucccucucacuuucaguaaauaaaauaaaagcagcaacagaaauaaagaaauaaaugaaauucaaaaugaaauaaauauuguguugugcagcauuaaaaaaucaauaaaaauuaaaaaugagcaagaucuaaaaaaaaaaaaaaaaaaaaaaaaaaaaaaaaaaaaaaaaaaaaaaaaaaaaaaaaaaaaaaaaugcaucccccccccccccccccccccccccccccccaaaggcucuuuucagagccaccagaauu

SEQ ID NO: 13849 - RNA, 2136 nt, Artificial Sequence
  mRNA product Design g-3 comprising derived and/or modified sequence from HRSV(Memphis-37)__AIY60640.1__F-del_DSCav1_mut0 (opt5)
gggagaguccgcucagccagguugcagaagcggcuuagcguguguccuaaucuucucucugcguguagguaggccugugccgcaaacaagcuuaccauggagcugcccauccucaagaccaacgccauuacaacgauccuggcugccgugacccuuugcuucgcgagcucccagaauauuacagaagaguuuuaccaaucuaccuguagcgcugucuccaaaggcuaucugucugcccucagaacagggugguacaccagcguuaucacaauugaacuguccaacaucaaggagaauaaaugcaacggaaccgacgccaaggugaaacuuaucaagcaggaacuggauaaguauaaaaaugcugugacggagcuccagcugcugaugcagucuaccccugccgcuggcagcggguccgccauugcgagcggaaucgccgucuguaaggugcuccaccuggagggcgaaguuaacaaaauuaagaaugcccuucugucuacaaacaaagcuguggucucccucagcaauggggugucuguucugaccuucaaggugcuugaccugaagaacuacaucgauaaacaacuccugccgauucugaauaagcaguccugcagcaucucuaacauugagacagucaucgaauuucagcagaaaaauaaccggcuccuggagaucacccgcgaguucuccgugaaugcuggagugacgacacccgucagcaccuauaugcuuacaaacuccgaacugcucucucugauuaacgacaugccuaucaccaaugaucaaaagaaacuuaugagcaacaauguucagauugugagacagcaguccuacagcaucauguguauuaucaaggaggaagugcuggccuaugucgugcaacucccccuguacggcguuaucgacaccccuugcuggaaacugcauacaucuccccucuguacgaccaacacaaaggagggcuccaauauuugccugacccggacagaucgcgggugguacugugacaacgcgggaagcgugagcuuuuucccucaggccgaaaccugcaagguccagucuaauagaguguuuugugauacgaugaacuccagaacacugccgucugagguuaaucucugcaacaucgacauuuucaaucccaaauaugauugcaagaucaugaccagcaaaaccgacguguccagcucugucauuacaucccugggcgcuaucgugagcuguuacgggaagaccaaaugcacagccucuaacaagaaucggggaaucauuaagacguuuuccaacggcugugauuaugucagcaauaaagggguggacaccguuuccgugggaaacacacuuuacuaugucaacaagcaagagggcaaaucucuguacgugaagggcgaaccuaucauuaauuucuaugacccccucguuuuuccuagcgaugaguucgacgcuuccaucucucaggugaacgaaaagauuaaucagagccuggccuuuauccgcaaguccgaugagcugcuccacaacgucaauguggggaaaagcaccacaaacauuaugaucaccacgaucauuaucgugauuaucguuauucugcuucugcucaucgccgucggacuguuccuguacugcaaagcuagaugaggacuagugaagggaacacccaaauuuaauucagccuuaagcacaauuaauuaagagugaaacguaauuguacaagcaguuggucacccaccauagggcaugaucaacaccgcaaccuuuccuuuuucccccagugauucugaaaaaccccucuucccuucagcuugcuuagauguuccaaauuuaguaagcuuaaggcggccuacagaagaaaaagaaaaaaaaggccacaaaaguucccucucacuuucaguaaauaaaauaaaagcagcaacagaaauaaagaaauaaaugaaauucaaaaugaaauaaauauuguguugugcagcauuaaaaaaucaauaaaaauuaaaaaugagcaagaucuaaaaaaaaaaaaaaaaaaaaaaaaaaaaaaaaaaaaaaaaaaaaaaaaaaaaaaaaaaaaaaaaugcaucccccccccccccccccccccccccccccccaaaggcucuuuucagagccaccagaauu

SEQ ID NO: 13850 - RNA, 2136 nt, Artificial Sequence
  mRNA product Design g-3 comprising derived and/or modified sequence from HRSV(Memphis-37)__AIY60640.1__F-del_DSCav1_mut0 (opt6)
gggagaguccgcucagccagguugcagaagcggcuuagcguguguccuaaucuucucucugcguguagguaggccugugccgcaaacaagcuuaccauggaacucccaauacuuaaaacaaacgcaaucacaacaauacuagcugcagucacacuaugcuucgccucaucacaaaauauaacagaagaauuuuaucaaucaacaugcuccgcaguaucaaaaggauaucucucugcauuacgaacagguugguacaccucgguaauaacaauagaauuaucaaacauaaaagaaaauaaaugcaauggaaccgaugccaaaguaaaacuaaucaaacaagaacuugacaaauacaaaaacgcaguaacagaacuacaacuauuaaugcaaucaacaccagcagcagguucaggcuccgcaaucgcuucaggaauagccguuuguaaaguacuacacuuagaaggagaaguaaauaaaauaaaaaacgccuuacuaucaacaaacaaagcaguagucucccuuuccaacggaguaucagucuuaacuuuuaaaguacucgacuuaaaaaauuacaucgacaaacaacuacuacccauucuaaauaaacaaucaugcucaauaucaaacaucgaaacaguaaucgaauuucaacaaaaaaauaauagauuacuagaaauaacacgagaauuuuccguaaaugccggaguaacgaccccagucucaacauacauguuaacaaacucagaauuacuaucacucauuaacgauaugccaauaacaaaugaccaaaaaaaacuaaugucaaacaacguccaaauaguacgacaacaaucauacucuaucauguguauaauaaaagaagaaguuuuagcauacguaguacaacuaccacuuuacggagucauagacaccccaugcuggaaacuacacacaucacccuuauguacaacaaacaccaaagaagggucuaacauaugucucacuagaacagaucgaggcugguacugcgacaacgcaggaucaguuagcuuuuucccucaagccgaaaccuguaaaguacaauccaaucgaguauuuugcgacacuaugaacucuagaaccuuacccuccgaaguaaaccuauguaacauagacauauuuaaucccaaauaugauugcaaaaucaugacauccaaaacagauguaucaagcucuguaauaaccucacuaggagcaauaguuucaugcuaugguaaaacaaaaugcaccgccucaaacaaaaauagagggauaaucaaaaccuucucaaauggaugcgacuacguaucaaauaaaggaguagacaccgucuccguaggaaacacacuauacuacguaaacaaacaagaaggaaaaucacuauacguaaaaggagaaccaaucauaaacuucuacgacccacuuguuuucccaucagaugaauuugaugccuccauaucacaaguaaacgaaaaaauaaaccaaucucuagccuucaucagaaaauccgacgaacuuuuacacaacguaaacguagguaaaucaacaaccaacaucaugauaacaacaauaauaauaguaauaauuguaauacuuuuacuacuuaucgccguaggccuauucuuauauuguaaagcaagaugaggacuagugaagggaacacccaaauuuaauucagccuuaagcacaauuaauuaagagugaaacguaauuguacaagcaguuggucacccaccauagggcaugaucaacaccgcaaccuuuccuuuuucccccagugauucugaaaaaccccucuucccuucagcuugcuuagauguuccaaauuuaguaagcuuaaggcggccuacagaagaaaaagaaaaaaaaggccacaaaaguucccucucacuuucaguaaauaaaauaaaagcagcaacagaaauaaagaaauaaaugaaauucaaaaugaaauaaauauuguguugugcagcauuaaaaaaucaauaaaaauuaaaaaugagcaagaucuaaaaaaaaaaaaaaaaaaaaaaaaaaaaaaaaaaaaaaaaaaaaaaaaaaaaaaaaaaaaaaaaugcaucccccccccccccccccccccccccccccccaaaggcucuuuucagagccaccagaauu

SEQ ID NO: 13851 - RNA, 2136 nt, Artificial Sequence
  mRNA product Design g-3 comprising derived and/or modified sequence from HRSV(Memphis-37)__AIY60640.1__F-del_DSCav1_mut0 (opt11)
gggagaguccgcucagccagguugcagaagcggcuuagcguguguccuaaucuucucucugcguguagguaggccugugccgcaaacaagcuuaccauggaacuaccaauccucaaaaccaacgccaucacuacaauccuagccgcgguaacccugugcuucgccuccucacaaaacaucacagaagaauuuuaccaaucaaccugcuccgccguauccaaaggauaccugagcgcccugagaaccggcugguacaccuccgucaucaccauagaacucuccaacaucaaagaaaacaaaugcaacgguacggacgccaaaguuaaacucaucaaacaagaacuugacaaauacaagaacgccgucacagaacugcaacuccucaugcaauccacccccgccgccggcuccggcuccgccauagccuccggcaucgccgucugcaaagucuuacaccuagaaggcgaagucaacaaaaucaaaaacgcacuacuuuccacaaacaaagccgucgucucacucuccaacggcguauccguccucaccuucaaaguacuugaccucaaaaacuacaucgacaaacaacuacuccccauccugaacaaacaauccugcucaaucuccaacaucgaaaccguaaucgaguuccaacagaaaaauaaucgccuccuggagaucacccgcgaguucuccgucaaugcaggagucacaaccccaguaucaaccuacaugcucaccaacuccgaacuccugucgcucaucaacgacaugcccaucacaaacgaccaaaagaaacucauguccaacaacguacaaaucgucagacaacaauccuauucuauaaugugcaucaucaaagaagaaguccucgccuacgucguacaacucccccucuacggcguuaucgacacccccugcuggaaacuccacaccucaccccucugcaccaccaacacaaaagaaggcuccaacaucugccucacucggaccgaccgcggcugguacugcgacaaugccggcagcgucuccuucuucccacaagccgaaaccugcaaaguccaguccaaccgcguauucugcgacacuaugaacuccagaacccuccccuccgaaguaaaccucugcaacaucgacaucuucaacccaaaauacgacugcaaaaucaugaccucaaaaaccgacgucagcucgucagucauaaccagccucggagccauagucucaugcuacggaaaaaccaaaugcaccgccagcaacaaaaaccgcggcauaauaaaaacauucuccaacggcugcgacuauguauccaacaaaggagucgauaccgucuccguaggcaacacccuauacuacgucaacaaacaagaaggcaaaucccucuacgucaaaggugaaccaaucaucaacuucuacgacccucucgucuuccccuccgaugaguucgacgccucaaucagccaaguaaacgaaaagauaaaccaaucacucgccuucauccgcaaauccgacgaacuucuucacaacgucaacgucggcaaaucuaccaccaacauaaugauaaccaccaucaucaucgucaucaucguaauacuccuccuucucaucgccgucggccuauuccuauacugcaaagcccgcuagggacuagugaagggaacacccaaauuuaauucagccuuaagcacaauuaauuaagagugaaacguaauuguacaagcaguuggucacccaccauagggcaugaucaacaccgcaaccuuuccuuuuucccccagugauucugaaaaaccccucuucccuucagcuugcuuagauguuccaaauuuaguaagcuuaaggcggccuacagaagaaaaagaaaaaaaaggccacaaaaguucccucucacuuucaguaaauaaaauaaaagcagcaacagaaauaaagaaauaaaugaaauucaaaaugaaauaaauauuguguugugcagcauuaaaaaaucaauaaaaauuaaaaaugagcaagaucuaaaaaaaaaaaaaaaaaaaaaaaaaaaaaaaaaaaaaaaaaaaaaaaaaaaaaaaaaaaaaaaaugcaucccccccccccccccccccccccccccccccaaaggcucuuuucagagccaccagaauu

SEQ ID NO: 13852 - RNA, 1931 nt, Artificial Sequence
  mRNA product Design g-4 comprising derived and/or modified sequence from HRSV(Memphis-37)__AIY60640.1__F-del_DSCav1_mut0 (opt1)
gggagacuccugucgggcggaaguaggaggaguagaguuuaaaaacaguacucuuuuuccgguucgggacguaguugaagcaacgacaagccggauaaccgcucuugagacaggaagcuuaccauggagcugcccauccucaagaccaacgccaucaccacgauccuggccgcggugacccugugcuucgccagcucccagaacaucaccgaggaguucuaccagagcacgugcuccgccgucagcaagggcuaccucuccgcccugcgcaccgggugguacaccagcgugaucaccaucgagcuguccaacaucaaggagaacaagugcaacggcaccgacgccaaggugaagcucaucaagcaggagcuggacaaguacaagaacgcggucacggagcugcagcuccugaugcagagcaccccggccgccggcuccgggagcgcgaucgccuccggcaucgccgucugcaaggugcugcaccucgagggcgaggugaacaagaucaagaacgcccugcuguccaccaacaaggccgucgugagccucuccaacggggugagcguccugaccuucaaggugcuggaccucaagaacuacaucgacaagcagcugcugcccauccugaacaagcagagcugcuccaucagcaacaucgagaccgucaucgaguuccagcagaagaacaaccgccuccuggagaucacgcgggaguucagcgugaacgcgggcgugaccacccccgucuccaccuacaugcugacgaacagcgagcuccugucccugaucaacgacaugccgaucaccaacgaccagaagaagcucaugagcaacaacgugcagaucgugcgccagcaguccuacagcaucaugugcaucaucaaggaggagguccuggccuacguggugcagcugccccucuacggggucaucgacacccccugcuggaagcugcacaccagcccccugugcacgaccaacaccaaggagggcuccaacaucugccucacccggacggaccgcgggugguacugcgacaacgccggcagcguguccuucuucccgcaggccgagaccugcaagguccagagcaaccggguguucugcgacaccaugaacucccggacccugcccagcgaggugaaccucugcaacaucgacaucuucaaccccaaguacgacugcaagaucaugacguccaagaccgacgucagcuccagcgugaucaccucccugggcgccaucgugagcugcuacgggaagaccaagugcacggcgagcaacaagaaccgcggcaucaucaagaccuucuccaacgggugcgacuacgucagcaacaagggcguggacaccguguccgucggcaacacccuguacuacgugaacaagcaggagggcaagagccucuacgugaagggggagcccaucaucaacuucuacgacccgcuggucuuccccuccgacgaguucgacgccagcaucucccaggugaacgagaagaucaaccagagccuggccuucauccggaaguccgacgagcuccugcacaacgugaacgucggcaagagcaccacgaacaucaugaucaccaccaucaucaucgugaucaucgugauccugcugcuccugaucgccgucgggcuguuccucuacugcaaggcccgcugaggacuaguaauaaggaaacuguaugaaugucugugggcaggaagugaagagauccuucuguaaagguuuuuggaauuaugucugcugaauaauaaacuuuuuugaaauaauaaaucugguagaaaaaugagaucuaaaaaaaaaaaaaaaaaaaaaaaaaaaaaaaaaaaaaaaaaaaaaaaaaaaaaaaaaaaaaaaaugcaucccccccccccccccccccccccccccccccaaaggcucuuuucagagccaccagaauu

SEQ ID NO: 13853 - RNA, 1931 nt, Artificial Sequence
  mRNA product Design g-4 comprising derived and/or modified sequence from HRSV(Memphis-37)__AIY60640.1__F-del_DSCav1_mut0 (opt1)
gggagacuccugucgggcggaaguaggaggaguagaguuuaaaaacaguacucuuuuuccgguucgggacguaguugaagcaacgacaagccggauaaccgcucuugagacaggaagcuuaccauggagcugcccauccucaagaccaacgccaucaccacgauccuggccgcggugacccugugcuucgccagcucccagaacaucaccgaggaguucuaccagagcacgugcuccgccgucagcaagggcuaccucuccgcccugcgcaccgggugguacaccagcgugaucaccaucgagcuguccaacaucaaggagaacaagugcaacggcaccgacgccaaggugaagcucaucaagcaggagcuggacaaguacaagaacgcggucacggagcugcagcuccugaugcagagcaccccggccgccggguccggcagcgccaucgcguccgggaucgccgugugcaaggugcugcaccucgagggcgaggucaacaagaucaagaacgcccugcugagcaccaacaaggccguggugucccucagcaacggcgucuccgugcugaccuucaaggugcuggaccucaagaacuacaucgacaagcagcugcugcccauccucaacaagcagagcugcuccaucagcaacaucgagacggucaucgaguuccagcagaagaacaaccggcugcuggagaucacccgcgaguucuccgugaacgccggggugaccacccccgucagcacguacaugcucaccaacagcgagcugcugucccucaucaacgacaugcccaucaccaacgaccagaagaagcugaugagcaacaacgugcagaucgugcggcagcaguccuacagcaucaugugcaucaucaaggaggagguccuggcguacguggugcagcucccgcuguacggcgucaucgacacccccugcuggaagcugcacacgagcccccucugcaccaccaacaccaaggagggguccaacaucugccugacgcgcaccgaccggggcugguacugcgacaacgccggguccgugagcuucuucccccaggccgagaccugcaaggugcaguccaaccgcgucuucugcgacaccaugaacagccggacgcucccguccgaggugaaccugugcaacaucgacaucuucaaccccaaguacgacugcaagaucaugaccagcaagaccgacgucuccagcuccgugaucaccagccugggcgccaucguguccugcuacggcaagacgaagugcaccgccagcaacaagaaccgggggaucaucaagaccuucuccaacggcugcgacuacgucagcaacaaggggguggacaccgugagcgucggcaacacgcucuacuacgugaacaagcaggagggcaagucccuguacgugaagggggagcccaucaucaacuucuacgacccccuggucuucccgagcgacgaguucgacgcguccaucagccaggugaacgagaagaucaaccagucccucgccuucauccgcaagagcgacgagcugcugcacaacgugaacgucggcaaguccaccaccaacaucaugaucaccaccaucaucaucgugaucaucgugauccuccugcugcucaucgccgucgggcuguuccuguacugcaaggcccggugaggacuaguaauaaggaaacuguaugaaugucugugggcaggaagugaagagauccuucuguaaagguuuuuggaauuaugucugcugaauaauaaacuuuuuugaaauaauaaaucugguagaaaaaugagaucuaaaaaaaaaaaaaaaaaaaaaaaaaaaaaaaaaaaaaaaaaaaaaaaaaaaaaaaaaaaaaaaaugcaucccccccccccccccccccccccccccccccaaaggcucuuuucagagccaccagaauu

SEQ ID NO: 13854 - RNA, 1931 nt, Artificial Sequence
  mRNA product Design g-4 comprising derived and/or modified sequence from HRSV(Memphis-37)__AIY60640.1__F-del_DSCav1_mut0 (opt2)
gggagacuccugucgggcggaaguaggaggaguagaguuuaaaaacaguacucuuuuuccgguucgggacguaguugaagcaacgacaagccggauaaccgcucuugagacaggaagcuuaccauggagcuccccauccucaagaccaacgccaucaccaccauccucgccgccgucacccucugcuucgccuccucccagaacaucaccgaggaguucuaccaguccaccugcuccgccgucuccaagggcuaccucuccgcccuccgcaccggcugguacaccuccgucaucaccaucgagcucuccaacaucaaggagaacaagugcaacggcaccgacgccaaggucaagcucaucaagcaggagcucgacaaguacaagaacgccgucaccgagcuccagcuccucaugcaguccacccccgccgccggcuccggcuccgccaucgccuccggcaucgccgucugcaagguccuccaccucgagggcgaggucaacaagaucaagaacgcccuccucuccaccaacaaggccgucgucucccucuccaacggcgucuccguccucaccuucaagguccucgaccucaagaacuacaucgacaagcagcuccuccccauccucaacaagcaguccugcuccaucuccaacaucgagaccgucaucgaguuccagcagaagaacaaccgccuccucgagaucacccgcgaguucuccgucaacgccggcgucaccacccccgucuccaccuacaugcucaccaacuccgagcuccucucccucaucaacgacaugcccaucaccaacgaccagaagaagcucauguccaacaacguccagaucguccgccagcaguccuacuccaucaugugcaucaucaaggaggagguccucgccuacgucguccagcucccccucuacggcgucaucgacacccccugcuggaagcuccacaccuccccccucugcaccaccaacaccaaggagggcuccaacaucugccucacccgcaccgaccgcggcugguacugcgacaacgccggcuccgucuccuucuucccccaggccgagaccugcaagguccaguccaaccgcgucuucugcgacaccaugaacucccgcacccuccccuccgaggucaaccucugcaacaucgacaucuucaaccccaaguacgacugcaagaucaugaccuccaagaccgacgucuccuccuccgucaucaccucccucggcgccaucgucuccugcuacggcaagaccaagugcaccgccuccaacaagaaccgcggcaucaucaagaccuucuccaacggcugcgacuacgucuccaacaagggcgucgacaccgucuccgucggcaacacccucuacuacgucaacaagcaggagggcaagucccucuacgucaagggcgagcccaucaucaacuucuacgacccccucgucuuccccuccgacgaguucgacgccuccaucucccaggucaacgagaagaucaaccagucccucgccuucauccgcaaguccgacgagcuccuccacaacgucaacgucggcaaguccaccaccaacaucaugaucaccaccaucaucaucgucaucaucgucauccuccuccuccucaucgccgucggccucuuccucuacugcaaggcccgcugaggacuaguaauaaggaaacuguaugaaugucugugggcaggaagugaagagauccuucuguaaagguuuuuggaauuaugucugcugaauaauaaacuuuuuugaaauaauaaaucugguagaaaaaugagaucuaaaaaaaaaaaaaaaaaaaaaaaaaaaaaaaaaaaaaaaaaaaaaaaaaaaaaaaaaaaaaaaaugcaucccccccccccccccccccccccccccccccaaaggcucuuuucagagccaccagaauu

SEQ ID NO: 13855 - RNA, 1931 nt, Artificial Sequence
  mRNA product Design g-4 comprising derived and/or modified sequence from HRSV(Memphis-37)__AIY60640.1__F-del_DSCav1_mut0 (opt3)
gggagacuccugucgggcggaaguaggaggaguagaguuuaaaaacaguacucuuuuuccgguucgggacguaguugaagcaacgacaagccggauaaccgcucuugagacaggaagcuuaccauggagcugcccauccucaagaccaacgccauuacaacuauacuugcugcagugacgcugugcuucgccagcucccagaauaucaccgaagaguuuuaccaaucuacauguucagcggucaguaaaggcuauuugagcgcuuuaagaacugggugguacaccuccguuauuacaaucgaacugucuaacauuaaggagaauaaaugcaacggaaccgacgccaaggugaaacuaaucaagcaggaacucgauaaguauaaaaaugcaguaacugagcugcagcuucugaugcagucgaccccugccgcugguucaggcagcgcaauagccagugggaucgcuguguguaaggucuugcaccucgagggagaagugaacaaaauuaagaaugcccugcuguccacaaacaaagcgguugugucucucagcaauggcgucuccguguuaacguucaagguacuggaccuuaagaacuacaucgauaaacaauugcugccaauucuaaauaagcagucaugcaguaucagcaacauagagacuguuauugaauuucagcagaaaaauaacaggcuccuggagaucacccgggaguucucugugaaugccggugucacaacuccgguguccaccuauaugcuuacaaacucagaacuguugagccucauuaacgacaugcccaucaccaaugaucaaaagaaacugaugaguaacaaugugcagaucguccgccagcagucuuacuccauuauguguauaaucaaggaggaaguuuuagcauaugugguacaacugccucucuacggggugauugacacgccaugcuggaaacuucauacuagcccccuguguacaaccaacacuaaggagggaucgaauaucugcuugacacgaaccgaucguggcugguacugugacaacgcuggcucugucuccuuuuucccucaggccgaaacgugcaaggugcagucaaauagaguguuuugugauaccaugaacaguagaacacugccaagcgaggugaaucucugcaacauagacauuuucaaucccaaauaugauugcaagaucaugacuuccaaaaccgacgucucuagcucagugaucacaagucugggggcaauuguauccuguuacggaaagacuaaaugcaccgcuagcaacaagaauagggguaucauuaagacauuuucuaacggcugugauuauguuucaaauaaagggguggacaccgucagugugggaaacacucuuuacuaugucaacaagcaagagggcaaaagccuguacgugaagggugaaccuauaaucaauuucuaugacccauugguuuuuccguccgaugaguucgacgccucuauuucgcagguuaacgagaaaaucaaucagagccucgcguuuauccggaaguccgaugaacuguuacacaacguaaaugucgggaagucaacgacaaacauuaugauaaccacuaucauuaucgugauuaucguuauacugcuacuccugaucgccgugggacuuuucuuguacugcaaagcacgcugaggacuaguaauaaggaaacuguaugaaugucugugggcaggaagugaagagauccuucuguaaagguuuuuggaauuaugucugcugaauaauaaacuuuuuugaaauaauaaaucugguagaaaaaugagaucuaaaaaaaaaaaaaaaaaaaaaaaaaaaaaaaaaaaaaaaaaaaaaaaaaaaaaaaaaaaaaaaaugcaucccccccccccccccccccccccccccccccaaaggcucuuuucagagccaccagaauu

SEQ ID NO: 13856 - RNA, 1931 nt, Artificial Sequence
  mRNA product Design g-4 comprising derived and/or modified sequence from HRSV(Memphis-37)__AIY60640.1__F-del_DSCav1_mut0 (opt4)
gggagacuccugucgggcggaaguaggaggaguagaguuuaaaaacaguacucuuuuuccgguucgggacguaguugaagcaacgacaagccggauaaccgcucuugagacaggaagcuuaccauggagcugcccauccugaagaccaacgccaucaccaccauccuggccgccgugacccugugcuucgccagcagccagaacaucaccgaggaguucuaccagagcaccugcagcgccgugagcaagggcuaccugagcgcccugagaaccggcugguacaccagcgugaucaccaucgagcugagcaacaucaaggagaacaagugcaacggcaccgacgccaaggugaagcugaucaagcaggagcuggacaaguacaagaacgccgugaccgagcugcagcugcugaugcagagcacccccgccgccggcagcggcagcgccaucgccagcggcaucgccgugugcaaggugcugcaccuggagggcgaggugaacaagaucaagaacgcccugcugagcaccaacaaggccguggugagccugagcaacggcgugagcgugcugaccuucaaggugcuggaccugaagaacuacaucgacaagcagcugcugcccauccugaacaagcagagcugcagcaucagcaacaucgagaccgugaucgaguuccagcagaagaacaacagacugcuggagaucaccagagaguucagcgugaacgccggcgugaccacccccgugagcaccuacaugcugaccaacagcgagcugcugagccugaucaacgacaugcccaucaccaacgaccagaagaagcugaugagcaacaacgugcagaucgugagacagcagagcuacagcaucaugugcaucaucaaggaggaggugcuggccuacguggugcagcugccccuguacggcgugaucgacacccccugcuggaagcugcacaccagcccccugugcaccaccaacaccaaggagggcagcaacaucugccugaccagaaccgacagaggcugguacugcgacaacgccggcagcgugagcuucuucccccaggccgagaccugcaaggugcagagcaacagaguguucugcgacaccaugaacagcagaacccugcccagcgaggugaaccugugcaacaucgacaucuucaaccccaaguacgacugcaagaucaugaccagcaagaccgacgugagcagcagcgugaucaccagccugggcgccaucgugagcugcuacggcaagaccaagugcaccgccagcaacaagaacagaggcaucaucaagaccuucagcaacggcugcgacuacgugagcaacaagggcguggacaccgugagcgugggcaacacccuguacuacgugaacaagcaggagggcaagagccuguacgugaagggcgagcccaucaucaacuucuacgacccccugguguuccccagcgacgaguucgacgccagcaucagccaggugaacgagaagaucaaccagagccuggccuucaucagaaagagcgacgagcugcugcacaacgugaacgugggcaagagcaccaccaacaucaugaucaccaccaucaucaucgugaucaucgugauccugcugcugcugaucgccgugggccuguuccuguacugcaaggccagaugaggacuaguaauaaggaaacuguaugaaugucugugggcaggaagugaagagauccuucuguaaagguuuuuggaauuaugucugcugaauaauaaacuuuuuugaaauaauaaaucugguagaaaaaugagaucuaaaaaaaaaaaaaaaaaaaaaaaaaaaaaaaaaaaaaaaaaaaaaaaaaaaaaaaaaaaaaaaaugcaucccccccccccccccccccccccccccccccaaaggcucuuuucagagccaccagaauu

SEQ ID NO: 13857 - RNA, 1931 nt, Artificial Sequence
  mRNA product Design g-4 comprising derived and/or modified sequence from HRSV(Memphis-37)__AIY60640.1__F-del_DSCav1_mut0 (opt5)
gggagacuccugucgggcggaaguaggaggaguagaguuuaaaaacaguacucuuuuuccgguucgggacguaguugaagcaacgacaagccggauaaccgcucuugagacaggaagcuuaccauggagcugcccauccucaagaccaacgccauuacaacgauccuggcugccgugacccuuugcuucgcgagcucccagaauauuacagaagaguuuuaccaaucuaccuguagcgcugucuccaaaggcuaucugucugcccucagaacagggugguacaccagcguuaucacaauugaacuguccaacaucaaggagaauaaaugcaacggaaccgacgccaaggugaaacuuaucaagcaggaacuggauaaguauaaaaaugcugugacggagcuccagcugcugaugcagucuaccccugccgcuggcagcggguccgccauugcgagcggaaucgccgucuguaaggugcuccaccuggagggcgaaguuaacaaaauuaagaaugcccuucugucuacaaacaaagcuguggucucccucagcaauggggugucuguucugaccuucaaggugcuugaccugaagaacuacaucgauaaacaacuccugccgauucugaauaagcaguccugcagcaucucuaacauugagacagucaucgaauuucagcagaaaaauaaccggcuccuggagaucacccgcgaguucuccgugaaugcuggagugacgacacccgucagcaccuauaugcuuacaaacuccgaacugcucucucugauuaacgacaugccuaucaccaaugaucaaaagaaacuuaugagcaacaauguucagauugugagacagcaguccuacagcaucauguguauuaucaaggaggaagugcuggccuaugucgugcaacucccccuguacggcguuaucgacaccccuugcuggaaacugcauacaucuccccucuguacgaccaacacaaaggagggcuccaauauuugccugacccggacagaucgcgggugguacugugacaacgcgggaagcgugagcuuuuucccucaggccgaaaccugcaagguccagucuaauagaguguuuugugauacgaugaacuccagaacacugccgucugagguuaaucucugcaacaucgacauuuucaaucccaaauaugauugcaagaucaugaccagcaaaaccgacguguccagcucugucauuacaucccugggcgcuaucgugagcuguuacgggaagaccaaaugcacagccucuaacaagaaucggggaaucauuaagacguuuuccaacggcugugauuaugucagcaauaaagggguggacaccguuuccgugggaaacacacuuuacuaugucaacaagcaagagggcaaaucucuguacgugaagggcgaaccuaucauuaauuucuaugacccccucguuuuuccuagcgaugaguucgacgcuuccaucucucaggugaacgaaaagauuaaucagagccuggccuuuauccgcaaguccgaugagcugcuccacaacgucaauguggggaaaagcaccacaaacauuaugaucaccacgaucauuaucgugauuaucguuauucugcuucugcucaucgccgucggacuguuccuguacugcaaagcuagaugaggacuaguaauaaggaaacuguaugaaugucugugggcaggaagugaagagauccuucuguaaagguuuuuggaauuaugucugcugaauaauaaacuuuuuugaaauaauaaaucugguagaaaaaugagaucuaaaaaaaaaaaaaaaaaaaaaaaaaaaaaaaaaaaaaaaaaaaaaaaaaaaaaaaaaaaaaaaaugcaucccccccccccccccccccccccccccccccaaaggcucuuuucagagccaccagaauu

SEQ ID NO: 13858 - RNA, 1931 nt, Artificial Sequence
  mRNA product Design g-4 comprising derived and/or modified sequence from HRSV(Memphis-37)__AIY60640.1__F-del_DSCav1_mut0 (opt6)
gggagacuccugucgggcggaaguaggaggaguagaguuuaaaaacaguacucuuuuuccgguucgggacguaguugaagcaacgacaagccggauaaccgcucuugagacaggaagcuuaccauggaacucccaauacuuaaaacaaacgcaaucacaacaauacuagcugcagucacacuaugcuucgccucaucacaaaauauaacagaagaauuuuaucaaucaacaugcuccgcaguaucaaaaggauaucucucugcauuacgaacagguugguacaccucgguaauaacaauagaauuaucaaacauaaaagaaaauaaaugcaauggaaccgaugccaaaguaaaacuaaucaaacaagaacuugacaaauacaaaaacgcaguaacagaacuacaacuauuaaugcaaucaacaccagcagcagguucaggcuccgcaaucgcuucaggaauagccguuuguaaaguacuacacuuagaaggagaaguaaauaaaauaaaaaacgccuuacuaucaacaaacaaagcaguagucucccuuuccaacggaguaucagucuuaacuuuuaaaguacucgacuuaaaaaauuacaucgacaaacaacuacuacccauucuaaauaaacaaucaugcucaauaucaaacaucgaaacaguaaucgaauuucaacaaaaaaauaauagauuacuagaaauaacacgagaauuuuccguaaaugccggaguaacgaccccagucucaacauacauguuaacaaacucagaauuacuaucacucauuaacgauaugccaauaacaaaugaccaaaaaaaacuaaugucaaacaacguccaaauaguacgacaacaaucauacucuaucauguguauaauaaaagaagaaguuuuagcauacguaguacaacuaccacuuuacggagucauagacaccccaugcuggaaacuacacacaucacccuuauguacaacaaacaccaaagaagggucuaacauaugucucacuagaacagaucgaggcugguacugcgacaacgcaggaucaguuagcuuuuucccucaagccgaaaccuguaaaguacaauccaaucgaguauuuugcgacacuaugaacucuagaaccuuacccuccgaaguaaaccuauguaacauagacauauuuaaucccaaauaugauugcaaaaucaugacauccaaaacagauguaucaagcucuguaauaaccucacuaggagcaauaguuucaugcuaugguaaaacaaaaugcaccgccucaaacaaaaauagagggauaaucaaaaccuucucaaauggaugcgacuacguaucaaauaaaggaguagacaccgucuccguaggaaacacacuauacuacguaaacaaacaagaaggaaaaucacuauacguaaaaggagaaccaaucauaaacuucuacgacccacuuguuuucccaucagaugaauuugaugccuccauaucacaaguaaacgaaaaaauaaaccaaucucuagccuucaucagaaaauccgacgaacuuuuacacaacguaaacguagguaaaucaacaaccaacaucaugauaacaacaauaauaauaguaauaauuguaauacuuuuacuacuuaucgccguaggccuauucuuauauuguaaagcaagaugaggacuaguaauaaggaaacuguaugaaugucugugggcaggaagugaagagauccuucuguaaagguuuuuggaauuaugucugcugaauaauaaacuuuuuugaaauaauaaaucugguagaaaaaugagaucuaaaaaaaaaaaaaaaaaaaaaaaaaaaaaaaaaaaaaaaaaaaaaaaaaaaaaaaaaaaaaaaaugcaucccccccccccccccccccccccccccccccaaaggcucuuuucagagccaccagaauu

SEQ ID NO: 13859 - RNA, 1931 nt, Artificial Sequence
  mRNA product Design g-4 comprising derived and/or modified sequence from HRSV(Memphis-37)__AIY60640.1__F-del_DSCav1_mut0 (opt11)
gggagacuccugucgggcggaaguaggaggaguagaguuuaaaaacaguacucuuuuuccgguucgggacguaguugaagcaacgacaagccggauaaccgcucuugagacaggaagcuuaccauggaacuaccaauccucaaaaccaacgccaucacuacaauccuagccgcgguaacccugugcuucgccuccucacaaaacaucacagaagaauuuuaccaaucaaccugcuccgccguauccaaaggauaccugagcgcccugagaaccggcugguacaccuccgucaucaccauagaacucuccaacaucaaagaaaacaaaugcaacgguacggacgccaaaguuaaacucaucaaacaagaacuugacaaauacaagaacgccgucacagaacugcaacuccucaugcaauccacccccgccgccggcuccggcuccgccauagccuccggcaucgccgucugcaaagucuuacaccuagaaggcgaagucaacaaaaucaaaaacgcacuacuuuccacaaacaaagccgucgucucacucuccaacggcguauccguccucaccuucaaaguacuugaccucaaaaacuacaucgacaaacaacuacuccccauccugaacaaacaauccugcucaaucuccaacaucgaaaccguaaucgaguuccaacagaaaaauaaucgccuccuggagaucacccgcgaguucuccgucaaugcaggagucacaaccccaguaucaaccuacaugcucaccaacuccgaacuccugucgcucaucaacgacaugcccaucacaaacgaccaaaagaaacucauguccaacaacguacaaaucgucagacaacaauccuauucuauaaugugcaucaucaaagaagaaguccucgccuacgucguacaacucccccucuacggcguuaucgacacccccugcuggaaacuccacaccucaccccucugcaccaccaacacaaaagaaggcuccaacaucugccucacucggaccgaccgcggcugguacugcgacaaugccggcagcgucuccuucuucccacaagccgaaaccugcaaaguccaguccaaccgcguauucugcgacacuaugaacuccagaacccuccccuccgaaguaaaccucugcaacaucgacaucuucaacccaaaauacgacugcaaaaucaugaccucaaaaaccgacgucagcucgucagucauaaccagccucggagccauagucucaugcuacggaaaaaccaaaugcaccgccagcaacaaaaaccgcggcauaauaaaaacauucuccaacggcugcgacuauguauccaacaaaggagucgauaccgucuccguaggcaacacccuauacuacgucaacaaacaagaaggcaaaucccucuacgucaaaggugaaccaaucaucaacuucuacgacccucucgucuuccccuccgaugaguucgacgccucaaucagccaaguaaacgaaaagauaaaccaaucacucgccuucauccgcaaauccgacgaacuucuucacaacgucaacgucggcaaaucuaccaccaacauaaugauaaccaccaucaucaucgucaucaucguaauacuccuccuucucaucgccgucggccuauuccuauacugcaaagcccgcuagggacuaguaauaaggaaacuguaugaaugucugugggcaggaagugaagagauccuucuguaaagguuuuuggaauuaugucugcugaauaauaaacuuuuuugaaauaauaaaucugguagaaaaaugagaucuaaaaaaaaaaaaaaaaaaaaaaaaaaaaaaaaaaaaaaaaaaaaaaaaaaaaaaaaaaaaaaaaugcaucccccccccccccccccccccccccccccccaaaggcucuuuucagagccaccagaauu

SEQ ID NO: 13860 - RNA, 1907 nt, Artificial Sequence
  mRNA product Design g-5 comprising derived and/or modified sequence from HRSV(Memphis-37)__AIY60640.1__F-del_DSCav1_mut0 (opt1)
gggagacccgugacccggaaguuguacggcuacgcgacuuucccucccacaaacccucgcgcccuuccuuuccuacuugggcccggcagaaagcuuaccauggagcugcccauccucaagaccaacgccaucaccacgauccuggccgcggugacccugugcuucgccagcucccagaacaucaccgaggaguucuaccagagcacgugcuccgccgucagcaagggcuaccucuccgcccugcgcaccgggugguacaccagcgugaucaccaucgagcuguccaacaucaaggagaacaagugcaacggcaccgacgccaaggugaagcucaucaagcaggagcuggacaaguacaagaacgcggucacggagcugcagcuccugaugcagagcaccccggccgccggcuccgggagcgcgaucgccuccggcaucgccgucugcaaggugcugcaccucgagggcgaggugaacaagaucaagaacgcccugcuguccaccaacaaggccgucgugagccucuccaacggggugagcguccugaccuucaaggugcuggaccucaagaacuacaucgacaagcagcugcugcccauccugaacaagcagagcugcuccaucagcaacaucgagaccgucaucgaguuccagcagaagaacaaccgccuccuggagaucacgcgggaguucagcgugaacgcgggcgugaccacccccgucuccaccuacaugcugacgaacagcgagcuccugucccugaucaacgacaugccgaucaccaacgaccagaagaagcucaugagcaacaacgugcagaucgugcgccagcaguccuacagcaucaugugcaucaucaaggaggagguccuggccuacguggugcagcugccccucuacggggucaucgacacccccugcuggaagcugcacaccagcccccugugcacgaccaacaccaaggagggcuccaacaucugccucacccggacggaccgcgggugguacugcgacaacgccggcagcguguccuucuucccgcaggccgagaccugcaagguccagagcaaccggguguucugcgacaccaugaacucccggacccugcccagcgaggugaaccucugcaacaucgacaucuucaaccccaaguacgacugcaagaucaugacguccaagaccgacgucagcuccagcgugaucaccucccugggcgccaucgugagcugcuacgggaagaccaagugcacggcgagcaacaagaaccgcggcaucaucaagaccuucuccaacgggugcgacuacgucagcaacaagggcguggacaccguguccgucggcaacacccuguacuacgugaacaagcaggagggcaagagccucuacgugaagggggagcccaucaucaacuucuacgacccgcuggucuuccccuccgacgaguucgacgccagcaucucccaggugaacgagaagaucaaccagagccuggccuucauccggaaguccgacgagcuccugcacaacgugaacgucggcaagagcaccacgaacaucaugaucaccaccaucaucaucgugaucaucgugauccugcugcuccugaucgccgucgggcuguuccucuacugcaaggcccgcugaggacuaguaauaaggaaacuguaugaaugucugugggcaggaagugaagagauccuucuguaaagguuuuuggaauuaugucugcugaauaauaaacuuuuuugaaauaauaaaucugguagaaaaaugagaucuaaaaaaaaaaaaaaaaaaaaaaaaaaaaaaaaaaaaaaaaaaaaaaaaaaaaaaaaaaaaaaaaugcaucccccccccccccccccccccccccccccccaaaggcucuuuucagagccaccagaauu

SEQ ID NO: 13861 - RNA, 1907 nt, Artificial Sequence
  mRNA product Design g-5 comprising derived and/or modified sequence from HRSV(Memphis-37)__AIY60640.1__F-del_DSCav1_mut0 (opt1)
gggagacccgugacccggaaguuguacggcuacgcgacuuucccucccacaaacccucgcgcccuuccuuuccuacuugggcccggcagaaagcuuaccauggagcugcccauccucaagaccaacgccaucaccacgauccuggccgcggugacccugugcuucgccagcucccagaacaucaccgaggaguucuaccagagcacgugcuccgccgucagcaagggcuaccucuccgcccugcgcaccgggugguacaccagcgugaucaccaucgagcuguccaacaucaaggagaacaagugcaacggcaccgacgccaaggugaagcucaucaagcaggagcuggacaaguacaagaacgcggucacggagcugcagcuccugaugcagagcaccccggccgccggguccggcagcgccaucgcguccgggaucgccgugugcaaggugcugcaccucgagggcgaggucaacaagaucaagaacgcccugcugagcaccaacaaggccguggugucccucagcaacggcgucuccgugcugaccuucaaggugcuggaccucaagaacuacaucgacaagcagcugcugcccauccucaacaagcagagcugcuccaucagcaacaucgagacggucaucgaguuccagcagaagaacaaccggcugcuggagaucacccgcgaguucuccgugaacgccggggugaccacccccgucagcacguacaugcucaccaacagcgagcugcugucccucaucaacgacaugcccaucaccaacgaccagaagaagcugaugagcaacaacgugcagaucgugcggcagcaguccuacagcaucaugugcaucaucaaggaggagguccuggcguacguggugcagcucccgcuguacggcgucaucgacacccccugcuggaagcugcacacgagcccccucugcaccaccaacaccaaggagggguccaacaucugccugacgcgcaccgaccggggcugguacugcgacaacgccggguccgugagcuucuucccccaggccgagaccugcaaggugcaguccaaccgcgucuucugcgacaccaugaacagccggacgcucccguccgaggugaaccugugcaacaucgacaucuucaaccccaaguacgacugcaagaucaugaccagcaagaccgacgucuccagcuccgugaucaccagccugggcgccaucguguccugcuacggcaagacgaagugcaccgccagcaacaagaaccgggggaucaucaagaccuucuccaacggcugcgacuacgucagcaacaaggggguggacaccgugagcgucggcaacacgcucuacuacgugaacaagcaggagggcaagucccuguacgugaagggggagcccaucaucaacuucuacgacccccuggucuucccgagcgacgaguucgacgcguccaucagccaggugaacgagaagaucaaccagucccucgccuucauccgcaagagcgacgagcugcugcacaacgugaacgucggcaaguccaccaccaacaucaugaucaccaccaucaucaucgugaucaucgugauccuccugcugcucaucgccgucgggcuguuccuguacugcaaggcccggugaggacuaguaauaaggaaacuguaugaaugucugugggcaggaagugaagagauccuucuguaaagguuuuuggaauuaugucugcugaauaauaaacuuuuuugaaauaauaaaucugguagaaaaaugagaucuaaaaaaaaaaaaaaaaaaaaaaaaaaaaaaaaaaaaaaaaaaaaaaaaaaaaaaaaaaaaaaaaugcaucccccccccccccccccccccccccccccccaaaggcucuuuucagagccaccagaauu

SEQ ID NO: 13862 - RNA, 1907 nt, Artificial Sequence
  mRNA product Design g-5 comprising derived and/or modified sequence from HRSV(Memphis-37)__AIY60640.1__F-del_DSCav1_mut0 (opt2)
gggagacccgugacccggaaguuguacggcuacgcgacuuucccucccacaaacccucgcgcccuuccuuuccuacuugggcccggcagaaagcuuaccauggagcuccccauccucaagaccaacgccaucaccaccauccucgccgccgucacccucugcuucgccuccucccagaacaucaccgaggaguucuaccaguccaccugcuccgccgucuccaagggcuaccucuccgcccuccgcaccggcugguacaccuccgucaucaccaucgagcucuccaacaucaaggagaacaagugcaacggcaccgacgccaaggucaagcucaucaagcaggagcucgacaaguacaagaacgccgucaccgagcuccagcuccucaugcaguccacccccgccgccggcuccggcuccgccaucgccuccggcaucgccgucugcaagguccuccaccucgagggcgaggucaacaagaucaagaacgcccuccucuccaccaacaaggccgucgucucccucuccaacggcgucuccguccucaccuucaagguccucgaccucaagaacuacaucgacaagcagcuccuccccauccucaacaagcaguccugcuccaucuccaacaucgagaccgucaucgaguuccagcagaagaacaaccgccuccucgagaucacccgcgaguucuccgucaacgccggcgucaccacccccgucuccaccuacaugcucaccaacuccgagcuccucucccucaucaacgacaugcccaucaccaacgaccagaagaagcucauguccaacaacguccagaucguccgccagcaguccuacuccaucaugugcaucaucaaggaggagguccucgccuacgucguccagcucccccucuacggcgucaucgacacccccugcuggaagcuccacaccuccccccucugcaccaccaacaccaaggagggcuccaacaucugccucacccgcaccgaccgcggcugguacugcgacaacgccggcuccgucuccuucuucccccaggccgagaccugcaagguccaguccaaccgcgucuucugcgacaccaugaacucccgcacccuccccuccgaggucaaccucugcaacaucgacaucuucaaccccaaguacgacugcaagaucaugaccuccaagaccgacgucuccuccuccgucaucaccucccucggcgccaucgucuccugcuacggcaagaccaagugcaccgccuccaacaagaaccgcggcaucaucaagaccuucuccaacggcugcgacuacgucuccaacaagggcgucgacaccgucuccgucggcaacacccucuacuacgucaacaagcaggagggcaagucccucuacgucaagggcgagcccaucaucaacuucuacgacccccucgucuuccccuccgacgaguucgacgccuccaucucccaggucaacgagaagaucaaccagucccucgccuucauccgcaaguccgacgagcuccuccacaacgucaacgucggcaaguccaccaccaacaucaugaucaccaccaucaucaucgucaucaucgucauccuccuccuccucaucgccgucggccucuuccucuacugcaaggcccgcugaggacuaguaauaaggaaacuguaugaaugucugugggcaggaagugaagagauccuucuguaaagguuuuuggaauuaugucugcugaauaauaaacuuuuuugaaauaauaaaucugguagaaaaaugagaucuaaaaaaaaaaaaaaaaaaaaaaaaaaaaaaaaaaaaaaaaaaaaaaaaaaaaaaaaaaaaaaaaugcaucccccccccccccccccccccccccccccccaaaggcucuuuucagagccaccagaauu

SEQ ID NO: 13863 - RNA, 1907 nt, Artificial Sequence
  mRNA product Design g-5 comprising derived and/or modified sequence from HRSV(Memphis-37)__AIY60640.1__F-del_DSCav1_mut0 (opt3)
gggagacccgugacccggaaguuguacggcuacgcgacuuucccucccacaaacccucgcgcccuuccuuuccuacuugggcccggcagaaagcuuaccauggagcugcccauccucaagaccaacgccauuacaacuauacuugcugcagugacgcugugcuucgccagcucccagaauaucaccgaagaguuuuaccaaucuacauguucagcggucaguaaaggcuauuugagcgcuuuaagaacugggugguacaccuccguuauuacaaucgaacugucuaacauuaaggagaauaaaugcaacggaaccgacgccaaggugaaacuaaucaagcaggaacucgauaaguauaaaaaugcaguaacugagcugcagcuucugaugcagucgaccccugccgcugguucaggcagcgcaauagccagugggaucgcuguguguaaggucuugcaccucgagggagaagugaacaaaauuaagaaugcccugcuguccacaaacaaagcgguugugucucucagcaauggcgucuccguguuaacguucaagguacuggaccuuaagaacuacaucgauaaacaauugcugccaauucuaaauaagcagucaugcaguaucagcaacauagagacuguuauugaauuucagcagaaaaauaacaggcuccuggagaucacccgggaguucucugugaaugccggugucacaacuccgguguccaccuauaugcuuacaaacucagaacuguugagccucauuaacgacaugcccaucaccaaugaucaaaagaaacugaugaguaacaaugugcagaucguccgccagcagucuuacuccauuauguguauaaucaaggaggaaguuuuagcauaugugguacaacugccucucuacggggugauugacacgccaugcuggaaacuucauacuagcccccuguguacaaccaacacuaaggagggaucgaauaucugcuugacacgaaccgaucguggcugguacugugacaacgcuggcucugucuccuuuuucccucaggccgaaacgugcaaggugcagucaaauagaguguuuugugauaccaugaacaguagaacacugccaagcgaggugaaucucugcaacauagacauuuucaaucccaaauaugauugcaagaucaugacuuccaaaaccgacgucucuagcucagugaucacaagucugggggcaauuguauccuguuacggaaagacuaaaugcaccgcuagcaacaagaauagggguaucauuaagacauuuucuaacggcugugauuauguuucaaauaaagggguggacaccgucagugugggaaacacucuuuacuaugucaacaagcaagagggcaaaagccuguacgugaagggugaaccuauaaucaauuucuaugacccauugguuuuuccguccgaugaguucgacgccucuauuucgcagguuaacgagaaaaucaaucagagccucgcguuuauccggaaguccgaugaacuguuacacaacguaaaugucgggaagucaacgacaaacauuaugauaaccacuaucauuaucgugauuaucguuauacugcuacuccugaucgccgugggacuuuucuuguacugcaaagcacgcugaggacuaguaauaaggaaacuguaugaaugucugugggcaggaagugaagagauccuucuguaaagguuuuuggaauuaugucugcugaauaauaaacuuuuuugaaauaauaaaucugguagaaaaaugagaucuaaaaaaaaaaaaaaaaaaaaaaaaaaaaaaaaaaaaaaaaaaaaaaaaaaaaaaaaaaaaaaaaugcaucccccccccccccccccccccccccccccccaaaggcucuuuucagagccaccagaauu

SEQ ID NO: 13864 - RNA, 1907 nt, Artificial Sequence
  mRNA product Design g-5 comprising derived and/or modified sequence from HRSV(Memphis-37)__AIY60640.1__F-del_DSCav1_mut0 (opt4)
gggagacccgugacccggaaguuguacggcuacgcgacuuucccucccacaaacccucgcgcccuuccuuuccuacuugggcccggcagaaagcuuaccauggagcugcccauccugaagaccaacgccaucaccaccauccuggccgccgugacccugugcuucgccagcagccagaacaucaccgaggaguucuaccagagcaccugcagcgccgugagcaagggcuaccugagcgcccugagaaccggcugguacaccagcgugaucaccaucgagcugagcaacaucaaggagaacaagugcaacggcaccgacgccaaggugaagcugaucaagcaggagcuggacaaguacaagaacgccgugaccgagcugcagcugcugaugcagagcacccccgccgccggcagcggcagcgccaucgccagcggcaucgccgugugcaaggugcugcaccuggagggcgaggugaacaagaucaagaacgcccugcugagcaccaacaaggccguggugagccugagcaacggcgugagcgugcugaccuucaaggugcuggaccugaagaacuacaucgacaagcagcugcugcccauccugaacaagcagagcugcagcaucagcaacaucgagaccgugaucgaguuccagcagaagaacaacagacugcuggagaucaccagagaguucagcgugaacgccggcgugaccacccccgugagcaccuacaugcugaccaacagcgagcugcugagccugaucaacgacaugcccaucaccaacgaccagaagaagcugaugagcaacaacgugcagaucgugagacagcagagcuacagcaucaugugcaucaucaaggaggaggugcuggccuacguggugcagcugccccuguacggcgugaucgacacccccugcuggaagcugcacaccagcccccugugcaccaccaacaccaaggagggcagcaacaucugccugaccagaaccgacagaggcugguacugcgacaacgccggcagcgugagcuucuucccccaggccgagaccugcaaggugcagagcaacagaguguucugcgacaccaugaacagcagaacccugcccagcgaggugaaccugugcaacaucgacaucuucaaccccaaguacgacugcaagaucaugaccagcaagaccgacgugagcagcagcgugaucaccagccugggcgccaucgugagcugcuacggcaagaccaagugcaccgccagcaacaagaacagaggcaucaucaagaccuucagcaacggcugcgacuacgugagcaacaagggcguggacaccgugagcgugggcaacacccuguacuacgugaacaagcaggagggcaagagccuguacgugaagggcgagcccaucaucaacuucuacgacccccugguguuccccagcgacgaguucgacgccagcaucagccaggugaacgagaagaucaaccagagccuggccuucaucagaaagagcgacgagcugcugcacaacgugaacgugggcaagagcaccaccaacaucaugaucaccaccaucaucaucgugaucaucgugauccugcugcugcugaucgccgugggccuguuccuguacugcaaggccagaugaggacuaguaauaaggaaacuguaugaaugucugugggcaggaagugaagagauccuucuguaaagguuuuuggaauuaugucugcugaauaauaaacuuuuuugaaauaauaaaucugguagaaaaaugagaucuaaaaaaaaaaaaaaaaaaaaaaaaaaaaaaaaaaaaaaaaaaaaaaaaaaaaaaaaaaaaaaaaugcaucccccccccccccccccccccccccccccccaaaggcucuuuucagagccaccagaauu

SEQ ID NO: 13865 - RNA, 1907 nt, Artificial Sequence
  mRNA product Design g-5 comprising derived and/or modified sequence from HRSV(Memphis-37)__AIY60640.1__F-del_DSCav1_mut0 (opt5)
gggagacccgugacccggaaguuguacggcuacgcgacuuucccucccacaaacccucgcgcccuuccuuuccuacuugggcccggcagaaagcuuaccauggagcugcccauccucaagaccaacgccauuacaacgauccuggcugccgugacccuuugcuucgcgagcucccagaauauuacagaagaguuuuaccaaucuaccuguagcgcugucuccaaaggcuaucugucugcccucagaacagggugguacaccagcguuaucacaauugaacuguccaacaucaaggagaauaaaugcaacggaaccgacgccaaggugaaacuuaucaagcaggaacuggauaaguauaaaaaugcugugacggagcuccagcugcugaugcagucuaccccugccgcuggcagcggguccgccauugcgagcggaaucgccgucuguaaggugcuccaccuggagggcgaaguuaacaaaauuaagaaugcccuucugucuacaaacaaagcuguggucucccucagcaauggggugucuguucugaccuucaaggugcuugaccugaagaacuacaucgauaaacaacuccugccgauucugaauaagcaguccugcagcaucucuaacauugagacagucaucgaauuucagcagaaaaauaaccggcuccuggagaucacccgcgaguucuccgugaaugcuggagugacgacacccgucagcaccuauaugcuuacaaacuccgaacugcucucucugauuaacgacaugccuaucaccaaugaucaaaagaaacuuaugagcaacaauguucagauugugagacagcaguccuacagcaucauguguauuaucaaggaggaagugcuggccuaugucgugcaacucccccuguacggcguuaucgacaccccuugcuggaaacugcauacaucuccccucuguacgaccaacacaaaggagggcuccaauauuugccugacccggacagaucgcgggugguacugugacaacgcgggaagcgugagcuuuuucccucaggccgaaaccugcaagguccagucuaauagaguguuuugugauacgaugaacuccagaacacugccgucugagguuaaucucugcaacaucgacauuuucaaucccaaauaugauugcaagaucaugaccagcaaaaccgacguguccagcucugucauuacaucccugggcgcuaucgugagcuguuacgggaagaccaaaugcacagccucuaacaagaaucggggaaucauuaagacguuuuccaacggcugugauuaugucagcaauaaagggguggacaccguuuccgugggaaacacacuuuacuaugucaacaagcaagagggcaaaucucuguacgugaagggcgaaccuaucauuaauuucuaugacccccucguuuuuccuagcgaugaguucgacgcuuccaucucucaggugaacgaaaagauuaaucagagccuggccuuuauccgcaaguccgaugagcugcuccacaacgucaauguggggaaaagcaccacaaacauuaugaucaccacgaucauuaucgugauuaucguuauucugcuucugcucaucgccgucggacuguuccuguacugcaaagcuagaugaggacuaguaauaaggaaacuguaugaaugucugugggcaggaagugaagagauccuucuguaaagguuuuuggaauuaugucugcugaauaauaaacuuuuuugaaauaauaaaucugguagaaaaaugagaucuaaaaaaaaaaaaaaaaaaaaaaaaaaaaaaaaaaaaaaaaaaaaaaaaaaaaaaaaaaaaaaaaugcaucccccccccccccccccccccccccccccccaaaggcucuuuucagagccaccagaauu

SEQ ID NO: 13866 - RNA, 1907 nt, Artificial Sequence
  mRNA product Design g-5 comprising derived and/or modified sequence from HRSV(Memphis-37)__AIY60640.1__F-del_DSCav1_mut0 (opt6)
gggagacccgugacccggaaguuguacggcuacgcgacuuucccucccacaaacccucgcgcccuuccuuuccuacuugggcccggcagaaagcuuaccauggaacucccaauacuuaaaacaaacgcaaucacaacaauacuagcugcagucacacuaugcuucgccucaucacaaaauauaacagaagaauuuuaucaaucaacaugcuccgcaguaucaaaaggauaucucucugcauuacgaacagguugguacaccucgguaauaacaauagaauuaucaaacauaaaagaaaauaaaugcaauggaaccgaugccaaaguaaaacuaaucaaacaagaacuugacaaauacaaaaacgcaguaacagaacuacaacuauuaaugcaaucaacaccagcagcagguucaggcuccgcaaucgcuucaggaauagccguuuguaaaguacuacacuuagaaggagaaguaaauaaaauaaaaaacgccuuacuaucaacaaacaaagcaguagucucccuuuccaacggaguaucagucuuaacuuuuaaaguacucgacuuaaaaaauuacaucgacaaacaacuacuacccauucuaaauaaacaaucaugcucaauaucaaacaucgaaacaguaaucgaauuucaacaaaaaaauaauagauuacuagaaauaacacgagaauuuuccguaaaugccggaguaacgaccccagucucaacauacauguuaacaaacucagaauuacuaucacucauuaacgauaugccaauaacaaaugaccaaaaaaaacuaaugucaaacaacguccaaauaguacgacaacaaucauacucuaucauguguauaauaaaagaagaaguuuuagcauacguaguacaacuaccacuuuacggagucauagacaccccaugcuggaaacuacacacaucacccuuauguacaacaaacaccaaagaagggucuaacauaugucucacuagaacagaucgaggcugguacugcgacaacgcaggaucaguuagcuuuuucccucaagccgaaaccuguaaaguacaauccaaucgaguauuuugcgacacuaugaacucuagaaccuuacccuccgaaguaaaccuauguaacauagacauauuuaaucccaaauaugauugcaaaaucaugacauccaaaacagauguaucaagcucuguaauaaccucacuaggagcaauaguuucaugcuaugguaaaacaaaaugcaccgccucaaacaaaaauagagggauaaucaaaaccuucucaaauggaugcgacuacguaucaaauaaaggaguagacaccgucuccguaggaaacacacuauacuacguaaacaaacaagaaggaaaaucacuauacguaaaaggagaaccaaucauaaacuucuacgacccacuuguuuucccaucagaugaauuugaugccuccauaucacaaguaaacgaaaaaauaaaccaaucucuagccuucaucagaaaauccgacgaacuuuuacacaacguaaacguagguaaaucaacaaccaacaucaugauaacaacaauaauaauaguaauaauuguaauacuuuuacuacuuaucgccguaggccuauucuuauauuguaaagcaagaugaggacuaguaauaaggaaacuguaugaaugucugugggcaggaagugaagagauccuucuguaaagguuuuuggaauuaugucugcugaauaauaaacuuuuuugaaauaauaaaucugguagaaaaaugagaucuaaaaaaaaaaaaaaaaaaaaaaaaaaaaaaaaaaaaaaaaaaaaaaaaaaaaaaaaaaaaaaaaugcaucccccccccccccccccccccccccccccccaaaggcucuuuucagagccaccagaauu

SEQ ID NO: 13867 - RNA, 1907 nt, Artificial Sequence
  mRNA product Design g-5 comprising derived and/or modified sequence from HRSV(Memphis-37)__AIY60640.1__F-del_DSCav1_mut0 (opt11)
gggagacccgugacccggaaguuguacggcuacgcgacuuucccucccacaaacccucgcgcccuuccuuuccuacuugggcccggcagaaagcuuaccauggaacuaccaauccucaaaaccaacgccaucacuacaauccuagccgcgguaacccugugcuucgccuccucacaaaacaucacagaagaauuuuaccaaucaaccugcuccgccguauccaaaggauaccugagcgcccugagaaccggcugguacaccuccgucaucaccauagaacucuccaacaucaaagaaaacaaaugcaacgguacggacgccaaaguuaaacucaucaaacaagaacuugacaaauacaagaacgccgucacagaacugcaacuccucaugcaauccacccccgccgccggcuccggcuccgccauagccuccggcaucgccgucugcaaagucuuacaccuagaaggcgaagucaacaaaaucaaaaacgcacuacuuuccacaaacaaagccgucgucucacucuccaacggcguauccguccucaccuucaaaguacuugaccucaaaaacuacaucgacaaacaacuacuccccauccugaacaaacaauccugcucaaucuccaacaucgaaaccguaaucgaguuccaacagaaaaauaaucgccuccuggagaucacccgcgaguucuccgucaaugcaggagucacaaccccaguaucaaccuacaugcucaccaacuccgaacuccugucgcucaucaacgacaugcccaucacaaacgaccaaaagaaacucauguccaacaacguacaaaucgucagacaacaauccuauucuauaaugugcaucaucaaagaagaaguccucgccuacgucguacaacucccccucuacggcguuaucgacacccccugcuggaaacuccacaccucaccccucugcaccaccaacacaaaagaaggcuccaacaucugccucacucggaccgaccgcggcugguacugcgacaaugccggcagcgucuccuucuucccacaagccgaaaccugcaaaguccaguccaaccgcguauucugcgacacuaugaacuccagaacccuccccuccgaaguaaaccucugcaacaucgacaucuucaacccaaaauacgacugcaaaaucaugaccucaaaaaccgacgucagcucgucagucauaaccagccucggagccauagucucaugcuacggaaaaaccaaaugcaccgccagcaacaaaaaccgcggcauaauaaaaacauucuccaacggcugcgacuauguauccaacaaaggagucgauaccgucuccguaggcaacacccuauacuacgucaacaaacaagaaggcaaaucccucuacgucaaaggugaaccaaucaucaacuucuacgacccucucgucuuccccuccgaugaguucgacgccucaaucagccaaguaaacgaaaagauaaaccaaucacucgccuucauccgcaaauccgacgaacuucuucacaacgucaacgucggcaaaucuaccaccaacauaaugauaaccaccaucaucaucgucaucaucguaauacuccuccuucucaucgccgucggccuauuccuauacugcaaagcccgcuagggacuaguaauaaggaaacuguaugaaugucugugggcaggaagugaagagauccuucuguaaagguuuuuggaauuaugucugcugaauaauaaacuuuuuugaaauaauaaaucugguagaaaaaugagaucuaaaaaaaaaaaaaaaaaaaaaaaaaaaaaaaaaaaaaaaaaaaaaaaaaaaaaaaaaaaaaaaaugcaucccccccccccccccccccccccccccccccaaaggcucuuuucagagccaccagaauu

SEQ ID NO: 13868 - RNA, 1923 nt, Artificial Sequence
  mRNA product Design h-1 comprising derived and/or modified sequence from HRSV(Memphis-37)__AIY60640.1__F-del_DSCav1_mut0 (opt1)
gggagacccgugacccggaaguuguacggcuacgcgacuuucccucccacaaacccucgcgcccuuccuuuccuacuugggcccggcagaaagcuuaccauggagcugcccauccucaagaccaacgccaucaccacgauccuggccgcggugacccugugcuucgccagcucccagaacaucaccgaggaguucuaccagagcacgugcuccgccgucagcaagggcuaccucuccgcccugcgcaccgggugguacaccagcgugaucaccaucgagcuguccaacaucaaggagaacaagugcaacggcaccgacgccaaggugaagcucaucaagcaggagcuggacaaguacaagaacgcggucacggagcugcagcuccugaugcagagcaccccggccgccggcuccgggagcgcgaucgccuccggcaucgccgucugcaaggugcugcaccucgagggcgaggugaacaagaucaagaacgcccugcuguccaccaacaaggccgucgugagccucuccaacggggugagcguccugaccuucaaggugcuggaccucaagaacuacaucgacaagcagcugcugcccauccugaacaagcagagcugcuccaucagcaacaucgagaccgucaucgaguuccagcagaagaacaaccgccuccuggagaucacgcgggaguucagcgugaacgcgggcgugaccacccccgucuccaccuacaugcugacgaacagcgagcuccugucccugaucaacgacaugccgaucaccaacgaccagaagaagcucaugagcaacaacgugcagaucgugcgccagcaguccuacagcaucaugugcaucaucaaggaggagguccuggccuacguggugcagcugccccucuacggggucaucgacacccccugcuggaagcugcacaccagcccccugugcacgaccaacaccaaggagggcuccaacaucugccucacccggacggaccgcgggugguacugcgacaacgccggcagcguguccuucuucccgcaggccgagaccugcaagguccagagcaaccggguguucugcgacaccaugaacucccggacccugcccagcgaggugaaccucugcaacaucgacaucuucaaccccaaguacgacugcaagaucaugacguccaagaccgacgucagcuccagcgugaucaccucccugggcgccaucgugagcugcuacgggaagaccaagugcacggcgagcaacaagaaccgcggcaucaucaagaccuucuccaacgggugcgacuacgucagcaacaagggcguggacaccguguccgucggcaacacccuguacuacgugaacaagcaggagggcaagagccucuacgugaagggggagcccaucaucaacuucuacgacccgcuggucuuccccuccgacgaguucgacgccagcaucucccaggugaacgagaagaucaaccagagccuggccuucauccggaaguccgacgagcuccugcacaacgugaacgucggcaagagcaccacgaacaucaugaucaccaccaucaucaucgugaucaucgugauccugcugcuccugaucgccgucgggcuguuccucuacugcaaggcccgcugaggacuaguacuggcugcaucucccuuuccucuguccuccauccuucucccaggauggugaagggggaccugguacccagugauccccaccccaggauccuaaaucaugacuuaccugcuaauaaaaacucauuggaaaagugagaagaucuaaaaaaaaaaaaaaaaaaaaaaaaaaaaaaaaaaaaaaaaaaaaaaaaaaaaaaaaaaaaaaaaugcaucccccccccccccccccccccccccccccccaaaggcucuuuucagagccaccagaauu

SEQ ID NO: 13869 - RNA, 1923 nt, Artificial Sequence
  mRNA product Design h-1 comprising derived and/or modified sequence from HRSV(Memphis-37)__AIY60640.1__F-del_DSCav1_mut0 (opt1)
gggagacccgugacccggaaguuguacggcuacgcgacuuucccucccacaaacccucgcgcccuuccuuuccuacuugggcccggcagaaagcuuaccauggagcugcccauccucaagaccaacgccaucaccacgauccuggccgcggugacccugugcuucgccagcucccagaacaucaccgaggaguucuaccagagcacgugcuccgccgucagcaagggcuaccucuccgcccugcgcaccgggugguacaccagcgugaucaccaucgagcuguccaacaucaaggagaacaagugcaacggcaccgacgccaaggugaagcucaucaagcaggagcuggacaaguacaagaacgcggucacggagcugcagcuccugaugcagagcaccccggccgccggguccggcagcgccaucgcguccgggaucgccgugugcaaggugcugcaccucgagggcgaggucaacaagaucaagaacgcccugcugagcaccaacaaggccguggugucccucagcaacggcgucuccgugcugaccuucaaggugcuggaccucaagaacuacaucgacaagcagcugcugcccauccucaacaagcagagcugcuccaucagcaacaucgagacggucaucgaguuccagcagaagaacaaccggcugcuggagaucacccgcgaguucuccgugaacgccggggugaccacccccgucagcacguacaugcucaccaacagcgagcugcugucccucaucaacgacaugcccaucaccaacgaccagaagaagcugaugagcaacaacgugcagaucgugcggcagcaguccuacagcaucaugugcaucaucaaggaggagguccuggcguacguggugcagcucccgcuguacggcgucaucgacacccccugcuggaagcugcacacgagcccccucugcaccaccaacaccaaggagggguccaacaucugccugacgcgcaccgaccggggcugguacugcgacaacgccggguccgugagcuucuucccccaggccgagaccugcaaggugcaguccaaccgcgucuucugcgacaccaugaacagccggacgcucccguccgaggugaaccugugcaacaucgacaucuucaaccccaaguacgacugcaagaucaugaccagcaagaccgacgucuccagcuccgugaucaccagccugggcgccaucguguccugcuacggcaagacgaagugcaccgccagcaacaagaaccgggggaucaucaagaccuucuccaacggcugcgacuacgucagcaacaaggggguggacaccgugagcgucggcaacacgcucuacuacgugaacaagcaggagggcaagucccuguacgugaagggggagcccaucaucaacuucuacgacccccuggucuucccgagcgacgaguucgacgcguccaucagccaggugaacgagaagaucaaccagucccucgccuucauccgcaagagcgacgagcugcugcacaacgugaacgucggcaaguccaccaccaacaucaugaucaccaccaucaucaucgugaucaucgugauccuccugcugcucaucgccgucgggcuguuccuguacugcaaggcccggugaggacuaguacuggcugcaucucccuuuccucuguccuccauccuucucccaggauggugaagggggaccugguacccagugauccccaccccaggauccuaaaucaugacuuaccugcuaauaaaaacucauuggaaaagugagaagaucuaaaaaaaaaaaaaaaaaaaaaaaaaaaaaaaaaaaaaaaaaaaaaaaaaaaaaaaaaaaaaaaaugcaucccccccccccccccccccccccccccccccaaaggcucuuuucagagccaccagaauu

SEQ ID NO: 13870 - RNA, 1923 nt, Artificial Sequence
  mRNA product Design h-1 comprising derived and/or modified sequence from HRSV(Memphis-37)__AIY60640.1__F-del_DSCav1_mut0 (opt2)
gggagacccgugacccggaaguuguacggcuacgcgacuuucccucccacaaacccucgcgcccuuccuuuccuacuugggcccggcagaaagcuuaccauggagcuccccauccucaagaccaacgccaucaccaccauccucgccgccgucacccucugcuucgccuccucccagaacaucaccgaggaguucuaccaguccaccugcuccgccgucuccaagggcuaccucuccgcccuccgcaccggcugguacaccuccgucaucaccaucgagcucuccaacaucaaggagaacaagugcaacggcaccgacgccaaggucaagcucaucaagcaggagcucgacaaguacaagaacgccgucaccgagcuccagcuccucaugcaguccacccccgccgccggcuccggcuccgccaucgccuccggcaucgccgucugcaagguccuccaccucgagggcgaggucaacaagaucaagaacgcccuccucuccaccaacaaggccgucgucucccucuccaacggcgucuccguccucaccuucaagguccucgaccucaagaacuacaucgacaagcagcuccuccccauccucaacaagcaguccugcuccaucuccaacaucgagaccgucaucgaguuccagcagaagaacaaccgccuccucgagaucacccgcgaguucuccgucaacgccggcgucaccacccccgucuccaccuacaugcucaccaacuccgagcuccucucccucaucaacgacaugcccaucaccaacgaccagaagaagcucauguccaacaacguccagaucguccgccagcaguccuacuccaucaugugcaucaucaaggaggagguccucgccuacgucguccagcucccccucuacggcgucaucgacacccccugcuggaagcuccacaccuccccccucugcaccaccaacaccaaggagggcuccaacaucugccucacccgcaccgaccgcggcugguacugcgacaacgccggcuccgucuccuucuucccccaggccgagaccugcaagguccaguccaaccgcgucuucugcgacaccaugaacucccgcacccuccccuccgaggucaaccucugcaacaucgacaucuucaaccccaaguacgacugcaagaucaugaccuccaagaccgacgucuccuccuccgucaucaccucccucggcgccaucgucuccugcuacggcaagaccaagugcaccgccuccaacaagaaccgcggcaucaucaagaccuucuccaacggcugcgacuacgucuccaacaagggcgucgacaccgucuccgucggcaacacccucuacuacgucaacaagcaggagggcaagucccucuacgucaagggcgagcccaucaucaacuucuacgacccccucgucuuccccuccgacgaguucgacgccuccaucucccaggucaacgagaagaucaaccagucccucgccuucauccgcaaguccgacgagcuccuccacaacgucaacgucggcaaguccaccaccaacaucaugaucaccaccaucaucaucgucaucaucgucauccuccuccuccucaucgccgucggccucuuccucuacugcaaggcccgcugaggacuaguacuggcugcaucucccuuuccucuguccuccauccuucucccaggauggugaagggggaccugguacccagugauccccaccccaggauccuaaaucaugacuuaccugcuaauaaaaacucauuggaaaagugagaagaucuaaaaaaaaaaaaaaaaaaaaaaaaaaaaaaaaaaaaaaaaaaaaaaaaaaaaaaaaaaaaaaaaugcaucccccccccccccccccccccccccccccccaaaggcucuuuucagagccaccagaauu

SEQ ID NO: 13871 - RNA, 1923 nt, Artificial Sequence
  mRNA product Design h-1 comprising derived and/or modified sequence from HRSV(Memphis-37)__AIY60640.1__F-del_DSCav1_mut0 (opt3)
gggagacccgugacccggaaguuguacggcuacgcgacuuucccucccacaaacccucgcgcccuuccuuuccuacuugggcccggcagaaagcuuaccauggagcugcccauccucaagaccaacgccauuacaacuauacuugcugcagugacgcugugcuucgccagcucccagaauaucaccgaagaguuuuaccaaucuacauguucagcggucaguaaaggcuauuugagcgcuuuaagaacugggugguacaccuccguuauuacaaucgaacugucuaacauuaaggagaauaaaugcaacggaaccgacgccaaggugaaacuaaucaagcaggaacucgauaaguauaaaaaugcaguaacugagcugcagcuucugaugcagucgaccccugccgcugguucaggcagcgcaauagccagugggaucgcuguguguaaggucuugcaccucgagggagaagugaacaaaauuaagaaugcccugcuguccacaaacaaagcgguugugucucucagcaauggcgucuccguguuaacguucaagguacuggaccuuaagaacuacaucgauaaacaauugcugccaauucuaaauaagcagucaugcaguaucagcaacauagagacuguuauugaauuucagcagaaaaauaacaggcuccuggagaucacccgggaguucucugugaaugccggugucacaacuccgguguccaccuauaugcuuacaaacucagaacuguugagccucauuaacgacaugcccaucaccaaugaucaaaagaaacugaugaguaacaaugugcagaucguccgccagcagucuuacuccauuauguguauaaucaaggaggaaguuuuagcauaugugguacaacugccucucuacggggugauugacacgccaugcuggaaacuucauacuagcccccuguguacaaccaacacuaaggagggaucgaauaucugcuugacacgaaccgaucguggcugguacugugacaacgcuggcucugucuccuuuuucccucaggccgaaacgugcaaggugcagucaaauagaguguuuugugauaccaugaacaguagaacacugccaagcgaggugaaucucugcaacauagacauuuucaaucccaaauaugauugcaagaucaugacuuccaaaaccgacgucucuagcucagugaucacaagucugggggcaauuguauccuguuacggaaagacuaaaugcaccgcuagcaacaagaauagggguaucauuaagacauuuucuaacggcugugauuauguuucaaauaaagggguggacaccgucagugugggaaacacucuuuacuaugucaacaagcaagagggcaaaagccuguacgugaagggugaaccuauaaucaauuucuaugacccauugguuuuuccguccgaugaguucgacgccucuauuucgcagguuaacgagaaaaucaaucagagccucgcguuuauccggaaguccgaugaacuguuacacaacguaaaugucgggaagucaacgacaaacauuaugauaaccacuaucauuaucgugauuaucguuauacugcuacuccugaucgccgugggacuuuucuuguacugcaaagcacgcugaggacuaguacuggcugcaucucccuuuccucuguccuccauccuucucccaggauggugaagggggaccugguacccagugauccccaccccaggauccuaaaucaugacuuaccugcuaauaaaaacucauuggaaaagugagaagaucuaaaaaaaaaaaaaaaaaaaaaaaaaaaaaaaaaaaaaaaaaaaaaaaaaaaaaaaaaaaaaaaaugcaucccccccccccccccccccccccccccccccaaaggcucuuuucagagccaccagaauu

SEQ ID NO: 13872 - RNA, 1923 nt, Artificial Sequence
  mRNA product Design h-1 comprising derived and/or modified sequence from HRSV(Memphis-37)__AIY60640.1__F-del_DSCav1_mut0 (opt4)
gggagacccgugacccggaaguuguacggcuacgcgacuuucccucccacaaacccucgcgcccuuccuuuccuacuugggcccggcagaaagcuuaccauggagcugcccauccugaagaccaacgccaucaccaccauccuggccgccgugacccugugcuucgccagcagccagaacaucaccgaggaguucuaccagagcaccugcagcgccgugagcaagggcuaccugagcgcccugagaaccggcugguacaccagcgugaucaccaucgagcugagcaacaucaaggagaacaagugcaacggcaccgacgccaaggugaagcugaucaagcaggagcuggacaaguacaagaacgccgugaccgagcugcagcugcugaugcagagcacccccgccgccggcagcggcagcgccaucgccagcggcaucgccgugugcaaggugcugcaccuggagggcgaggugaacaagaucaagaacgcccugcugagcaccaacaaggccguggugagccugagcaacggcgugagcgugcugaccuucaaggugcuggaccugaagaacuacaucgacaagcagcugcugcccauccugaacaagcagagcugcagcaucagcaacaucgagaccgugaucgaguuccagcagaagaacaacagacugcuggagaucaccagagaguucagcgugaacgccggcgugaccacccccgugagcaccuacaugcugaccaacagcgagcugcugagccugaucaacgacaugcccaucaccaacgaccagaagaagcugaugagcaacaacgugcagaucgugagacagcagagcuacagcaucaugugcaucaucaaggaggaggugcuggccuacguggugcagcugccccuguacggcgugaucgacacccccugcuggaagcugcacaccagcccccugugcaccaccaacaccaaggagggcagcaacaucugccugaccagaaccgacagaggcugguacugcgacaacgccggcagcgugagcuucuucccccaggccgagaccugcaaggugcagagcaacagaguguucugcgacaccaugaacagcagaacccugcccagcgaggugaaccugugcaacaucgacaucuucaaccccaaguacgacugcaagaucaugaccagcaagaccgacgugagcagcagcgugaucaccagccugggcgccaucgugagcugcuacggcaagaccaagugcaccgccagcaacaagaacagaggcaucaucaagaccuucagcaacggcugcgacuacgugagcaacaagggcguggacaccgugagcgugggcaacacccuguacuacgugaacaagcaggagggcaagagccuguacgugaagggcgagcccaucaucaacuucuacgacccccugguguuccccagcgacgaguucgacgccagcaucagccaggugaacgagaagaucaaccagagccuggccuucaucagaaagagcgacgagcugcugcacaacgugaacgugggcaagagcaccaccaacaucaugaucaccaccaucaucaucgugaucaucgugauccugcugcugcugaucgccgugggccuguuccuguacugcaaggccagaugaggacuaguacuggcugcaucucccuuuccucuguccuccauccuucucccaggauggugaagggggaccugguacccagugauccccaccccaggauccuaaaucaugacuuaccugcuaauaaaaacucauuggaaaagugagaagaucuaaaaaaaaaaaaaaaaaaaaaaaaaaaaaaaaaaaaaaaaaaaaaaaaaaaaaaaaaaaaaaaaugcaucccccccccccccccccccccccccccccccaaaggcucuuuucagagccaccagaauu

SEQ ID NO: 13873 - RNA, 1923 nt, Artificial Sequence
  mRNA product Design h-1 comprising derived and/or modified sequence from HRSV(Memphis-37)__AIY60640.1__F-del_DSCav1_mut0 (opt5)
gggagacccgugacccggaaguuguacggcuacgcgacuuucccucccacaaacccucgcgcccuuccuuuccuacuugggcccggcagaaagcuuaccauggagcugcccauccucaagaccaacgccauuacaacgauccuggcugccgugacccuuugcuucgcgagcucccagaauauuacagaagaguuuuaccaaucuaccuguagcgcugucuccaaaggcuaucugucugcccucagaacagggugguacaccagcguuaucacaauugaacuguccaacaucaaggagaauaaaugcaacggaaccgacgccaaggugaaacuuaucaagcaggaacuggauaaguauaaaaaugcugugacggagcuccagcugcugaugcagucuaccccugccgcuggcagcggguccgccauugcgagcggaaucgccgucuguaaggugcuccaccuggagggcgaaguuaacaaaauuaagaaugcccuucugucuacaaacaaagcuguggucucccucagcaauggggugucuguucugaccuucaaggugcuugaccugaagaacuacaucgauaaacaacuccugccgauucugaauaagcaguccugcagcaucucuaacauugagacagucaucgaauuucagcagaaaaauaaccggcuccuggagaucacccgcgaguucuccgugaaugcuggagugacgacacccgucagcaccuauaugcuuacaaacuccgaacugcucucucugauuaacgacaugccuaucaccaaugaucaaaagaaacuuaugagcaacaauguucagauugugagacagcaguccuacagcaucauguguauuaucaaggaggaagugcuggccuaugucgugcaacucccccuguacggcguuaucgacaccccuugcuggaaacugcauacaucuccccucuguacgaccaacacaaaggagggcuccaauauuugccugacccggacagaucgcgggugguacugugacaacgcgggaagcgugagcuuuuucccucaggccgaaaccugcaagguccagucuaauagaguguuuugugauacgaugaacuccagaacacugccgucugagguuaaucucugcaacaucgacauuuucaaucccaaauaugauugcaagaucaugaccagcaaaaccgacguguccagcucugucauuacaucccugggcgcuaucgugagcuguuacgggaagaccaaaugcacagccucuaacaagaaucggggaaucauuaagacguuuuccaacggcugugauuaugucagcaauaaagggguggacaccguuuccgugggaaacacacuuuacuaugucaacaagcaagagggcaaaucucuguacgugaagggcgaaccuaucauuaauuucuaugacccccucguuuuuccuagcgaugaguucgacgcuuccaucucucaggugaacgaaaagauuaaucagagccuggccuuuauccgcaaguccgaugagcugcuccacaacgucaauguggggaaaagcaccacaaacauuaugaucaccacgaucauuaucgugauuaucguuauucugcuucugcucaucgccgucggacuguuccuguacugcaaagcuagaugaggacuaguacuggcugcaucucccuuuccucuguccuccauccuucucccaggauggugaagggggaccugguacccagugauccccaccccaggauccuaaaucaugacuuaccugcuaauaaaaacucauuggaaaagugagaagaucuaaaaaaaaaaaaaaaaaaaaaaaaaaaaaaaaaaaaaaaaaaaaaaaaaaaaaaaaaaaaaaaaugcaucccccccccccccccccccccccccccccccaaaggcucuuuucagagccaccagaauu

SEQ ID NO: 13874 - RNA, 1923 nt, Artificial Sequence
  mRNA product Design h-1 comprising derived and/or modified sequence from HRSV(Memphis-37)__AIY60640.1__F-del_DSCav1_mut0 (opt6)
gggagacccgugacccggaaguuguacggcuacgcgacuuucccucccacaaacccucgcgcccuuccuuuccuacuugggcccggcagaaagcuuaccauggaacucccaauacuuaaaacaaacgcaaucacaacaauacuagcugcagucacacuaugcuucgccucaucacaaaauauaacagaagaauuuuaucaaucaacaugcuccgcaguaucaaaaggauaucucucugcauuacgaacagguugguacaccucgguaauaacaauagaauuaucaaacauaaaagaaaauaaaugcaauggaaccgaugccaaaguaaaacuaaucaaacaagaacuugacaaauacaaaaacgcaguaacagaacuacaacuauuaaugcaaucaacaccagcagcagguucaggcuccgcaaucgcuucaggaauagccguuuguaaaguacuacacuuagaaggagaaguaaauaaaauaaaaaacgccuuacuaucaacaaacaaagcaguagucucccuuuccaacggaguaucagucuuaacuuuuaaaguacucgacuuaaaaaauuacaucgacaaacaacuacuacccauucuaaauaaacaaucaugcucaauaucaaacaucgaaacaguaaucgaauuucaacaaaaaaauaauagauuacuagaaauaacacgagaauuuuccguaaaugccggaguaacgaccccagucucaacauacauguuaacaaacucagaauuacuaucacucauuaacgauaugccaauaacaaaugaccaaaaaaaacuaaugucaaacaacguccaaauaguacgacaacaaucauacucuaucauguguauaauaaaagaagaaguuuuagcauacguaguacaacuaccacuuuacggagucauagacaccccaugcuggaaacuacacacaucacccuuauguacaacaaacaccaaagaagggucuaacauaugucucacuagaacagaucgaggcugguacugcgacaacgcaggaucaguuagcuuuuucccucaagccgaaaccuguaaaguacaauccaaucgaguauuuugcgacacuaugaacucuagaaccuuacccuccgaaguaaaccuauguaacauagacauauuuaaucccaaauaugauugcaaaaucaugacauccaaaacagauguaucaagcucuguaauaaccucacuaggagcaauaguuucaugcuaugguaaaacaaaaugcaccgccucaaacaaaaauagagggauaaucaaaaccuucucaaauggaugcgacuacguaucaaauaaaggaguagacaccgucuccguaggaaacacacuauacuacguaaacaaacaagaaggaaaaucacuauacguaaaaggagaaccaaucauaaacuucuacgacccacuuguuuucccaucagaugaauuugaugccuccauaucacaaguaaacgaaaaaauaaaccaaucucuagccuucaucagaaaauccgacgaacuuuuacacaacguaaacguagguaaaucaacaaccaacaucaugauaacaacaauaauaauaguaauaauuguaauacuuuuacuacuuaucgccguaggccuauucuuauauuguaaagcaagaugaggacuaguacuggcugcaucucccuuuccucuguccuccauccuucucccaggauggugaagggggaccugguacccagugauccccaccccaggauccuaaaucaugacuuaccugcuaauaaaaacucauuggaaaagugagaagaucuaaaaaaaaaaaaaaaaaaaaaaaaaaaaaaaaaaaaaaaaaaaaaaaaaaaaaaaaaaaaaaaaugcaucccccccccccccccccccccccccccccccaaaggcucuuuucagagccaccagaauu

SEQ ID NO: 13875 - RNA, 1923 nt, Artificial Sequence
  mRNA product Design h-1 comprising derived and/or modified sequence from HRSV(Memphis-37)__AIY60640.1__F-del_DSCav1_mut0 (opt11)
gggagacccgugacccggaaguuguacggcuacgcgacuuucccucccacaaacccucgcgcccuuccuuuccuacuugggcccggcagaaagcuuaccauggaacuaccaauccucaaaaccaacgccaucacuacaauccuagccgcgguaacccugugcuucgccuccucacaaaacaucacagaagaauuuuaccaaucaaccugcuccgccguauccaaaggauaccugagcgcccugagaaccggcugguacaccuccgucaucaccauagaacucuccaacaucaaagaaaacaaaugcaacgguacggacgccaaaguuaaacucaucaaacaagaacuugacaaauacaagaacgccgucacagaacugcaacuccucaugcaauccacccccgccgccggcuccggcuccgccauagccuccggcaucgccgucugcaaagucuuacaccuagaaggcgaagucaacaaaaucaaaaacgcacuacuuuccacaaacaaagccgucgucucacucuccaacggcguauccguccucaccuucaaaguacuugaccucaaaaacuacaucgacaaacaacuacuccccauccugaacaaacaauccugcucaaucuccaacaucgaaaccguaaucgaguuccaacagaaaaauaaucgccuccuggagaucacccgcgaguucuccgucaaugcaggagucacaaccccaguaucaaccuacaugcucaccaacuccgaacuccugucgcucaucaacgacaugcccaucacaaacgaccaaaagaaacucauguccaacaacguacaaaucgucagacaacaauccuauucuauaaugugcaucaucaaagaagaaguccucgccuacgucguacaacucccccucuacggcguuaucgacacccccugcuggaaacuccacaccucaccccucugcaccaccaacacaaaagaaggcuccaacaucugccucacucggaccgaccgcggcugguacugcgacaaugccggcagcgucuccuucuucccacaagccgaaaccugcaaaguccaguccaaccgcguauucugcgacacuaugaacuccagaacccuccccuccgaaguaaaccucugcaacaucgacaucuucaacccaaaauacgacugcaaaaucaugaccucaaaaaccgacgucagcucgucagucauaaccagccucggagccauagucucaugcuacggaaaaaccaaaugcaccgccagcaacaaaaaccgcggcauaauaaaaacauucuccaacggcugcgacuauguauccaacaaaggagucgauaccgucuccguaggcaacacccuauacuacgucaacaaacaagaaggcaaaucccucuacgucaaaggugaaccaaucaucaacuucuacgacccucucgucuuccccuccgaugaguucgacgccucaaucagccaaguaaacgaaaagauaaaccaaucacucgccuucauccgcaaauccgacgaacuucuucacaacgucaacgucggcaaaucuaccaccaacauaaugauaaccaccaucaucaucgucaucaucguaauacuccuccuucucaucgccgucggccuauuccuauacugcaaagcccgcuagggacuaguacuggcugcaucucccuuuccucuguccuccauccuucucccaggauggugaagggggaccugguacccagugauccccaccccaggauccuaaaucaugacuuaccugcuaauaaaaacucauuggaaaagugagaagaucuaaaaaaaaaaaaaaaaaaaaaaaaaaaaaaaaaaaaaaaaaaaaaaaaaaaaaaaaaaaaaaaaugcaucccccccccccccccccccccccccccccccaaaggcucuuuucagagccaccagaauu

SEQ ID NO: 13876 - RNA, 2139 nt, Artificial Sequence
  mRNA product Design h-2 comprising derived and/or modified sequence from HRSV(Memphis-37)__AIY60640.1__F-del_DSCav1_mut0 (opt1)
gggagacccgugacccggaaguuguacggcuacgcgacuuucccucccacaaacccucgcgcccuuccuuuccuacuugggcccggcagaaagcuuaccauggagcugcccauccucaagaccaacgccaucaccacgauccuggccgcggugacccugugcuucgccagcucccagaacaucaccgaggaguucuaccagagcacgugcuccgccgucagcaagggcuaccucuccgcccugcgcaccgggugguacaccagcgugaucaccaucgagcuguccaacaucaaggagaacaagugcaacggcaccgacgccaaggugaagcucaucaagcaggagcuggacaaguacaagaacgcggucacggagcugcagcuccugaugcagagcaccccggccgccggcuccgggagcgcgaucgccuccggcaucgccgucugcaaggugcugcaccucgagggcgaggugaacaagaucaagaacgcccugcuguccaccaacaaggccgucgugagccucuccaacggggugagcguccugaccuucaaggugcuggaccucaagaacuacaucgacaagcagcugcugcccauccugaacaagcagagcugcuccaucagcaacaucgagaccgucaucgaguuccagcagaagaacaaccgccuccuggagaucacgcgggaguucagcgugaacgcgggcgugaccacccccgucuccaccuacaugcugacgaacagcgagcuccugucccugaucaacgacaugccgaucaccaacgaccagaagaagcucaugagcaacaacgugcagaucgugcgccagcaguccuacagcaucaugugcaucaucaaggaggagguccuggccuacguggugcagcugccccucuacggggucaucgacacccccugcuggaagcugcacaccagcccccugugcacgaccaacaccaaggagggcuccaacaucugccucacccggacggaccgcgggugguacugcgacaacgccggcagcguguccuucuucccgcaggccgagaccugcaagguccagagcaaccggguguucugcgacaccaugaacucccggacccugcccagcgaggugaaccucugcaacaucgacaucuucaaccccaaguacgacugcaagaucaugacguccaagaccgacgucagcuccagcgugaucaccucccugggcgccaucgugagcugcuacgggaagaccaagugcacggcgagcaacaagaaccgcggcaucaucaagaccuucuccaacgggugcgacuacgucagcaacaagggcguggacaccguguccgucggcaacacccuguacuacgugaacaagcaggagggcaagagccucuacgugaagggggagcccaucaucaacuucuacgacccgcuggucuuccccuccgacgaguucgacgccagcaucucccaggugaacgagaagaucaaccagagccuggccuucauccggaaguccgacgagcuccugcacaacgugaacgucggcaagagcaccacgaacaucaugaucaccaccaucaucaucgugaucaucgugauccugcugcuccugaucgccgucgggcuguuccucuacugcaaggcccgcugaggacuagugaagggaacacccaaauuuaauucagccuuaagcacaauuaauuaagagugaaacguaauuguacaagcaguuggucacccaccauagggcaugaucaacaccgcaaccuuuccuuuuucccccagugauucugaaaaaccccucuucccuucagcuugcuuagauguuccaaauuuaguaagcuuaaggcggccuacagaagaaaaagaaaaaaaaggccacaaaaguucccucucacuuucaguaaauaaaauaaaagcagcaacagaaauaaagaaauaaaugaaauucaaaaugaaauaaauauuguguugugcagcauuaaaaaaucaauaaaaauuaaaaaugagcaagaucuaaaaaaaaaaaaaaaaaaaaaaaaaaaaaaaaaaaaaaaaaaaaaaaaaaaaaaaaaaaaaaaaugcaucccccccccccccccccccccccccccccccaaaggcucuuuucagagccaccagaauu

SEQ ID NO: 13877 - RNA, 2139 nt, Artificial Sequence
  mRNA product Design h-2 comprising derived and/or modified sequence from HRSV(Memphis-37)__AIY60640.1__F-del_DSCav1_mut0 (opt1)
gggagacccgugacccggaaguuguacggcuacgcgacuuucccucccacaaacccucgcgcccuuccuuuccuacuugggcccggcagaaagcuuaccauggagcugcccauccucaagaccaacgccaucaccacgauccuggccgcggugacccugugcuucgccagcucccagaacaucaccgaggaguucuaccagagcacgugcuccgccgucagcaagggcuaccucuccgcccugcgcaccgggugguacaccagcgugaucaccaucgagcuguccaacaucaaggagaacaagugcaacggcaccgacgccaaggugaagcucaucaagcaggagcuggacaaguacaagaacgcggucacggagcugcagcuccugaugcagagcaccccggccgccggguccggcagcgccaucgcguccgggaucgccgugugcaaggugcugcaccucgagggcgaggucaacaagaucaagaacgcccugcugagcaccaacaaggccguggugucccucagcaacggcgucuccgugcugaccuucaaggugcuggaccucaagaacuacaucgacaagcagcugcugcccauccucaacaagcagagcugcuccaucagcaacaucgagacggucaucgaguuccagcagaagaacaaccggcugcuggagaucacccgcgaguucuccgugaacgccggggugaccacccccgucagcacguacaugcucaccaacagcgagcugcugucccucaucaacgacaugcccaucaccaacgaccagaagaagcugaugagcaacaacgugcagaucgugcggcagcaguccuacagcaucaugugcaucaucaaggaggagguccuggcguacguggugcagcucccgcuguacggcgucaucgacacccccugcuggaagcugcacacgagcccccucugcaccaccaacaccaaggagggguccaacaucugccugacgcgcaccgaccggggcugguacugcgacaacgccggguccgugagcuucuucccccaggccgagaccugcaaggugcaguccaaccgcgucuucugcgacaccaugaacagccggacgcucccguccgaggugaaccugugcaacaucgacaucuucaaccccaaguacgacugcaagaucaugaccagcaagaccgacgucuccagcuccgugaucaccagccugggcgccaucguguccugcuacggcaagacgaagugcaccgccagcaacaagaaccgggggaucaucaagaccuucuccaacggcugcgacuacgucagcaacaaggggguggacaccgugagcgucggcaacacgcucuacuacgugaacaagcaggagggcaagucccuguacgugaagggggagcccaucaucaacuucuacgacccccuggucuucccgagcgacgaguucgacgcguccaucagccaggugaacgagaagaucaaccagucccucgccuucauccgcaagagcgacgagcugcugcacaacgugaacgucggcaaguccaccaccaacaucaugaucaccaccaucaucaucgugaucaucgugauccuccugcugcucaucgccgucgggcuguuccuguacugcaaggcccggugaggacuagugaagggaacacccaaauuuaauucagccuuaagcacaauuaauuaagagugaaacguaauuguacaagcaguuggucacccaccauagggcaugaucaacaccgcaaccuuuccuuuuucccccagugauucugaaaaaccccucuucccuucagcuugcuuagauguuccaaauuuaguaagcuuaaggcggccuacagaagaaaaagaaaaaaaaggccacaaaaguucccucucacuuucaguaaauaaaauaaaagcagcaacagaaauaaagaaauaaaugaaauucaaaaugaaauaaauauuguguugugcagcauuaaaaaaucaauaaaaauuaaaaaugagcaagaucuaaaaaaaaaaaaaaaaaaaaaaaaaaaaaaaaaaaaaaaaaaaaaaaaaaaaaaaaaaaaaaaaugcaucccccccccccccccccccccccccccccccaaaggcucuuuucagagccaccagaauu

SEQ ID NO: 13878 - RNA, 2139 nt, Artificial Sequence
  mRNA product Design h-2 comprising derived and/or modified sequence from HRSV(Memphis-37)__AIY60640.1__F-del_DSCav1_mut0 (opt2)
gggagacccgugacccggaaguuguacggcuacgcgacuuucccucccacaaacccucgcgcccuuccuuuccuacuugggcccggcagaaagcuuaccauggagcuccccauccucaagaccaacgccaucaccaccauccucgccgccgucacccucugcuucgccuccucccagaacaucaccgaggaguucuaccaguccaccugcuccgccgucuccaagggcuaccucuccgcccuccgcaccggcugguacaccuccgucaucaccaucgagcucuccaacaucaaggagaacaagugcaacggcaccgacgccaaggucaagcucaucaagcaggagcucgacaaguacaagaacgccgucaccgagcuccagcuccucaugcaguccacccccgccgccggcuccggcuccgccaucgccuccggcaucgccgucugcaagguccuccaccucgagggcgaggucaacaagaucaagaacgcccuccucuccaccaacaaggccgucgucucccucuccaacggcgucuccguccucaccuucaagguccucgaccucaagaacuacaucgacaagcagcuccuccccauccucaacaagcaguccugcuccaucuccaacaucgagaccgucaucgaguuccagcagaagaacaaccgccuccucgagaucacccgcgaguucuccgucaacgccggcgucaccacccccgucuccaccuacaugcucaccaacuccgagcuccucucccucaucaacgacaugcccaucaccaacgaccagaagaagcucauguccaacaacguccagaucguccgccagcaguccuacuccaucaugugcaucaucaaggaggagguccucgccuacgucguccagcucccccucuacggcgucaucgacacccccugcuggaagcuccacaccuccccccucugcaccaccaacaccaaggagggcuccaacaucugccucacccgcaccgaccgcggcugguacugcgacaacgccggcuccgucuccuucuucccccaggccgagaccugcaagguccaguccaaccgcgucuucugcgacaccaugaacucccgcacccuccccuccgaggucaaccucugcaacaucgacaucuucaaccccaaguacgacugcaagaucaugaccuccaagaccgacgucuccuccuccgucaucaccucccucggcgccaucgucuccugcuacggcaagaccaagugcaccgccuccaacaagaaccgcggcaucaucaagaccuucuccaacggcugcgacuacgucuccaacaagggcgucgacaccgucuccgucggcaacacccucuacuacgucaacaagcaggagggcaagucccucuacgucaagggcgagcccaucaucaacuucuacgacccccucgucuuccccuccgacgaguucgacgccuccaucucccaggucaacgagaagaucaaccagucccucgccuucauccgcaaguccgacgagcuccuccacaacgucaacgucggcaaguccaccaccaacaucaugaucaccaccaucaucaucgucaucaucgucauccuccuccuccucaucgccgucggccucuuccucuacugcaaggcccgcugaggacuagugaagggaacacccaaauuuaauucagccuuaagcacaauuaauuaagagugaaacguaauuguacaagcaguuggucacccaccauagggcaugaucaacaccgcaaccuuuccuuuuucccccagugauucugaaaaaccccucuucccuucagcuugcuuagauguuccaaauuuaguaagcuuaaggcggccuacagaagaaaaagaaaaaaaaggccacaaaaguucccucucacuuucaguaaauaaaauaaaagcagcaacagaaauaaagaaauaaaugaaauucaaaaugaaauaaauauuguguugugcagcauuaaaaaaucaauaaaaauuaaaaaugagcaagaucuaaaaaaaaaaaaaaaaaaaaaaaaaaaaaaaaaaaaaaaaaaaaaaaaaaaaaaaaaaaaaaaaugcaucccccccccccccccccccccccccccccccaaaggcucuuuucagagccaccagaauu

SEQ ID NO: 13879 - RNA, 2139 nt, Artificial Sequence
  mRNA product Design h-2 comprising derived and/or modified sequence from HRSV(Memphis-37)__AIY60640.1__F-del_DSCav1_mut0 (opt3)
gggagacccgugacccggaaguuguacggcuacgcgacuuucccucccacaaacccucgcgcccuuccuuuccuacuugggcccggcagaaagcuuaccauggagcugcccauccucaagaccaacgccauuacaacuauacuugcugcagugacgcugugcuucgccagcucccagaauaucaccgaagaguuuuaccaaucuacauguucagcggucaguaaaggcuauuugagcgcuuuaagaacugggugguacaccuccguuauuacaaucgaacugucuaacauuaaggagaauaaaugcaacggaaccgacgccaaggugaaacuaaucaagcaggaacucgauaaguauaaaaaugcaguaacugagcugcagcuucugaugcagucgaccccugccgcugguucaggcagcgcaauagccagugggaucgcuguguguaaggucuugcaccucgagggagaagugaacaaaauuaagaaugcccugcuguccacaaacaaagcgguugugucucucagcaauggcgucuccguguuaacguucaagguacuggaccuuaagaacuacaucgauaaacaauugcugccaauucuaaauaagcagucaugcaguaucagcaacauagagacuguuauugaauuucagcagaaaaauaacaggcuccuggagaucacccgggaguucucugugaaugccggugucacaacuccgguguccaccuauaugcuuacaaacucagaacuguugagccucauuaacgacaugcccaucaccaaugaucaaaagaaacugaugaguaacaaugugcagaucguccgccagcagucuuacuccauuauguguauaaucaaggaggaaguuuuagcauaugugguacaacugccucucuacggggugauugacacgccaugcuggaaacuucauacuagcccccuguguacaaccaacacuaaggagggaucgaauaucugcuugacacgaaccgaucguggcugguacugugacaacgcuggcucugucuccuuuuucccucaggccgaaacgugcaaggugcagucaaauagaguguuuugugauaccaugaacaguagaacacugccaagcgaggugaaucucugcaacauagacauuuucaaucccaaauaugauugcaagaucaugacuuccaaaaccgacgucucuagcucagugaucacaagucugggggcaauuguauccuguuacggaaagacuaaaugcaccgcuagcaacaagaauagggguaucauuaagacauuuucuaacggcugugauuauguuucaaauaaagggguggacaccgucagugugggaaacacucuuuacuaugucaacaagcaagagggcaaaagccuguacgugaagggugaaccuauaaucaauuucuaugacccauugguuuuuccguccgaugaguucgacgccucuauuucgcagguuaacgagaaaaucaaucagagccucgcguuuauccggaaguccgaugaacuguuacacaacguaaaugucgggaagucaacgacaaacauuaugauaaccacuaucauuaucgugauuaucguuauacugcuacuccugaucgccgugggacuuuucuuguacugcaaagcacgcugaggacuagugaagggaacacccaaauuuaauucagccuuaagcacaauuaauuaagagugaaacguaauuguacaagcaguuggucacccaccauagggcaugaucaacaccgcaaccuuuccuuuuucccccagugauucugaaaaaccccucuucccuucagcuugcuuagauguuccaaauuuaguaagcuuaaggcggccuacagaagaaaaagaaaaaaaaggccacaaaaguucccucucacuuucaguaaauaaaauaaaagcagcaacagaaauaaagaaauaaaugaaauucaaaaugaaauaaauauuguguugugcagcauuaaaaaaucaauaaaaauuaaaaaugagcaagaucuaaaaaaaaaaaaaaaaaaaaaaaaaaaaaaaaaaaaaaaaaaaaaaaaaaaaaaaaaaaaaaaaugcaucccccccccccccccccccccccccccccccaaaggcucuuuucagagccaccagaauu

SEQ ID NO: 13880 - RNA, 2139 nt, Artificial Sequence
  mRNA product Design h-2 comprising derived and/or modified sequence from HRSV(Memphis-37)__AIY60640.1__F-del_DSCav1_mut0 (opt4)
gggagacccgugacccggaaguuguacggcuacgcgacuuucccucccacaaacccucgcgcccuuccuuuccuacuugggcccggcagaaagcuuaccauggagcugcccauccugaagaccaacgccaucaccaccauccuggccgccgugacccugugcuucgccagcagccagaacaucaccgaggaguucuaccagagcaccugcagcgccgugagcaagggcuaccugagcgcccugagaaccggcugguacaccagcgugaucaccaucgagcugagcaacaucaaggagaacaagugcaacggcaccgacgccaaggugaagcugaucaagcaggagcuggacaaguacaagaacgccgugaccgagcugcagcugcugaugcagagcacccccgccgccggcagcggcagcgccaucgccagcggcaucgccgugugcaaggugcugcaccuggagggcgaggugaacaagaucaagaacgcccugcugagcaccaacaaggccguggugagccugagcaacggcgugagcgugcugaccuucaaggugcuggaccugaagaacuacaucgacaagcagcugcugcccauccugaacaagcagagcugcagcaucagcaacaucgagaccgugaucgaguuccagcagaagaacaacagacugcuggagaucaccagagaguucagcgugaacgccggcgugaccacccccgugagcaccuacaugcugaccaacagcgagcugcugagccugaucaacgacaugcccaucaccaacgaccagaagaagcugaugagcaacaacgugcagaucgugagacagcagagcuacagcaucaugugcaucaucaaggaggaggugcuggccuacguggugcagcugccccuguacggcgugaucgacacccccugcuggaagcugcacaccagcccccugugcaccaccaacaccaaggagggcagcaacaucugccugaccagaaccgacagaggcugguacugcgacaacgccggcagcgugagcuucuucccccaggccgagaccugcaaggugcagagcaacagaguguucugcgacaccaugaacagcagaacccugcccagcgaggugaaccugugcaacaucgacaucuucaaccccaaguacgacugcaagaucaugaccagcaagaccgacgugagcagcagcgugaucaccagccugggcgccaucgugagcugcuacggcaagaccaagugcaccgccagcaacaagaacagaggcaucaucaagaccuucagcaacggcugcgacuacgugagcaacaagggcguggacaccgugagcgugggcaacacccuguacuacgugaacaagcaggagggcaagagccuguacgugaagggcgagcccaucaucaacuucuacgacccccugguguuccccagcgacgaguucgacgccagcaucagccaggugaacgagaagaucaaccagagccuggccuucaucagaaagagcgacgagcugcugcacaacgugaacgugggcaagagcaccaccaacaucaugaucaccaccaucaucaucgugaucaucgugauccugcugcugcugaucgccgugggccuguuccuguacugcaaggccagaugaggacuagugaagggaacacccaaauuuaauucagccuuaagcacaauuaauuaagagugaaacguaauuguacaagcaguuggucacccaccauagggcaugaucaacaccgcaaccuuuccuuuuucccccagugauucugaaaaaccccucuucccuucagcuugcuuagauguuccaaauuuaguaagcuuaaggcggccuacagaagaaaaagaaaaaaaaggccacaaaaguucccucucacuuucaguaaauaaaauaaaagcagcaacagaaauaaagaaauaaaugaaauucaaaaugaaauaaauauuguguugugcagcauuaaaaaaucaauaaaaauuaaaaaugagcaagaucuaaaaaaaaaaaaaaaaaaaaaaaaaaaaaaaaaaaaaaaaaaaaaaaaaaaaaaaaaaaaaaaaugcaucccccccccccccccccccccccccccccccaaaggcucuuuucagagccaccagaauu

SEQ ID NO: 13881 - RNA, 2139 nt, Artificial Sequence
  mRNA product Design h-2 comprising derived and/or modified sequence from HRSV(Memphis-37)__AIY60640.1__F-del_DSCav1_mut0 (opt5)
gggagacccgugacccggaaguuguacggcuacgcgacuuucccucccacaaacccucgcgcccuuccuuuccuacuugggcccggcagaaagcuuaccauggagcugcccauccucaagaccaacgccauuacaacgauccuggcugccgugacccuuugcuucgcgagcucccagaauauuacagaagaguuuuaccaaucuaccuguagcgcugucuccaaaggcuaucugucugcccucagaacagggugguacaccagcguuaucacaauugaacuguccaacaucaaggagaauaaaugcaacggaaccgacgccaaggugaaacuuaucaagcaggaacuggauaaguauaaaaaugcugugacggagcuccagcugcugaugcagucuaccccugccgcuggcagcggguccgccauugcgagcggaaucgccgucuguaaggugcuccaccuggagggcgaaguuaacaaaauuaagaaugcccuucugucuacaaacaaagcuguggucucccucagcaauggggugucuguucugaccuucaaggugcuugaccugaagaacuacaucgauaaacaacuccugccgauucugaauaagcaguccugcagcaucucuaacauugagacagucaucgaauuucagcagaaaaauaaccggcuccuggagaucacccgcgaguucuccgugaaugcuggagugacgacacccgucagcaccuauaugcuuacaaacuccgaacugcucucucugauuaacgacaugccuaucaccaaugaucaaaagaaacuuaugagcaacaauguucagauugugagacagcaguccuacagcaucauguguauuaucaaggaggaagugcuggccuaugucgugcaacucccccuguacggcguuaucgacaccccuugcuggaaacugcauacaucuccccucuguacgaccaacacaaaggagggcuccaauauuugccugacccggacagaucgcgggugguacugugacaacgcgggaagcgugagcuuuuucccucaggccgaaaccugcaagguccagucuaauagaguguuuugugauacgaugaacuccagaacacugccgucugagguuaaucucugcaacaucgacauuuucaaucccaaauaugauugcaagaucaugaccagcaaaaccgacguguccagcucugucauuacaucccugggcgcuaucgugagcuguuacgggaagaccaaaugcacagccucuaacaagaaucggggaaucauuaagacguuuuccaacggcugugauuaugucagcaauaaagggguggacaccguuuccgugggaaacacacuuuacuaugucaacaagcaagagggcaaaucucuguacgugaagggcgaaccuaucauuaauuucuaugacccccucguuuuuccuagcgaugaguucgacgcuuccaucucucaggugaacgaaaagauuaaucagagccuggccuuuauccgcaaguccgaugagcugcuccacaacgucaauguggggaaaagcaccacaaacauuaugaucaccacgaucauuaucgugauuaucguuauucugcuucugcucaucgccgucggacuguuccuguacugcaaagcuagaugaggacuagugaagggaacacccaaauuuaauucagccuuaagcacaauuaauuaagagugaaacguaauuguacaagcaguuggucacccaccauagggcaugaucaacaccgcaaccuuuccuuuuucccccagugauucugaaaaaccccucuucccuucagcuugcuuagauguuccaaauuuaguaagcuuaaggcggccuacagaagaaaaagaaaaaaaaggccacaaaaguucccucucacuuucaguaaauaaaauaaaagcagcaacagaaauaaagaaauaaaugaaauucaaaaugaaauaaauauuguguugugcagcauuaaaaaaucaauaaaaauuaaaaaugagcaagaucuaaaaaaaaaaaaaaaaaaaaaaaaaaaaaaaaaaaaaaaaaaaaaaaaaaaaaaaaaaaaaaaaugcaucccccccccccccccccccccccccccccccaaaggcucuuuucagagccaccagaauu

SEQ ID NO: 13882 - RNA, 2139 nt, Artificial Sequence
  mRNA product Design h-2 comprising derived and/or modified sequence from HRSV(Memphis-37)__AIY60640.1__F-del_DSCav1_mut0 (opt6)
gggagacccgugacccggaaguuguacggcuacgcgacuuucccucccacaaacccucgcgcccuuccuuuccuacuugggcccggcagaaagcuuaccauggaacucccaauacuuaaaacaaacgcaaucacaacaauacuagcugcagucacacuaugcuucgccucaucacaaaauauaacagaagaauuuuaucaaucaacaugcuccgcaguaucaaaaggauaucucucugcauuacgaacagguugguacaccucgguaauaacaauagaauuaucaaacauaaaagaaaauaaaugcaauggaaccgaugccaaaguaaaacuaaucaaacaagaacuugacaaauacaaaaacgcaguaacagaacuacaacuauuaaugcaaucaacaccagcagcagguucaggcuccgcaaucgcuucaggaauagccguuuguaaaguacuacacuuagaaggagaaguaaauaaaauaaaaaacgccuuacuaucaacaaacaaagcaguagucucccuuuccaacggaguaucagucuuaacuuuuaaaguacucgacuuaaaaaauuacaucgacaaacaacuacuacccauucuaaauaaacaaucaugcucaauaucaaacaucgaaacaguaaucgaauuucaacaaaaaaauaauagauuacuagaaauaacacgagaauuuuccguaaaugccggaguaacgaccccagucucaacauacauguuaacaaacucagaauuacuaucacucauuaacgauaugccaauaacaaaugaccaaaaaaaacuaaugucaaacaacguccaaauaguacgacaacaaucauacucuaucauguguauaauaaaagaagaaguuuuagcauacguaguacaacuaccacuuuacggagucauagacaccccaugcuggaaacuacacacaucacccuuauguacaacaaacaccaaagaagggucuaacauaugucucacuagaacagaucgaggcugguacugcgacaacgcaggaucaguuagcuuuuucccucaagccgaaaccuguaaaguacaauccaaucgaguauuuugcgacacuaugaacucuagaaccuuacccuccgaaguaaaccuauguaacauagacauauuuaaucccaaauaugauugcaaaaucaugacauccaaaacagauguaucaagcucuguaauaaccucacuaggagcaauaguuucaugcuaugguaaaacaaaaugcaccgccucaaacaaaaauagagggauaaucaaaaccuucucaaauggaugcgacuacguaucaaauaaaggaguagacaccgucuccguaggaaacacacuauacuacguaaacaaacaagaaggaaaaucacuauacguaaaaggagaaccaaucauaaacuucuacgacccacuuguuuucccaucagaugaauuugaugccuccauaucacaaguaaacgaaaaaauaaaccaaucucuagccuucaucagaaaauccgacgaacuuuuacacaacguaaacguagguaaaucaacaaccaacaucaugauaacaacaauaauaauaguaauaauuguaauacuuuuacuacuuaucgccguaggccuauucuuauauuguaaagcaagaugaggacuagugaagggaacacccaaauuuaauucagccuuaagcacaauuaauuaagagugaaacguaauuguacaagcaguuggucacccaccauagggcaugaucaacaccgcaaccuuuccuuuuucccccagugauucugaaaaaccccucuucccuucagcuugcuuagauguuccaaauuuaguaagcuuaaggcggccuacagaagaaaaagaaaaaaaaggccacaaaaguucccucucacuuucaguaaauaaaauaaaagcagcaacagaaauaaagaaauaaaugaaauucaaaaugaaauaaauauuguguugugcagcauuaaaaaaucaauaaaaauuaaaaaugagcaagaucuaaaaaaaaaaaaaaaaaaaaaaaaaaaaaaaaaaaaaaaaaaaaaaaaaaaaaaaaaaaaaaaaugcaucccccccccccccccccccccccccccccccaaaggcucuuuucagagccaccagaauu

SEQ ID NO: 13883 - RNA, 2139 nt, Artificial Sequence
  mRNA product Design h-2 comprising derived and/or modified sequence from HRSV(Memphis-37)__AIY60640.1__F-del_DSCav1_mut0 (opt11)
gggagacccgugacccggaaguuguacggcuacgcgacuuucccucccacaaacccucgcgcccuuccuuuccuacuugggcccggcagaaagcuuaccauggaacuaccaauccucaaaaccaacgccaucacuacaauccuagccgcgguaacccugugcuucgccuccucacaaaacaucacagaagaauuuuaccaaucaaccugcuccgccguauccaaaggauaccugagcgcccugagaaccggcugguacaccuccgucaucaccauagaacucuccaacaucaaagaaaacaaaugcaacgguacggacgccaaaguuaaacucaucaaacaagaacuugacaaauacaagaacgccgucacagaacugcaacuccucaugcaauccacccccgccgccggcuccggcuccgccauagccuccggcaucgccgucugcaaagucuuacaccuagaaggcgaagucaacaaaaucaaaaacgcacuacuuuccacaaacaaagccgucgucucacucuccaacggcguauccguccucaccuucaaaguacuugaccucaaaaacuacaucgacaaacaacuacuccccauccugaacaaacaauccugcucaaucuccaacaucgaaaccguaaucgaguuccaacagaaaaauaaucgccuccuggagaucacccgcgaguucuccgucaaugcaggagucacaaccccaguaucaaccuacaugcucaccaacuccgaacuccugucgcucaucaacgacaugcccaucacaaacgaccaaaagaaacucauguccaacaacguacaaaucgucagacaacaauccuauucuauaaugugcaucaucaaagaagaaguccucgccuacgucguacaacucccccucuacggcguuaucgacacccccugcuggaaacuccacaccucaccccucugcaccaccaacacaaaagaaggcuccaacaucugccucacucggaccgaccgcggcugguacugcgacaaugccggcagcgucuccuucuucccacaagccgaaaccugcaaaguccaguccaaccgcguauucugcgacacuaugaacuccagaacccuccccuccgaaguaaaccucugcaacaucgacaucuucaacccaaaauacgacugcaaaaucaugaccucaaaaaccgacgucagcucgucagucauaaccagccucggagccauagucucaugcuacggaaaaaccaaaugcaccgccagcaacaaaaaccgcggcauaauaaaaacauucuccaacggcugcgacuauguauccaacaaaggagucgauaccgucuccguaggcaacacccuauacuacgucaacaaacaagaaggcaaaucccucuacgucaaaggugaaccaaucaucaacuucuacgacccucucgucuuccccuccgaugaguucgacgccucaaucagccaaguaaacgaaaagauaaaccaaucacucgccuucauccgcaaauccgacgaacuucuucacaacgucaacgucggcaaaucuaccaccaacauaaugauaaccaccaucaucaucgucaucaucguaauacuccuccuucucaucgccgucggccuauuccuauacugcaaagcccgcuagggacuagugaagggaacacccaaauuuaauucagccuuaagcacaauuaauuaagagugaaacguaauuguacaagcaguuggucacccaccauagggcaugaucaacaccgcaaccuuuccuuuuucccccagugauucugaaaaaccccucuucccuucagcuugcuuagauguuccaaauuuaguaagcuuaaggcggccuacagaagaaaaagaaaaaaaaggccacaaaaguucccucucacuuucaguaaauaaaauaaaagcagcaacagaaauaaagaaauaaaugaaauucaaaaugaaauaaauauuguguugugcagcauuaaaaaaucaauaaaaauuaaaaaugagcaagaucuaaaaaaaaaaaaaaaaaaaaaaaaaaaaaaaaaaaaaaaaaaaaaaaaaaaaaaaaaaaaaaaaugcaucccccccccccccccccccccccccccccccaaaggcucuuuucagagccaccagaauu

SEQ ID NO: 13884 - RNA, 1919 nt, Artificial Sequence
  mRNA product Design h-3 comprising derived and/or modified sequence from HRSV(Memphis-37)__AIY60640.1__F-del_DSCav1_mut0 (opt1)
gggagacccgugacccggaaguuguacggcuacgcgacuuucccucccacaaacccucgcgcccuuccuuuccuacuugggcccggcagaaagcuuaccauggagcugcccauccucaagaccaacgccaucaccacgauccuggccgcggugacccugugcuucgccagcucccagaacaucaccgaggaguucuaccagagcacgugcuccgccgucagcaagggcuaccucuccgcccugcgcaccgggugguacaccagcgugaucaccaucgagcuguccaacaucaaggagaacaagugcaacggcaccgacgccaaggugaagcucaucaagcaggagcuggacaaguacaagaacgcggucacggagcugcagcuccugaugcagagcaccccggccgccggcuccgggagcgcgaucgccuccggcaucgccgucugcaaggugcugcaccucgagggcgaggugaacaagaucaagaacgcccugcuguccaccaacaaggccgucgugagccucuccaacggggugagcguccugaccuucaaggugcuggaccucaagaacuacaucgacaagcagcugcugcccauccugaacaagcagagcugcuccaucagcaacaucgagaccgucaucgaguuccagcagaagaacaaccgccuccuggagaucacgcgggaguucagcgugaacgcgggcgugaccacccccgucuccaccuacaugcugacgaacagcgagcuccugucccugaucaacgacaugccgaucaccaacgaccagaagaagcucaugagcaacaacgugcagaucgugcgccagcaguccuacagcaucaugugcaucaucaaggaggagguccuggccuacguggugcagcugccccucuacggggucaucgacacccccugcuggaagcugcacaccagcccccugugcacgaccaacaccaaggagggcuccaacaucugccucacccggacggaccgcgggugguacugcgacaacgccggcagcguguccuucuucccgcaggccgagaccugcaagguccagagcaaccggguguucugcgacaccaugaacucccggacccugcccagcgaggugaaccucugcaacaucgacaucuucaaccccaaguacgacugcaagaucaugacguccaagaccgacgucagcuccagcgugaucaccucccugggcgccaucgugagcugcuacgggaagaccaagugcacggcgagcaacaagaaccgcggcaucaucaagaccuucuccaacgggugcgacuacgucagcaacaagggcguggacaccguguccgucggcaacacccuguacuacgugaacaagcaggagggcaagagccucuacgugaagggggagcccaucaucaacuucuacgacccgcuggucuuccccuccgacgaguucgacgccagcaucucccaggugaacgagaagaucaaccagagccuggccuucauccggaaguccgacgagcuccugcacaacgugaacgucggcaagagcaccacgaacaucaugaucaccaccaucaucaucgugaucaucgugauccugcugcuccugaucgccgucgggcuguuccucuacugcaaggcccgcugaggacuaguggaagcauuuuccuggcugauuaaaagaaauuacucagcuauggucaucuguuccuguuagaaggcuaugcagcauauuauauacuaugcgcauguuaugaaaugcauaauaaaaaauuuuaaaaaaucuaaaagaucuaaaaaaaaaaaaaaaaaaaaaaaaaaaaaaaaaaaaaaaaaaaaaaaaaaaaaaaaaaaaaaaaugcaucccccccccccccccccccccccccccccccaaaggcucuuuucagagccaccagaauu

SEQ ID NO: 13885 - RNA, 1919 nt, Artificial Sequence
  mRNA product Design h-3 comprising derived and/or modified sequence from HRSV(Memphis-37)__AIY60640.1__F-del_DSCav1_mut0 (opt1)
gggagacccgugacccggaaguuguacggcuacgcgacuuucccucccacaaacccucgcgcccuuccuuuccuacuugggcccggcagaaagcuuaccauggagcugcccauccucaagaccaacgccaucaccacgauccuggccgcggugacccugugcuucgccagcucccagaacaucaccgaggaguucuaccagagcacgugcuccgccgucagcaagggcuaccucuccgcccugcgcaccgggugguacaccagcgugaucaccaucgagcuguccaacaucaaggagaacaagugcaacggcaccgacgccaaggugaagcucaucaagcaggagcuggacaaguacaagaacgcggucacggagcugcagcuccugaugcagagcaccccggccgccggguccggcagcgccaucgcguccgggaucgccgugugcaaggugcugcaccucgagggcgaggucaacaagaucaagaacgcccugcugagcaccaacaaggccguggugucccucagcaacggcgucuccgugcugaccuucaaggugcuggaccucaagaacuacaucgacaagcagcugcugcccauccucaacaagcagagcugcuccaucagcaacaucgagacggucaucgaguuccagcagaagaacaaccggcugcuggagaucacccgcgaguucuccgugaacgccggggugaccacccccgucagcacguacaugcucaccaacagcgagcugcugucccucaucaacgacaugcccaucaccaacgaccagaagaagcugaugagcaacaacgugcagaucgugcggcagcaguccuacagcaucaugugcaucaucaaggaggagguccuggcguacguggugcagcucccgcuguacggcgucaucgacacccccugcuggaagcugcacacgagcccccucugcaccaccaacaccaaggagggguccaacaucugccugacgcgcaccgaccggggcugguacugcgacaacgccggguccgugagcuucuucccccaggccgagaccugcaaggugcaguccaaccgcgucuucugcgacaccaugaacagccggacgcucccguccgaggugaaccugugcaacaucgacaucuucaaccccaaguacgacugcaagaucaugaccagcaagaccgacgucuccagcuccgugaucaccagccugggcgccaucguguccugcuacggcaagacgaagugcaccgccagcaacaagaaccgggggaucaucaagaccuucuccaacggcugcgacuacgucagcaacaaggggguggacaccgugagcgucggcaacacgcucuacuacgugaacaagcaggagggcaagucccuguacgugaagggggagcccaucaucaacuucuacgacccccuggucuucccgagcgacgaguucgacgcguccaucagccaggugaacgagaagaucaaccagucccucgccuucauccgcaagagcgacgagcugcugcacaacgugaacgucggcaaguccaccaccaacaucaugaucaccaccaucaucaucgugaucaucgugauccuccugcugcucaucgccgucgggcuguuccuguacugcaaggcccggugaggacuaguggaagcauuuuccuggcugauuaaaagaaauuacucagcuauggucaucuguuccuguuagaaggcuaugcagcauauuauauacuaugcgcauguuaugaaaugcauaauaaaaaauuuuaaaaaaucuaaaagaucuaaaaaaaaaaaaaaaaaaaaaaaaaaaaaaaaaaaaaaaaaaaaaaaaaaaaaaaaaaaaaaaaugcaucccccccccccccccccccccccccccccccaaaggcucuuuucagagccaccagaauu

SEQ ID NO: 13886 - RNA, 1919 nt, Artificial Sequence
  mRNA product Design h-3 comprising derived and/or modified sequence from HRSV(Memphis-37)__AIY60640.1__F-del_DSCav1_mut0 (opt2)
gggagacccgugacccggaaguuguacggcuacgcgacuuucccucccacaaacccucgcgcccuuccuuuccuacuugggcccggcagaaagcuuaccauggagcuccccauccucaagaccaacgccaucaccaccauccucgccgccgucacccucugcuucgccuccucccagaacaucaccgaggaguucuaccaguccaccugcuccgccgucuccaagggcuaccucuccgcccuccgcaccggcugguacaccuccgucaucaccaucgagcucuccaacaucaaggagaacaagugcaacggcaccgacgccaaggucaagcucaucaagcaggagcucgacaaguacaagaacgccgucaccgagcuccagcuccucaugcaguccacccccgccgccggcuccggcuccgccaucgccuccggcaucgccgucugcaagguccuccaccucgagggcgaggucaacaagaucaagaacgcccuccucuccaccaacaaggccgucgucucccucuccaacggcgucuccguccucaccuucaagguccucgaccucaagaacuacaucgacaagcagcuccuccccauccucaacaagcaguccugcuccaucuccaacaucgagaccgucaucgaguuccagcagaagaacaaccgccuccucgagaucacccgcgaguucuccgucaacgccggcgucaccacccccgucuccaccuacaugcucaccaacuccgagcuccucucccucaucaacgacaugcccaucaccaacgaccagaagaagcucauguccaacaacguccagaucguccgccagcaguccuacuccaucaugugcaucaucaaggaggagguccucgccuacgucguccagcucccccucuacggcgucaucgacacccccugcuggaagcuccacaccuccccccucugcaccaccaacaccaaggagggcuccaacaucugccucacccgcaccgaccgcggcugguacugcgacaacgccggcuccgucuccuucuucccccaggccgagaccugcaagguccaguccaaccgcgucuucugcgacaccaugaacucccgcacccuccccuccgaggucaaccucugcaacaucgacaucuucaaccccaaguacgacugcaagaucaugaccuccaagaccgacgucuccuccuccgucaucaccucccucggcgccaucgucuccugcuacggcaagaccaagugcaccgccuccaacaagaaccgcggcaucaucaagaccuucuccaacggcugcgacuacgucuccaacaagggcgucgacaccgucuccgucggcaacacccucuacuacgucaacaagcaggagggcaagucccucuacgucaagggcgagcccaucaucaacuucuacgacccccucgucuuccccuccgacgaguucgacgccuccaucucccaggucaacgagaagaucaaccagucccucgccuucauccgcaaguccgacgagcuccuccacaacgucaacgucggcaaguccaccaccaacaucaugaucaccaccaucaucaucgucaucaucgucauccuccuccuccucaucgccgucggccucuuccucuacugcaaggcccgcugaggacuaguggaagcauuuuccuggcugauuaaaagaaauuacucagcuauggucaucuguuccuguuagaaggcuaugcagcauauuauauacuaugcgcauguuaugaaaugcauaauaaaaaauuuuaaaaaaucuaaaagaucuaaaaaaaaaaaaaaaaaaaaaaaaaaaaaaaaaaaaaaaaaaaaaaaaaaaaaaaaaaaaaaaaugcaucccccccccccccccccccccccccccccccaaaggcucuuuucagagccaccagaauu

SEQ ID NO: 13887 - RNA, 1919 nt, Artificial Sequence
  mRNA product Design h-3 comprising derived and/or modified sequence from HRSV(Memphis-37)__AIY60640.1__F-del_DSCav1_mut0 (opt3)
gggagacccgugacccggaaguuguacggcuacgcgacuuucccucccacaaacccucgcgcccuuccuuuccuacuugggcccggcagaaagcuuaccauggagcugcccauccucaagaccaacgccauuacaacuauacuugcugcagugacgcugugcuucgccagcucccagaauaucaccgaagaguuuuaccaaucuacauguucagcggucaguaaaggcuauuugagcgcuuuaagaacugggugguacaccuccguuauuacaaucgaacugucuaacauuaaggagaauaaaugcaacggaaccgacgccaaggugaaacuaaucaagcaggaacucgauaaguauaaaaaugcaguaacugagcugcagcuucugaugcagucgaccccugccgcugguucaggcagcgcaauagccagugggaucgcuguguguaaggucuugcaccucgagggagaagugaacaaaauuaagaaugcccugcuguccacaaacaaagcgguugugucucucagcaauggcgucuccguguuaacguucaagguacuggaccuuaagaacuacaucgauaaacaauugcugccaauucuaaauaagcagucaugcaguaucagcaacauagagacuguuauugaauuucagcagaaaaauaacaggcuccuggagaucacccgggaguucucugugaaugccggugucacaacuccgguguccaccuauaugcuuacaaacucagaacuguugagccucauuaacgacaugcccaucaccaaugaucaaaagaaacugaugaguaacaaugugcagaucguccgccagcagucuuacuccauuauguguauaaucaaggaggaaguuuuagcauaugugguacaacugccucucuacggggugauugacacgccaugcuggaaacuucauacuagcccccuguguacaaccaacacuaaggagggaucgaauaucugcuugacacgaaccgaucguggcugguacugugacaacgcuggcucugucuccuuuuucccucaggccgaaacgugcaaggugcagucaaauagaguguuuugugauaccaugaacaguagaacacugccaagcgaggugaaucucugcaacauagacauuuucaaucccaaauaugauugcaagaucaugacuuccaaaaccgacgucucuagcucagugaucacaagucugggggcaauuguauccuguuacggaaagacuaaaugcaccgcuagcaacaagaauagggguaucauuaagacauuuucuaacggcugugauuauguuucaaauaaagggguggacaccgucagugugggaaacacucuuuacuaugucaacaagcaagagggcaaaagccuguacgugaagggugaaccuauaaucaauuucuaugacccauugguuuuuccguccgaugaguucgacgccucuauuucgcagguuaacgagaaaaucaaucagagccucgcguuuauccggaaguccgaugaacuguuacacaacguaaaugucgggaagucaacgacaaacauuaugauaaccacuaucauuaucgugauuaucguuauacugcuacuccugaucgccgugggacuuuucuuguacugcaaagcacgcugaggacuaguggaagcauuuuccuggcugauuaaaagaaauuacucagcuauggucaucuguuccuguuagaaggcuaugcagcauauuauauacuaugcgcauguuaugaaaugcauaauaaaaaauuuuaaaaaaucuaaaagaucuaaaaaaaaaaaaaaaaaaaaaaaaaaaaaaaaaaaaaaaaaaaaaaaaaaaaaaaaaaaaaaaaugcaucccccccccccccccccccccccccccccccaaaggcucuuuucagagccaccagaauu

SEQ ID NO: 13888 - RNA, 1919 nt, Artificial Sequence
  mRNA product Design h-3 comprising derived and/or modified sequence from HRSV(Memphis-37)__AIY60640.1__F-del_DSCav1_mut0 (opt4)
gggagacccgugacccggaaguuguacggcuacgcgacuuucccucccacaaacccucgcgcccuuccuuuccuacuugggcccggcagaaagcuuaccauggagcugcccauccugaagaccaacgccaucaccaccauccuggccgccgugacccugugcuucgccagcagccagaacaucaccgaggaguucuaccagagcaccugcagcgccgugagcaagggcuaccugagcgcccugagaaccggcugguacaccagcgugaucaccaucgagcugagcaacaucaaggagaacaagugcaacggcaccgacgccaaggugaagcugaucaagcaggagcuggacaaguacaagaacgccgugaccgagcugcagcugcugaugcagagcacccccgccgccggcagcggcagcgccaucgccagcggcaucgccgugugcaaggugcugcaccuggagggcgaggugaacaagaucaagaacgcccugcugagcaccaacaaggccguggugagccugagcaacggcgugagcgugcugaccuucaaggugcuggaccugaagaacuacaucgacaagcagcugcugcccauccugaacaagcagagcugcagcaucagcaacaucgagaccgugaucgaguuccagcagaagaacaacagacugcuggagaucaccagagaguucagcgugaacgccggcgugaccacccccgugagcaccuacaugcugaccaacagcgagcugcugagccugaucaacgacaugcccaucaccaacgaccagaagaagcugaugagcaacaacgugcagaucgugagacagcagagcuacagcaucaugugcaucaucaaggaggaggugcuggccuacguggugcagcugccccuguacggcgugaucgacacccccugcuggaagcugcacaccagcccccugugcaccaccaacaccaaggagggcagcaacaucugccugaccagaaccgacagaggcugguacugcgacaacgccggcagcgugagcuucuucccccaggccgagaccugcaaggugcagagcaacagaguguucugcgacaccaugaacagcagaacccugcccagcgaggugaaccugugcaacaucgacaucuucaaccccaaguacgacugcaagaucaugaccagcaagaccgacgugagcagcagcgugaucaccagccugggcgccaucgugagcugcuacggcaagaccaagugcaccgccagcaacaagaacagaggcaucaucaagaccuucagcaacggcugcgacuacgugagcaacaagggcguggacaccgugagcgugggcaacacccuguacuacgugaacaagcaggagggcaagagccuguacgugaagggcgagcccaucaucaacuucuacgacccccugguguuccccagcgacgaguucgacgccagcaucagccaggugaacgagaagaucaaccagagccuggccuucaucagaaagagcgacgagcugcugcacaacgugaacgugggcaagagcaccaccaacaucaugaucaccaccaucaucaucgugaucaucgugauccugcugcugcugaucgccgugggccuguuccuguacugcaaggccagaugaggacuaguggaagcauuuuccuggcugauuaaaagaaauuacucagcuauggucaucuguuccuguuagaaggcuaugcagcauauuauauacuaugcgcauguuaugaaaugcauaauaaaaaauuuuaaaaaaucuaaaagaucuaaaaaaaaaaaaaaaaaaaaaaaaaaaaaaaaaaaaaaaaaaaaaaaaaaaaaaaaaaaaaaaaugcaucccccccccccccccccccccccccccccccaaaggcucuuuucagagccaccagaauu

SEQ ID NO: 13889 - RNA, 1919 nt, Artificial Sequence
  mRNA product Design h-3 comprising derived and/or modified sequence from HRSV(Memphis-37)__AIY60640.1__F-del_DSCav1_mut0 (opt5)
gggagacccgugacccggaaguuguacggcuacgcgacuuucccucccacaaacccucgcgcccuuccuuuccuacuugggcccggcagaaagcuuaccauggagcugcccauccucaagaccaacgccauuacaacgauccuggcugccgugacccuuugcuucgcgagcucccagaauauuacagaagaguuuuaccaaucuaccuguagcgcugucuccaaaggcuaucugucugcccucagaacagggugguacaccagcguuaucacaauugaacuguccaacaucaaggagaauaaaugcaacggaaccgacgccaaggugaaacuuaucaagcaggaacuggauaaguauaaaaaugcugugacggagcuccagcugcugaugcagucuaccccugccgcuggcagcggguccgccauugcgagcggaaucgccgucuguaaggugcuccaccuggagggcgaaguuaacaaaauuaagaaugcccuucugucuacaaacaaagcuguggucucccucagcaauggggugucuguucugaccuucaaggugcuugaccugaagaacuacaucgauaaacaacuccugccgauucugaauaagcaguccugcagcaucucuaacauugagacagucaucgaauuucagcagaaaaauaaccggcuccuggagaucacccgcgaguucuccgugaaugcuggagugacgacacccgucagcaccuauaugcuuacaaacuccgaacugcucucucugauuaacgacaugccuaucaccaaugaucaaaagaaacuuaugagcaacaauguucagauugugagacagcaguccuacagcaucauguguauuaucaaggaggaagugcuggccuaugucgugcaacucccccuguacggcguuaucgacaccccuugcuggaaacugcauacaucuccccucuguacgaccaacacaaaggagggcuccaauauuugccugacccggacagaucgcgggugguacugugacaacgcgggaagcgugagcuuuuucccucaggccgaaaccugcaagguccagucuaauagaguguuuugugauacgaugaacuccagaacacugccgucugagguuaaucucugcaacaucgacauuuucaaucccaaauaugauugcaagaucaugaccagcaaaaccgacguguccagcucugucauuacaucccugggcgcuaucgugagcuguuacgggaagaccaaaugcacagccucuaacaagaaucggggaaucauuaagacguuuuccaacggcugugauuaugucagcaauaaagggguggacaccguuuccgugggaaacacacuuuacuaugucaacaagcaagagggcaaaucucuguacgugaagggcgaaccuaucauuaauuucuaugacccccucguuuuuccuagcgaugaguucgacgcuuccaucucucaggugaacgaaaagauuaaucagagccuggccuuuauccgcaaguccgaugagcugcuccacaacgucaauguggggaaaagcaccacaaacauuaugaucaccacgaucauuaucgugauuaucguuauucugcuucugcucaucgccgucggacuguuccuguacugcaaagcuagaugaggacuaguggaagcauuuuccuggcugauuaaaagaaauuacucagcuauggucaucuguuccuguuagaaggcuaugcagcauauuauauacuaugcgcauguuaugaaaugcauaauaaaaaauuuuaaaaaaucuaaaagaucuaaaaaaaaaaaaaaaaaaaaaaaaaaaaaaaaaaaaaaaaaaaaaaaaaaaaaaaaaaaaaaaaugcaucccccccccccccccccccccccccccccccaaaggcucuuuucagagccaccagaauu

SEQ ID NO: 13890 - RNA, 1919 nt, Artificial Sequence
  mRNA product Design h-3 comprising derived and/or modified sequence from HRSV(Memphis-37)__AIY60640.1__F-del_DSCav1_mut0 (opt6)
gggagacccgugacccggaaguuguacggcuacgcgacuuucccucccacaaacccucgcgcccuuccuuuccuacuugggcccggcagaaagcuuaccauggaacucccaauacuuaaaacaaacgcaaucacaacaauacuagcugcagucacacuaugcuucgccucaucacaaaauauaacagaagaauuuuaucaaucaacaugcuccgcaguaucaaaaggauaucucucugcauuacgaacagguugguacaccucgguaauaacaauagaauuaucaaacauaaaagaaaauaaaugcaauggaaccgaugccaaaguaaaacuaaucaaacaagaacuugacaaauacaaaaacgcaguaacagaacuacaacuauuaaugcaaucaacaccagcagcagguucaggcuccgcaaucgcuucaggaauagccguuuguaaaguacuacacuuagaaggagaaguaaauaaaauaaaaaacgccuuacuaucaacaaacaaagcaguagucucccuuuccaacggaguaucagucuuaacuuuuaaaguacucgacuuaaaaaauuacaucgacaaacaacuacuacccauucuaaauaaacaaucaugcucaauaucaaacaucgaaacaguaaucgaauuucaacaaaaaaauaauagauuacuagaaauaacacgagaauuuuccguaaaugccggaguaacgaccccagucucaacauacauguuaacaaacucagaauuacuaucacucauuaacgauaugccaauaacaaaugaccaaaaaaaacuaaugucaaacaacguccaaauaguacgacaacaaucauacucuaucauguguauaauaaaagaagaaguuuuagcauacguaguacaacuaccacuuuacggagucauagacaccccaugcuggaaacuacacacaucacccuuauguacaacaaacaccaaagaagggucuaacauaugucucacuagaacagaucgaggcugguacugcgacaacgcaggaucaguuagcuuuuucccucaagccgaaaccuguaaaguacaauccaaucgaguauuuugcgacacuaugaacucuagaaccuuacccuccgaaguaaaccuauguaacauagacauauuuaaucccaaauaugauugcaaaaucaugacauccaaaacagauguaucaagcucuguaauaaccucacuaggagcaauaguuucaugcuaugguaaaacaaaaugcaccgccucaaacaaaaauagagggauaaucaaaaccuucucaaauggaugcgacuacguaucaaauaaaggaguagacaccgucuccguaggaaacacacuauacuacguaaacaaacaagaaggaaaaucacuauacguaaaaggagaaccaaucauaaacuucuacgacccacuuguuuucccaucagaugaauuugaugccuccauaucacaaguaaacgaaaaaauaaaccaaucucuagccuucaucagaaaauccgacgaacuuuuacacaacguaaacguagguaaaucaacaaccaacaucaugauaacaacaauaauaauaguaauaauuguaauacuuuuacuacuuaucgccguaggccuauucuuauauuguaaagcaagaugaggacuaguggaagcauuuuccuggcugauuaaaagaaauuacucagcuauggucaucuguuccuguuagaaggcuaugcagcauauuauauacuaugcgcauguuaugaaaugcauaauaaaaaauuuuaaaaaaucuaaaagaucuaaaaaaaaaaaaaaaaaaaaaaaaaaaaaaaaaaaaaaaaaaaaaaaaaaaaaaaaaaaaaaaaugcaucccccccccccccccccccccccccccccccaaaggcucuuuucagagccaccagaauu

SEQ ID NO: 13891 - RNA, 1919 nt, Artificial Sequence
  mRNA product Design h-3 comprising derived and/or modified sequence from HRSV(Memphis-37)__AIY60640.1__F-del_DSCav1_mut0 (opt11)
gggagacccgugacccggaaguuguacggcuacgcgacuuucccucccacaaacccucgcgcccuuccuuuccuacuugggcccggcagaaagcuuaccauggaacuaccaauccucaaaaccaacgccaucacuacaauccuagccgcgguaacccugugcuucgccuccucacaaaacaucacagaagaauuuuaccaaucaaccugcuccgccguauccaaaggauaccugagcgcccugagaaccggcugguacaccuccgucaucaccauagaacucuccaacaucaaagaaaacaaaugcaacgguacggacgccaaaguuaaacucaucaaacaagaacuugacaaauacaagaacgccgucacagaacugcaacuccucaugcaauccacccccgccgccggcuccggcuccgccauagccuccggcaucgccgucugcaaagucuuacaccuagaaggcgaagucaacaaaaucaaaaacgcacuacuuuccacaaacaaagccgucgucucacucuccaacggcguauccguccucaccuucaaaguacuugaccucaaaaacuacaucgacaaacaacuacuccccauccugaacaaacaauccugcucaaucuccaacaucgaaaccguaaucgaguuccaacagaaaaauaaucgccuccuggagaucacccgcgaguucuccgucaaugcaggagucacaaccccaguaucaaccuacaugcucaccaacuccgaacuccugucgcucaucaacgacaugcccaucacaaacgaccaaaagaaacucauguccaacaacguacaaaucgucagacaacaauccuauucuauaaugugcaucaucaaagaagaaguccucgccuacgucguacaacucccccucuacggcguuaucgacacccccugcuggaaacuccacaccucaccccucugcaccaccaacacaaaagaaggcuccaacaucugccucacucggaccgaccgcggcugguacugcgacaaugccggcagcgucuccuucuucccacaagccgaaaccugcaaaguccaguccaaccgcguauucugcgacacuaugaacuccagaacccuccccuccgaaguaaaccucugcaacaucgacaucuucaacccaaaauacgacugcaaaaucaugaccucaaaaaccgacgucagcucgucagucauaaccagccucggagccauagucucaugcuacggaaaaaccaaaugcaccgccagcaacaaaaaccgcggcauaauaaaaacauucuccaacggcugcgacuauguauccaacaaaggagucgauaccgucuccguaggcaacacccuauacuacgucaacaaacaagaaggcaaaucccucuacgucaaaggugaaccaaucaucaacuucuacgacccucucgucuuccccuccgaugaguucgacgccucaaucagccaaguaaacgaaaagauaaaccaaucacucgccuucauccgcaaauccgacgaacuucuucacaacgucaacgucggcaaaucuaccaccaacauaaugauaaccaccaucaucaucgucaucaucguaauacuccuccuucucaucgccgucggccuauuccuauacugcaaagcccgcuagggacuaguggaagcauuuuccuggcugauuaaaagaaauuacucagcuauggucaucuguuccuguuagaaggcuaugcagcauauuauauacuaugcgcauguuaugaaaugcauaauaaaaaauuuuaaaaaaucuaaaagaucuaaaaaaaaaaaaaaaaaaaaaaaaaaaaaaaaaaaaaaaaaaaaaaaaaaaaaaaaaaaaaaaaugcaucccccccccccccccccccccccccccccccaaaggcucuuuucagagccaccagaauu

SEQ ID NO: 13892 - RNA, 1982 nt, Artificial Sequence
  mRNA product Design h-4 comprising derived and/or modified sequence from HRSV(Memphis-37)__AIY60640.1__F-del_DSCav1_mut0 (opt1)
gggagagggcgcuuggcuugcaaggacccugagcugcggcauugaagcacacccaacccaacucgacugaagucagccucacugaaccggaucugagaaucuucucucucugggcuugccagggcucuccgaaccuagcuagcauccucuucaauuccaacuagaaagcuuaccauggagcugcccauccucaagaccaacgccaucaccacgauccuggccgcggugacccugugcuucgccagcucccagaacaucaccgaggaguucuaccagagcacgugcuccgccgucagcaagggcuaccucuccgcccugcgcaccgggugguacaccagcgugaucaccaucgagcuguccaacaucaaggagaacaagugcaacggcaccgacgccaaggugaagcucaucaagcaggagcuggacaaguacaagaacgcggucacggagcugcagcuccugaugcagagcaccccggccgccggcuccgggagcgcgaucgccuccggcaucgccgucugcaaggugcugcaccucgagggcgaggugaacaagaucaagaacgcccugcuguccaccaacaaggccgucgugagccucuccaacggggugagcguccugaccuucaaggugcuggaccucaagaacuacaucgacaagcagcugcugcccauccugaacaagcagagcugcuccaucagcaacaucgagaccgucaucgaguuccagcagaagaacaaccgccuccuggagaucacgcgggaguucagcgugaacgcgggcgugaccacccccgucuccaccuacaugcugacgaacagcgagcuccugucccugaucaacgacaugccgaucaccaacgaccagaagaagcucaugagcaacaacgugcagaucgugcgccagcaguccuacagcaucaugugcaucaucaaggaggagguccuggccuacguggugcagcugccccucuacggggucaucgacacccccugcuggaagcugcacaccagcccccugugcacgaccaacaccaaggagggcuccaacaucugccucacccggacggaccgcgggugguacugcgacaacgccggcagcguguccuucuucccgcaggccgagaccugcaagguccagagcaaccggguguucugcgacaccaugaacucccggacccugcccagcgaggugaaccucugcaacaucgacaucuucaaccccaaguacgacugcaagaucaugacguccaagaccgacgucagcuccagcgugaucaccucccugggcgccaucgugagcugcuacgggaagaccaagugcacggcgagcaacaagaaccgcggcaucaucaagaccuucuccaacgggugcgacuacgucagcaacaagggcguggacaccguguccgucggcaacacccuguacuacgugaacaagcaggagggcaagagccucuacgugaagggggagcccaucaucaacuucuacgacccgcuggucuuccccuccgacgaguucgacgccagcaucucccaggugaacgagaagaucaaccagagccuggccuucauccggaaguccgacgagcuccugcacaacgugaacgucggcaagagcaccacgaacaucaugaucaccaccaucaucaucgugaucaucgugauccugcugcuccugaucgccgucgggcuguuccucuacugcaaggcccgcugaggacuaguaauaaggaaacuguaugaaugucugugggcaggaagugaagagauccuucuguaaagguuuuuggaauuaugucugcugaauaauaaacuuuuuugaaauaauaaaucugguagaaaaaugagaucuaaaaaaaaaaaaaaaaaaaaaaaaaaaaaaaaaaaaaaaaaaaaaaaaaaaaaaaaaaaaaaaaugcaucccccccccccccccccccccccccccccccaaaggcucuuuucagagccaccagaauu

SEQ ID NO: 13893 - RNA, 1982 nt, Artificial Sequence
  mRNA product Design h-4 comprising derived and/or modified sequence from HRSV(Memphis-37)__AIY60640.1__F-del_DSCav1_mut0 (opt1)
gggagagggcgcuuggcuugcaaggacccugagcugcggcauugaagcacacccaacccaacucgacugaagucagccucacugaaccggaucugagaaucuucucucucugggcuugccagggcucuccgaaccuagcuagcauccucuucaauuccaacuagaaagcuuaccauggagcugcccauccucaagaccaacgccaucaccacgauccuggccgcggugacccugugcuucgccagcucccagaacaucaccgaggaguucuaccagagcacgugcuccgccgucagcaagggcuaccucuccgcccugcgcaccgggugguacaccagcgugaucaccaucgagcuguccaacaucaaggagaacaagugcaacggcaccgacgccaaggugaagcucaucaagcaggagcuggacaaguacaagaacgcggucacggagcugcagcuccugaugcagagcaccccggccgccggguccggcagcgccaucgcguccgggaucgccgugugcaaggugcugcaccucgagggcgaggucaacaagaucaagaacgcccugcugagcaccaacaaggccguggugucccucagcaacggcgucuccgugcugaccuucaaggugcuggaccucaagaacuacaucgacaagcagcugcugcccauccucaacaagcagagcugcuccaucagcaacaucgagacggucaucgaguuccagcagaagaacaaccggcugcuggagaucacccgcgaguucuccgugaacgccggggugaccacccccgucagcacguacaugcucaccaacagcgagcugcugucccucaucaacgacaugcccaucaccaacgaccagaagaagcugaugagcaacaacgugcagaucgugcggcagcaguccuacagcaucaugugcaucaucaaggaggagguccuggcguacguggugcagcucccgcuguacggcgucaucgacacccccugcuggaagcugcacacgagcccccucugcaccaccaacaccaaggagggguccaacaucugccugacgcgcaccgaccggggcugguacugcgacaacgccggguccgugagcuucuucccccaggccgagaccugcaaggugcaguccaaccgcgucuucugcgacaccaugaacagccggacgcucccguccgaggugaaccugugcaacaucgacaucuucaaccccaaguacgacugcaagaucaugaccagcaagaccgacgucuccagcuccgugaucaccagccugggcgccaucguguccugcuacggcaagacgaagugcaccgccagcaacaagaaccgggggaucaucaagaccuucuccaacggcugcgacuacgucagcaacaaggggguggacaccgugagcgucggcaacacgcucuacuacgugaacaagcaggagggcaagucccuguacgugaagggggagcccaucaucaacuucuacgacccccuggucuucccgagcgacgaguucgacgcguccaucagccaggugaacgagaagaucaaccagucccucgccuucauccgcaagagcgacgagcugcugcacaacgugaacgucggcaaguccaccaccaacaucaugaucaccaccaucaucaucgugaucaucgugauccuccugcugcucaucgccgucgggcuguuccuguacugcaaggcccggugaggacuaguaauaaggaaacuguaugaaugucugugggcaggaagugaagagauccuucuguaaagguuuuuggaauuaugucugcugaauaauaaacuuuuuugaaauaauaaaucugguagaaaaaugagaucuaaaaaaaaaaaaaaaaaaaaaaaaaaaaaaaaaaaaaaaaaaaaaaaaaaaaaaaaaaaaaaaaugcaucccccccccccccccccccccccccccccccaaaggcucuuuucagagccaccagaauu

SEQ ID NO: 13894 - RNA, 1982 nt, Artificial Sequence
  mRNA product Design h-4 comprising derived and/or modified sequence from HRSV(Memphis-37)__AIY60640.1__F-del_DSCav1_mut0 (opt2)
gggagagggcgcuuggcuugcaaggacccugagcugcggcauugaagcacacccaacccaacucgacugaagucagccucacugaaccggaucugagaaucuucucucucugggcuugccagggcucuccgaaccuagcuagcauccucuucaauuccaacuagaaagcuuaccauggagcuccccauccucaagaccaacgccaucaccaccauccucgccgccgucacccucugcuucgccuccucccagaacaucaccgaggaguucuaccaguccaccugcuccgccgucuccaagggcuaccucuccgcccuccgcaccggcugguacaccuccgucaucaccaucgagcucuccaacaucaaggagaacaagugcaacggcaccgacgccaaggucaagcucaucaagcaggagcucgacaaguacaagaacgccgucaccgagcuccagcuccucaugcaguccacccccgccgccggcuccggcuccgccaucgccuccggcaucgccgucugcaagguccuccaccucgagggcgaggucaacaagaucaagaacgcccuccucuccaccaacaaggccgucgucucccucuccaacggcgucuccguccucaccuucaagguccucgaccucaagaacuacaucgacaagcagcuccuccccauccucaacaagcaguccugcuccaucuccaacaucgagaccgucaucgaguuccagcagaagaacaaccgccuccucgagaucacccgcgaguucuccgucaacgccggcgucaccacccccgucuccaccuacaugcucaccaacuccgagcuccucucccucaucaacgacaugcccaucaccaacgaccagaagaagcucauguccaacaacguccagaucguccgccagcaguccuacuccaucaugugcaucaucaaggaggagguccucgccuacgucguccagcucccccucuacggcgucaucgacacccccugcuggaagcuccacaccuccccccucugcaccaccaacaccaaggagggcuccaacaucugccucacccgcaccgaccgcggcugguacugcgacaacgccggcuccgucuccuucuucccccaggccgagaccugcaagguccaguccaaccgcgucuucugcgacaccaugaacucccgcacccuccccuccgaggucaaccucugcaacaucgacaucuucaaccccaaguacgacugcaagaucaugaccuccaagaccgacgucuccuccuccgucaucaccucccucggcgccaucgucuccugcuacggcaagaccaagugcaccgccuccaacaagaaccgcggcaucaucaagaccuucuccaacggcugcgacuacgucuccaacaagggcgucgacaccgucuccgucggcaacacccucuacuacgucaacaagcaggagggcaagucccucuacgucaagggcgagcccaucaucaacuucuacgacccccucgucuuccccuccgacgaguucgacgccuccaucucccaggucaacgagaagaucaaccagucccucgccuucauccgcaaguccgacgagcuccuccacaacgucaacgucggcaaguccaccaccaacaucaugaucaccaccaucaucaucgucaucaucgucauccuccuccuccucaucgccgucggccucuuccucuacugcaaggcccgcugaggacuaguaauaaggaaacuguaugaaugucugugggcaggaagugaagagauccuucuguaaagguuuuuggaauuaugucugcugaauaauaaacuuuuuugaaauaauaaaucugguagaaaaaugagaucuaaaaaaaaaaaaaaaaaaaaaaaaaaaaaaaaaaaaaaaaaaaaaaaaaaaaaaaaaaaaaaaaugcaucccccccccccccccccccccccccccccccaaaggcucuuuucagagccaccagaauu

SEQ ID NO: 13895 - RNA, 1982 nt, Artificial Sequence
  mRNA product Design h-4 comprising derived and/or modified sequence from HRSV(Memphis-37)__AIY60640.1__F-del_DSCav1_mut0 (opt3)
gggagagggcgcuuggcuugcaaggacccugagcugcggcauugaagcacacccaacccaacucgacugaagucagccucacugaaccggaucugagaaucuucucucucugggcuugccagggcucuccgaaccuagcuagcauccucuucaauuccaacuagaaagcuuaccauggagcugcccauccucaagaccaacgccauuacaacuauacuugcugcagugacgcugugcuucgccagcucccagaauaucaccgaagaguuuuaccaaucuacauguucagcggucaguaaaggcuauuugagcgcuuuaagaacugggugguacaccuccguuauuacaaucgaacugucuaacauuaaggagaauaaaugcaacggaaccgacgccaaggugaaacuaaucaagcaggaacucgauaaguauaaaaaugcaguaacugagcugcagcuucugaugcagucgaccccugccgcugguucaggcagcgcaauagccagugggaucgcuguguguaaggucuugcaccucgagggagaagugaacaaaauuaagaaugcccugcuguccacaaacaaagcgguugugucucucagcaauggcgucuccguguuaacguucaagguacuggaccuuaagaacuacaucgauaaacaauugcugccaauucuaaauaagcagucaugcaguaucagcaacauagagacuguuauugaauuucagcagaaaaauaacaggcuccuggagaucacccgggaguucucugugaaugccggugucacaacuccgguguccaccuauaugcuuacaaacucagaacuguugagccucauuaacgacaugcccaucaccaaugaucaaaagaaacugaugaguaacaaugugcagaucguccgccagcagucuuacuccauuauguguauaaucaaggaggaaguuuuagcauaugugguacaacugccucucuacggggugauugacacgccaugcuggaaacuucauacuagcccccuguguacaaccaacacuaaggagggaucgaauaucugcuugacacgaaccgaucguggcugguacugugacaacgcuggcucugucuccuuuuucccucaggccgaaacgugcaaggugcagucaaauagaguguuuugugauaccaugaacaguagaacacugccaagcgaggugaaucucugcaacauagacauuuucaaucccaaauaugauugcaagaucaugacuuccaaaaccgacgucucuagcucagugaucacaagucugggggcaauuguauccuguuacggaaagacuaaaugcaccgcuagcaacaagaauagggguaucauuaagacauuuucuaacggcugugauuauguuucaaauaaagggguggacaccgucagugugggaaacacucuuuacuaugucaacaagcaagagggcaaaagccuguacgugaagggugaaccuauaaucaauuucuaugacccauugguuuuuccguccgaugaguucgacgccucuauuucgcagguuaacgagaaaaucaaucagagccucgcguuuauccggaaguccgaugaacuguuacacaacguaaaugucgggaagucaacgacaaacauuaugauaaccacuaucauuaucgugauuaucguuauacugcuacuccugaucgccgugggacuuuucuuguacugcaaagcacgcugaggacuaguaauaaggaaacuguaugaaugucugugggcaggaagugaagagauccuucuguaaagguuuuuggaauuaugucugcugaauaauaaacuuuuuugaaauaauaaaucugguagaaaaaugagaucuaaaaaaaaaaaaaaaaaaaaaaaaaaaaaaaaaaaaaaaaaaaaaaaaaaaaaaaaaaaaaaaaugcaucccccccccccccccccccccccccccccccaaaggcucuuuucagagccaccagaauu

SEQ ID NO: 13896 - RNA, 1982 nt, Artificial Sequence
  mRNA product Design h-4 comprising derived and/or modified sequence from HRSV(Memphis-37)__AIY60640.1__F-del_DSCav1_mut0 (opt4)
gggagagggcgcuuggcuugcaaggacccugagcugcggcauugaagcacacccaacccaacucgacugaagucagccucacugaaccggaucugagaaucuucucucucugggcuugccagggcucuccgaaccuagcuagcauccucuucaauuccaacuagaaagcuuaccauggagcugcccauccugaagaccaacgccaucaccaccauccuggccgccgugacccugugcuucgccagcagccagaacaucaccgaggaguucuaccagagcaccugcagcgccgugagcaagggcuaccugagcgcccugagaaccggcugguacaccagcgugaucaccaucgagcugagcaacaucaaggagaacaagugcaacggcaccgacgccaaggugaagcugaucaagcaggagcuggacaaguacaagaacgccgugaccgagcugcagcugcugaugcagagcacccccgccgccggcagcggcagcgccaucgccagcggcaucgccgugugcaaggugcugcaccuggagggcgaggugaacaagaucaagaacgcccugcugagcaccaacaaggccguggugagccugagcaacggcgugagcgugcugaccuucaaggugcuggaccugaagaacuacaucgacaagcagcugcugcccauccugaacaagcagagcugcagcaucagcaacaucgagaccgugaucgaguuccagcagaagaacaacagacugcuggagaucaccagagaguucagcgugaacgccggcgugaccacccccgugagcaccuacaugcugaccaacagcgagcugcugagccugaucaacgacaugcccaucaccaacgaccagaagaagcugaugagcaacaacgugcagaucgugagacagcagagcuacagcaucaugugcaucaucaaggaggaggugcuggccuacguggugcagcugccccuguacggcgugaucgacacccccugcuggaagcugcacaccagcccccugugcaccaccaacaccaaggagggcagcaacaucugccugaccagaaccgacagaggcugguacugcgacaacgccggcagcgugagcuucuucccccaggccgagaccugcaaggugcagagcaacagaguguucugcgacaccaugaacagcagaacccugcccagcgaggugaaccugugcaacaucgacaucuucaaccccaaguacgacugcaagaucaugaccagcaagaccgacgugagcagcagcgugaucaccagccugggcgccaucgugagcugcuacggcaagaccaagugcaccgccagcaacaagaacagaggcaucaucaagaccuucagcaacggcugcgacuacgugagcaacaagggcguggacaccgugagcgugggcaacacccuguacuacgugaacaagcaggagggcaagagccuguacgugaagggcgagcccaucaucaacuucuacgacccccugguguuccccagcgacgaguucgacgccagcaucagccaggugaacgagaagaucaaccagagccuggccuucaucagaaagagcgacgagcugcugcacaacgugaacgugggcaagagcaccaccaacaucaugaucaccaccaucaucaucgugaucaucgugauccugcugcugcugaucgccgugggccuguuccuguacugcaaggccagaugaggacuaguaauaaggaaacuguaugaaugucugugggcaggaagugaagagauccuucuguaaagguuuuuggaauuaugucugcugaauaauaaacuuuuuugaaauaauaaaucugguagaaaaaugagaucuaaaaaaaaaaaaaaaaaaaaaaaaaaaaaaaaaaaaaaaaaaaaaaaaaaaaaaaaaaaaaaaaugcaucccccccccccccccccccccccccccccccaaaggcucuuuucagagccaccagaauu

SEQ ID NO: 13897 - RNA, 1982 nt, Artificial Sequence
  mRNA product Design h-4 comprising derived and/or modified sequence from HRSV(Memphis-37)__AIY60640.1__F-del_DSCav1_mut0 (opt5)
gggagagggcgcuuggcuugcaaggacccugagcugcggcauugaagcacacccaacccaacucgacugaagucagccucacugaaccggaucugagaaucuucucucucugggcuugccagggcucuccgaaccuagcuagcauccucuucaauuccaacuagaaagcuuaccauggagcugcccauccucaagaccaacgccauuacaacgauccuggcugccgugacccuuugcuucgcgagcucccagaauauuacagaagaguuuuaccaaucuaccuguagcgcugucuccaaaggcuaucugucugcccucagaacagggugguacaccagcguuaucacaauugaacuguccaacaucaaggagaauaaaugcaacggaaccgacgccaaggugaaacuuaucaagcaggaacuggauaaguauaaaaaugcugugacggagcuccagcugcugaugcagucuaccccugccgcuggcagcggguccgccauugcgagcggaaucgccgucuguaaggugcuccaccuggagggcgaaguuaacaaaauuaagaaugcccuucugucuacaaacaaagcuguggucucccucagcaauggggugucuguucugaccuucaaggugcuugaccugaagaacuacaucgauaaacaacuccugccgauucugaauaagcaguccugcagcaucucuaacauugagacagucaucgaauuucagcagaaaaauaaccggcuccuggagaucacccgcgaguucuccgugaaugcuggagugacgacacccgucagcaccuauaugcuuacaaacuccgaacugcucucucugauuaacgacaugccuaucaccaaugaucaaaagaaacuuaugagcaacaauguucagauugugagacagcaguccuacagcaucauguguauuaucaaggaggaagugcuggccuaugucgugcaacucccccuguacggcguuaucgacaccccuugcuggaaacugcauacaucuccccucuguacgaccaacacaaaggagggcuccaauauuugccugacccggacagaucgcgggugguacugugacaacgcgggaagcgugagcuuuuucccucaggccgaaaccugcaagguccagucuaauagaguguuuugugauacgaugaacuccagaacacugccgucugagguuaaucucugcaacaucgacauuuucaaucccaaauaugauugcaagaucaugaccagcaaaaccgacguguccagcucugucauuacaucccugggcgcuaucgugagcuguuacgggaagaccaaaugcacagccucuaacaagaaucggggaaucauuaagacguuuuccaacggcugugauuaugucagcaauaaagggguggacaccguuuccgugggaaacacacuuuacuaugucaacaagcaagagggcaaaucucuguacgugaagggcgaaccuaucauuaauuucuaugacccccucguuuuuccuagcgaugaguucgacgcuuccaucucucaggugaacgaaaagauuaaucagagccuggccuuuauccgcaaguccgaugagcugcuccacaacgucaauguggggaaaagcaccacaaacauuaugaucaccacgaucauuaucgugauuaucguuauucugcuucugcucaucgccgucggacuguuccuguacugcaaagcuagaugaggacuaguaauaaggaaacuguaugaaugucugugggcaggaagugaagagauccuucuguaaagguuuuuggaauuaugucugcugaauaauaaacuuuuuugaaauaauaaaucugguagaaaaaugagaucuaaaaaaaaaaaaaaaaaaaaaaaaaaaaaaaaaaaaaaaaaaaaaaaaaaaaaaaaaaaaaaaaugcaucccccccccccccccccccccccccccccccaaaggcucuuuucagagccaccagaauu

SEQ ID NO: 13898 - RNA, 1982 nt, Artificial Sequence
  mRNA product Design h-4 comprising derived and/or modified sequence from HRSV(Memphis-37)__AIY60640.1__F-del_DSCav1_mut0 (opt6)
gggagagggcgcuuggcuugcaaggacccugagcugcggcauugaagcacacccaacccaacucgacugaagucagccucacugaaccggaucugagaaucuucucucucugggcuugccagggcucuccgaaccuagcuagcauccucuucaauuccaacuagaaagcuuaccauggaacucccaauacuuaaaacaaacgcaaucacaacaauacuagcugcagucacacuaugcuucgccucaucacaaaauauaacagaagaauuuuaucaaucaacaugcuccgcaguaucaaaaggauaucucucugcauuacgaacagguugguacaccucgguaauaacaauagaauuaucaaacauaaaagaaaauaaaugcaauggaaccgaugccaaaguaaaacuaaucaaacaagaacuugacaaauacaaaaacgcaguaacagaacuacaacuauuaaugcaaucaacaccagcagcagguucaggcuccgcaaucgcuucaggaauagccguuuguaaaguacuacacuuagaaggagaaguaaauaaaauaaaaaacgccuuacuaucaacaaacaaagcaguagucucccuuuccaacggaguaucagucuuaacuuuuaaaguacucgacuuaaaaaauuacaucgacaaacaacuacuacccauucuaaauaaacaaucaugcucaauaucaaacaucgaaacaguaaucgaauuucaacaaaaaaauaauagauuacuagaaauaacacgagaauuuuccguaaaugccggaguaacgaccccagucucaacauacauguuaacaaacucagaauuacuaucacucauuaacgauaugccaauaacaaaugaccaaaaaaaacuaaugucaaacaacguccaaauaguacgacaacaaucauacucuaucauguguauaauaaaagaagaaguuuuagcauacguaguacaacuaccacuuuacggagucauagacaccccaugcuggaaacuacacacaucacccuuauguacaacaaacaccaaagaagggucuaacauaugucucacuagaacagaucgaggcugguacugcgacaacgcaggaucaguuagcuuuuucccucaagccgaaaccuguaaaguacaauccaaucgaguauuuugcgacacuaugaacucuagaaccuuacccuccgaaguaaaccuauguaacauagacauauuuaaucccaaauaugauugcaaaaucaugacauccaaaacagauguaucaagcucuguaauaaccucacuaggagcaauaguuucaugcuaugguaaaacaaaaugcaccgccucaaacaaaaauagagggauaaucaaaaccuucucaaauggaugcgacuacguaucaaauaaaggaguagacaccgucuccguaggaaacacacuauacuacguaaacaaacaagaaggaaaaucacuauacguaaaaggagaaccaaucauaaacuucuacgacccacuuguuuucccaucagaugaauuugaugccuccauaucacaaguaaacgaaaaaauaaaccaaucucuagccuucaucagaaaauccgacgaacuuuuacacaacguaaacguagguaaaucaacaaccaacaucaugauaacaacaauaauaauaguaauaauuguaauacuuuuacuacuuaucgccguaggccuauucuuauauuguaaagcaagaugaggacuaguaauaaggaaacuguaugaaugucugugggcaggaagugaagagauccuucuguaaagguuuuuggaauuaugucugcugaauaauaaacuuuuuugaaauaauaaaucugguagaaaaaugagaucuaaaaaaaaaaaaaaaaaaaaaaaaaaaaaaaaaaaaaaaaaaaaaaaaaaaaaaaaaaaaaaaaugcaucccccccccccccccccccccccccccccccaaaggcucuuuucagagccaccagaauu

SEQ ID NO: 13899 - RNA, 1982 nt, Artificial Sequence
  mRNA product Design h-4 comprising derived and/or modified sequence from HRSV(Memphis-37)__AIY60640.1__F-del_DSCav1_mut0 (opt11)
gggagagggcgcuuggcuugcaaggacccugagcugcggcauugaagcacacccaacccaacucgacugaagucagccucacugaaccggaucugagaaucuucucucucugggcuugccagggcucuccgaaccuagcuagcauccucuucaauuccaacuagaaagcuuaccauggaacuaccaauccucaaaaccaacgccaucacuacaauccuagccgcgguaacccugugcuucgccuccucacaaaacaucacagaagaauuuuaccaaucaaccugcuccgccguauccaaaggauaccugagcgcccugagaaccggcugguacaccuccgucaucaccauagaacucuccaacaucaaagaaaacaaaugcaacgguacggacgccaaaguuaaacucaucaaacaagaacuugacaaauacaagaacgccgucacagaacugcaacuccucaugcaauccacccccgccgccggcuccggcuccgccauagccuccggcaucgccgucugcaaagucuuacaccuagaaggcgaagucaacaaaaucaaaaacgcacuacuuuccacaaacaaagccgucgucucacucuccaacggcguauccguccucaccuucaaaguacuugaccucaaaaacuacaucgacaaacaacuacuccccauccugaacaaacaauccugcucaaucuccaacaucgaaaccguaaucgaguuccaacagaaaaauaaucgccuccuggagaucacccgcgaguucuccgucaaugcaggagucacaaccccaguaucaaccuacaugcucaccaacuccgaacuccugucgcucaucaacgacaugcccaucacaaacgaccaaaagaaacucauguccaacaacguacaaaucgucagacaacaauccuauucuauaaugugcaucaucaaagaagaaguccucgccuacgucguacaacucccccucuacggcguuaucgacacccccugcuggaaacuccacaccucaccccucugcaccaccaacacaaaagaaggcuccaacaucugccucacucggaccgaccgcggcugguacugcgacaaugccggcagcgucuccuucuucccacaagccgaaaccugcaaaguccaguccaaccgcguauucugcgacacuaugaacuccagaacccuccccuccgaaguaaaccucugcaacaucgacaucuucaacccaaaauacgacugcaaaaucaugaccucaaaaaccgacgucagcucgucagucauaaccagccucggagccauagucucaugcuacggaaaaaccaaaugcaccgccagcaacaaaaaccgcggcauaauaaaaacauucuccaacggcugcgacuauguauccaacaaaggagucgauaccgucuccguaggcaacacccuauacuacgucaacaaacaagaaggcaaaucccucuacgucaaaggugaaccaaucaucaacuucuacgacccucucgucuuccccuccgaugaguucgacgccucaaucagccaaguaaacgaaaagauaaaccaaucacucgccuucauccgcaaauccgacgaacuucuucacaacgucaacgucggcaaaucuaccaccaacauaaugauaaccaccaucaucaucgucaucaucguaauacuccuccuucucaucgccgucggccuauuccuauacugcaaagcccgcuagggacuaguaauaaggaaacuguaugaaugucugugggcaggaagugaagagauccuucuguaaagguuuuuggaauuaugucugcugaauaauaaacuuuuuugaaauaauaaaucugguagaaaaaugagaucuaaaaaaaaaaaaaaaaaaaaaaaaaaaaaaaaaaaaaaaaaaaaaaaaaaaaaaaaaaaaaaaaugcaucccccccccccccccccccccccccccccccaaaggcucuuuucagagccaccagaauu

SEQ ID NO: 13900 - RNA, 1998 nt, Artificial Sequence
  mRNA product Design h-5 comprising derived and/or modified sequence from HRSV(Memphis-37)__AIY60640.1__F-del_DSCav1_mut0 (opt1)
gggagagggcgcuuggcuugcaaggacccugagcugcggcauugaagcacacccaacccaacucgacugaagucagccucacugaaccggaucugagaaucuucucucucugggcuugccagggcucuccgaaccuagcuagcauccucuucaauuccaacuagaaagcuuaccauggagcugcccauccucaagaccaacgccaucaccacgauccuggccgcggugacccugugcuucgccagcucccagaacaucaccgaggaguucuaccagagcacgugcuccgccgucagcaagggcuaccucuccgcccugcgcaccgggugguacaccagcgugaucaccaucgagcuguccaacaucaaggagaacaagugcaacggcaccgacgccaaggugaagcucaucaagcaggagcuggacaaguacaagaacgcggucacggagcugcagcuccugaugcagagcaccccggccgccggcuccgggagcgcgaucgccuccggcaucgccgucugcaaggugcugcaccucgagggcgaggugaacaagaucaagaacgcccugcuguccaccaacaaggccgucgugagccucuccaacggggugagcguccugaccuucaaggugcuggaccucaagaacuacaucgacaagcagcugcugcccauccugaacaagcagagcugcuccaucagcaacaucgagaccgucaucgaguuccagcagaagaacaaccgccuccuggagaucacgcgggaguucagcgugaacgcgggcgugaccacccccgucuccaccuacaugcugacgaacagcgagcuccugucccugaucaacgacaugccgaucaccaacgaccagaagaagcucaugagcaacaacgugcagaucgugcgccagcaguccuacagcaucaugugcaucaucaaggaggagguccuggccuacguggugcagcugccccucuacggggucaucgacacccccugcuggaagcugcacaccagcccccugugcacgaccaacaccaaggagggcuccaacaucugccucacccggacggaccgcgggugguacugcgacaacgccggcagcguguccuucuucccgcaggccgagaccugcaagguccagagcaaccggguguucugcgacaccaugaacucccggacccugcccagcgaggugaaccucugcaacaucgacaucuucaaccccaaguacgacugcaagaucaugacguccaagaccgacgucagcuccagcgugaucaccucccugggcgccaucgugagcugcuacgggaagaccaagugcacggcgagcaacaagaaccgcggcaucaucaagaccuucuccaacgggugcgacuacgucagcaacaagggcguggacaccguguccgucggcaacacccuguacuacgugaacaagcaggagggcaagagccucuacgugaagggggagcccaucaucaacuucuacgacccgcuggucuuccccuccgacgaguucgacgccagcaucucccaggugaacgagaagaucaaccagagccuggccuucauccggaaguccgacgagcuccugcacaacgugaacgucggcaagagcaccacgaacaucaugaucaccaccaucaucaucgugaucaucgugauccugcugcuccugaucgccgucgggcuguuccucuacugcaaggcccgcugaggacuaguacuggcugcaucucccuuuccucuguccuccauccuucucccaggauggugaagggggaccugguacccagugauccccaccccaggauccuaaaucaugacuuaccugcuaauaaaaacucauuggaaaagugagaagaucuaaaaaaaaaaaaaaaaaaaaaaaaaaaaaaaaaaaaaaaaaaaaaaaaaaaaaaaaaaaaaaaaugcaucccccccccccccccccccccccccccccccaaaggcucuuuucagagccaccagaauu

SEQ ID NO: 13901 - RNA, 1998 nt, Artificial Sequence
  mRNA product Design h-5 comprising derived and/or modified sequence from HRSV(Memphis-37)__AIY60640.1__F-del_DSCav1_mut0 (opt1)
gggagagggcgcuuggcuugcaaggacccugagcugcggcauugaagcacacccaacccaacucgacugaagucagccucacugaaccggaucugagaaucuucucucucugggcuugccagggcucuccgaaccuagcuagcauccucuucaauuccaacuagaaagcuuaccauggagcugcccauccucaagaccaacgccaucaccacgauccuggccgcggugacccugugcuucgccagcucccagaacaucaccgaggaguucuaccagagcacgugcuccgccgucagcaagggcuaccucuccgcccugcgcaccgggugguacaccagcgugaucaccaucgagcuguccaacaucaaggagaacaagugcaacggcaccgacgccaaggugaagcucaucaagcaggagcuggacaaguacaagaacgcggucacggagcugcagcuccugaugcagagcaccccggccgccggguccggcagcgccaucgcguccgggaucgccgugugcaaggugcugcaccucgagggcgaggucaacaagaucaagaacgcccugcugagcaccaacaaggccguggugucccucagcaacggcgucuccgugcugaccuucaaggugcuggaccucaagaacuacaucgacaagcagcugcugcccauccucaacaagcagagcugcuccaucagcaacaucgagacggucaucgaguuccagcagaagaacaaccggcugcuggagaucacccgcgaguucuccgugaacgccggggugaccacccccgucagcacguacaugcucaccaacagcgagcugcugucccucaucaacgacaugcccaucaccaacgaccagaagaagcugaugagcaacaacgugcagaucgugcggcagcaguccuacagcaucaugugcaucaucaaggaggagguccuggcguacguggugcagcucccgcuguacggcgucaucgacacccccugcuggaagcugcacacgagcccccucugcaccaccaacaccaaggagggguccaacaucugccugacgcgcaccgaccggggcugguacugcgacaacgccggguccgugagcuucuucccccaggccgagaccugcaaggugcaguccaaccgcgucuucugcgacaccaugaacagccggacgcucccguccgaggugaaccugugcaacaucgacaucuucaaccccaaguacgacugcaagaucaugaccagcaagaccgacgucuccagcuccgugaucaccagccugggcgccaucguguccugcuacggcaagacgaagugcaccgccagcaacaagaaccgggggaucaucaagaccuucuccaacggcugcgacuacgucagcaacaaggggguggacaccgugagcgucggcaacacgcucuacuacgugaacaagcaggagggcaagucccuguacgugaagggggagcccaucaucaacuucuacgacccccuggucuucccgagcgacgaguucgacgcguccaucagccaggugaacgagaagaucaaccagucccucgccuucauccgcaagagcgacgagcugcugcacaacgugaacgucggcaaguccaccaccaacaucaugaucaccaccaucaucaucgugaucaucgugauccuccugcugcucaucgccgucgggcuguuccuguacugcaaggcccggugaggacuaguacuggcugcaucucccuuuccucuguccuccauccuucucccaggauggugaagggggaccugguacccagugauccccaccccaggauccuaaaucaugacuuaccugcuaauaaaaacucauuggaaaagugagaagaucuaaaaaaaaaaaaaaaaaaaaaaaaaaaaaaaaaaaaaaaaaaaaaaaaaaaaaaaaaaaaaaaaugcaucccccccccccccccccccccccccccccccaaaggcucuuuucagagccaccagaauu

SEQ ID NO: 13902 - RNA, 1998 nt, Artificial Sequence
  mRNA product Design h-5 comprising derived and/or modified sequence from HRSV(Memphis-37)__AIY60640.1__F-del_DSCav1_mut0 (opt2)
gggagagggcgcuuggcuugcaaggacccugagcugcggcauugaagcacacccaacccaacucgacugaagucagccucacugaaccggaucugagaaucuucucucucugggcuugccagggcucuccgaaccuagcuagcauccucuucaauuccaacuagaaagcuuaccauggagcuccccauccucaagaccaacgccaucaccaccauccucgccgccgucacccucugcuucgccuccucccagaacaucaccgaggaguucuaccaguccaccugcuccgccgucuccaagggcuaccucuccgcccuccgcaccggcugguacaccuccgucaucaccaucgagcucuccaacaucaaggagaacaagugcaacggcaccgacgccaaggucaagcucaucaagcaggagcucgacaaguacaagaacgccgucaccgagcuccagcuccucaugcaguccacccccgccgccggcuccggcuccgccaucgccuccggcaucgccgucugcaagguccuccaccucgagggcgaggucaacaagaucaagaacgcccuccucuccaccaacaaggccgucgucucccucuccaacggcgucuccguccucaccuucaagguccucgaccucaagaacuacaucgacaagcagcuccuccccauccucaacaagcaguccugcuccaucuccaacaucgagaccgucaucgaguuccagcagaagaacaaccgccuccucgagaucacccgcgaguucuccgucaacgccggcgucaccacccccgucuccaccuacaugcucaccaacuccgagcuccucucccucaucaacgacaugcccaucaccaacgaccagaagaagcucauguccaacaacguccagaucguccgccagcaguccuacuccaucaugugcaucaucaaggaggagguccucgccuacgucguccagcucccccucuacggcgucaucgacacccccugcuggaagcuccacaccuccccccucugcaccaccaacaccaaggagggcuccaacaucugccucacccgcaccgaccgcggcugguacugcgacaacgccggcuccgucuccuucuucccccaggccgagaccugcaagguccaguccaaccgcgucuucugcgacaccaugaacucccgcacccuccccuccgaggucaaccucugcaacaucgacaucuucaaccccaaguacgacugcaagaucaugaccuccaagaccgacgucuccuccuccgucaucaccucccucggcgccaucgucuccugcuacggcaagaccaagugcaccgccuccaacaagaaccgcggcaucaucaagaccuucuccaacggcugcgacuacgucuccaacaagggcgucgacaccgucuccgucggcaacacccucuacuacgucaacaagcaggagggcaagucccucuacgucaagggcgagcccaucaucaacuucuacgacccccucgucuuccccuccgacgaguucgacgccuccaucucccaggucaacgagaagaucaaccagucccucgccuucauccgcaaguccgacgagcuccuccacaacgucaacgucggcaaguccaccaccaacaucaugaucaccaccaucaucaucgucaucaucgucauccuccuccuccucaucgccgucggccucuuccucuacugcaaggcccgcugaggacuaguacuggcugcaucucccuuuccucuguccuccauccuucucccaggauggugaagggggaccugguacccagugauccccaccccaggauccuaaaucaugacuuaccugcuaauaaaaacucauuggaaaagugagaagaucuaaaaaaaaaaaaaaaaaaaaaaaaaaaaaaaaaaaaaaaaaaaaaaaaaaaaaaaaaaaaaaaaugcaucccccccccccccccccccccccccccccccaaaggcucuuuucagagccaccagaauu

SEQ ID NO: 13903 - RNA, 1998 nt, Artificial Sequence
  mRNA product Design h-5 comprising derived and/or modified sequence from HRSV(Memphis-37)__AIY60640.1__F-del_DSCav1_mut0 (opt3)
gggagagggcgcuuggcuugcaaggacccugagcugcggcauugaagcacacccaacccaacucgacugaagucagccucacugaaccggaucugagaaucuucucucucugggcuugccagggcucuccgaaccuagcuagcauccucuucaauuccaacuagaaagcuuaccauggagcugcccauccucaagaccaacgccauuacaacuauacuugcugcagugacgcugugcuucgccagcucccagaauaucaccgaagaguuuuaccaaucuacauguucagcggucaguaaaggcuauuugagcgcuuuaagaacugggugguacaccuccguuauuacaaucgaacugucuaacauuaaggagaauaaaugcaacggaaccgacgccaaggugaaacuaaucaagcaggaacucgauaaguauaaaaaugcaguaacugagcugcagcuucugaugcagucgaccccugccgcugguucaggcagcgcaauagccagugggaucgcuguguguaaggucuugcaccucgagggagaagugaacaaaauuaagaaugcccugcuguccacaaacaaagcgguugugucucucagcaauggcgucuccguguuaacguucaagguacuggaccuuaagaacuacaucgauaaacaauugcugccaauucuaaauaagcagucaugcaguaucagcaacauagagacuguuauugaauuucagcagaaaaauaacaggcuccuggagaucacccgggaguucucugugaaugccggugucacaacuccgguguccaccuauaugcuuacaaacucagaacuguugagccucauuaacgacaugcccaucaccaaugaucaaaagaaacugaugaguaacaaugugcagaucguccgccagcagucuuacuccauuauguguauaaucaaggaggaaguuuuagcauaugugguacaacugccucucuacggggugauugacacgccaugcuggaaacuucauacuagcccccuguguacaaccaacacuaaggagggaucgaauaucugcuugacacgaaccgaucguggcugguacugugacaacgcuggcucugucuccuuuuucccucaggccgaaacgugcaaggugcagucaaauagaguguuuugugauaccaugaacaguagaacacugccaagcgaggugaaucucugcaacauagacauuuucaaucccaaauaugauugcaagaucaugacuuccaaaaccgacgucucuagcucagugaucacaagucugggggcaauuguauccuguuacggaaagacuaaaugcaccgcuagcaacaagaauagggguaucauuaagacauuuucuaacggcugugauuauguuucaaauaaagggguggacaccgucagugugggaaacacucuuuacuaugucaacaagcaagagggcaaaagccuguacgugaagggugaaccuauaaucaauuucuaugacccauugguuuuuccguccgaugaguucgacgccucuauuucgcagguuaacgagaaaaucaaucagagccucgcguuuauccggaaguccgaugaacuguuacacaacguaaaugucgggaagucaacgacaaacauuaugauaaccacuaucauuaucgugauuaucguuauacugcuacuccugaucgccgugggacuuuucuuguacugcaaagcacgcugaggacuaguacuggcugcaucucccuuuccucuguccuccauccuucucccaggauggugaagggggaccugguacccagugauccccaccccaggauccuaaaucaugacuuaccugcuaauaaaaacucauuggaaaagugagaagaucuaaaaaaaaaaaaaaaaaaaaaaaaaaaaaaaaaaaaaaaaaaaaaaaaaaaaaaaaaaaaaaaaugcaucccccccccccccccccccccccccccccccaaaggcucuuuucagagccaccagaauu

SEQ ID NO: 13904 - RNA, 1998 nt, Artificial Sequence
  mRNA product Design h-5 comprising derived and/or modified sequence from HRSV(Memphis-37)__AIY60640.1__F-del_DSCav1_mut0 (opt4)
gggagagggcgcuuggcuugcaaggacccugagcugcggcauugaagcacacccaacccaacucgacugaagucagccucacugaaccggaucugagaaucuucucucucugggcuugccagggcucuccgaaccuagcuagcauccucuucaauuccaacuagaaagcuuaccauggagcugcccauccugaagaccaacgccaucaccaccauccuggccgccgugacccugugcuucgccagcagccagaacaucaccgaggaguucuaccagagcaccugcagcgccgugagcaagggcuaccugagcgcccugagaaccggcugguacaccagcgugaucaccaucgagcugagcaacaucaaggagaacaagugcaacggcaccgacgccaaggugaagcugaucaagcaggagcuggacaaguacaagaacgccgugaccgagcugcagcugcugaugcagagcacccccgccgccggcagcggcagcgccaucgccagcggcaucgccgugugcaaggugcugcaccuggagggcgaggugaacaagaucaagaacgcccugcugagcaccaacaaggccguggugagccugagcaacggcgugagcgugcugaccuucaaggugcuggaccugaagaacuacaucgacaagcagcugcugcccauccugaacaagcagagcugcagcaucagcaacaucgagaccgugaucgaguuccagcagaagaacaacagacugcuggagaucaccagagaguucagcgugaacgccggcgugaccacccccgugagcaccuacaugcugaccaacagcgagcugcugagccugaucaacgacaugcccaucaccaacgaccagaagaagcugaugagcaacaacgugcagaucgugagacagcagagcuacagcaucaugugcaucaucaaggaggaggugcuggccuacguggugcagcugccccuguacggcgugaucgacacccccugcuggaagcugcacaccagcccccugugcaccaccaacaccaaggagggcagcaacaucugccugaccagaaccgacagaggcugguacugcgacaacgccggcagcgugagcuucuucccccaggccgagaccugcaaggugcagagcaacagaguguucugcgacaccaugaacagcagaacccugcccagcgaggugaaccugugcaacaucgacaucuucaaccccaaguacgacugcaagaucaugaccagcaagaccgacgugagcagcagcgugaucaccagccugggcgccaucgugagcugcuacggcaagaccaagugcaccgccagcaacaagaacagaggcaucaucaagaccuucagcaacggcugcgacuacgugagcaacaagggcguggacaccgugagcgugggcaacacccuguacuacgugaacaagcaggagggcaagagccuguacgugaagggcgagcccaucaucaacuucuacgacccccugguguuccccagcgacgaguucgacgccagcaucagccaggugaacgagaagaucaaccagagccuggccuucaucagaaagagcgacgagcugcugcacaacgugaacgugggcaagagcaccaccaacaucaugaucaccaccaucaucaucgugaucaucgugauccugcugcugcugaucgccgugggccuguuccuguacugcaaggccagaugaggacuaguacuggcugcaucucccuuuccucuguccuccauccuucucccaggauggugaagggggaccugguacccagugauccccaccccaggauccuaaaucaugacuuaccugcuaauaaaaacucauuggaaaagugagaagaucuaaaaaaaaaaaaaaaaaaaaaaaaaaaaaaaaaaaaaaaaaaaaaaaaaaaaaaaaaaaaaaaaugcaucccccccccccccccccccccccccccccccaaaggcucuuuucagagccaccagaauu

SEQ ID NO: 13905 - RNA, 1998 nt, Artificial Sequence
  mRNA product Design h-5 comprising derived and/or modified sequence from HRSV(Memphis-37)__AIY60640.1__F-del_DSCav1_mut0 (opt5)
gggagagggcgcuuggcuugcaaggacccugagcugcggcauugaagcacacccaacccaacucgacugaagucagccucacugaaccggaucugagaaucuucucucucugggcuugccagggcucuccgaaccuagcuagcauccucuucaauuccaacuagaaagcuuaccauggagcugcccauccucaagaccaacgccauuacaacgauccuggcugccgugacccuuugcuucgcgagcucccagaauauuacagaagaguuuuaccaaucuaccuguagcgcugucuccaaaggcuaucugucugcccucagaacagggugguacaccagcguuaucacaauugaacuguccaacaucaaggagaauaaaugcaacggaaccgacgccaaggugaaacuuaucaagcaggaacuggauaaguauaaaaaugcugugacggagcuccagcugcugaugcagucuaccccugccgcuggcagcggguccgccauugcgagcggaaucgccgucuguaaggugcuccaccuggagggcgaaguuaacaaaauuaagaaugcccuucugucuacaaacaaagcuguggucucccucagcaauggggugucuguucugaccuucaaggugcuugaccugaagaacuacaucgauaaacaacuccugccgauucugaauaagcaguccugcagcaucucuaacauugagacagucaucgaauuucagcagaaaaauaaccggcuccuggagaucacccgcgaguucuccgugaaugcuggagugacgacacccgucagcaccuauaugcuuacaaacuccgaacugcucucucugauuaacgacaugccuaucaccaaugaucaaaagaaacuuaugagcaacaauguucagauugugagacagcaguccuacagcaucauguguauuaucaaggaggaagugcuggccuaugucgugcaacucccccuguacggcguuaucgacaccccuugcuggaaacugcauacaucuccccucuguacgaccaacacaaaggagggcuccaauauuugccugacccggacagaucgcgggugguacugugacaacgcgggaagcgugagcuuuuucccucaggccgaaaccugcaagguccagucuaauagaguguuuugugauacgaugaacuccagaacacugccgucugagguuaaucucugcaacaucgacauuuucaaucccaaauaugauugcaagaucaugaccagcaaaaccgacguguccagcucugucauuacaucccugggcgcuaucgugagcuguuacgggaagaccaaaugcacagccucuaacaagaaucggggaaucauuaagacguuuuccaacggcugugauuaugucagcaauaaagggguggacaccguuuccgugggaaacacacuuuacuaugucaacaagcaagagggcaaaucucuguacgugaagggcgaaccuaucauuaauuucuaugacccccucguuuuuccuagcgaugaguucgacgcuuccaucucucaggugaacgaaaagauuaaucagagccuggccuuuauccgcaaguccgaugagcugcuccacaacgucaauguggggaaaagcaccacaaacauuaugaucaccacgaucauuaucgugauuaucguuauucugcuucugcucaucgccgucggacuguuccuguacugcaaagcuagaugaggacuaguacuggcugcaucucccuuuccucuguccuccauccuucucccaggauggugaagggggaccugguacccagugauccccaccccaggauccuaaaucaugacuuaccugcuaauaaaaacucauuggaaaagugagaagaucuaaaaaaaaaaaaaaaaaaaaaaaaaaaaaaaaaaaaaaaaaaaaaaaaaaaaaaaaaaaaaaaaugcaucccccccccccccccccccccccccccccccaaaggcucuuuucagagccaccagaauu

SEQ ID NO: 13906 - RNA, 1998 nt, Artificial Sequence
  mRNA product Design h-5 comprising derived and/or modified sequence from HRSV(Memphis-37)__AIY60640.1__F-del_DSCav1_mut0 (opt6)
gggagagggcgcuuggcuugcaaggacccugagcugcggcauugaagcacacccaacccaacucgacugaagucagccucacugaaccggaucugagaaucuucucucucugggcuugccagggcucuccgaaccuagcuagcauccucuucaauuccaacuagaaagcuuaccauggaacucccaauacuuaaaacaaacgcaaucacaacaauacuagcugcagucacacuaugcuucgccucaucacaaaauauaacagaagaauuuuaucaaucaacaugcuccgcaguaucaaaaggauaucucucugcauuacgaacagguugguacaccucgguaauaacaauagaauuaucaaacauaaaagaaaauaaaugcaauggaaccgaugccaaaguaaaacuaaucaaacaagaacuugacaaauacaaaaacgcaguaacagaacuacaacuauuaaugcaaucaacaccagcagcagguucaggcuccgcaaucgcuucaggaauagccguuuguaaaguacuacacuuagaaggagaaguaaauaaaauaaaaaacgccuuacuaucaacaaacaaagcaguagucucccuuuccaacggaguaucagucuuaacuuuuaaaguacucgacuuaaaaaauuacaucgacaaacaacuacuacccauucuaaauaaacaaucaugcucaauaucaaacaucgaaacaguaaucgaauuucaacaaaaaaauaauagauuacuagaaauaacacgagaauuuuccguaaaugccggaguaacgaccccagucucaacauacauguuaacaaacucagaauuacuaucacucauuaacgauaugccaauaacaaaugaccaaaaaaaacuaaugucaaacaacguccaaauaguacgacaacaaucauacucuaucauguguauaauaaaagaagaaguuuuagcauacguaguacaacuaccacuuuacggagucauagacaccccaugcuggaaacuacacacaucacccuuauguacaacaaacaccaaagaagggucuaacauaugucucacuagaacagaucgaggcugguacugcgacaacgcaggaucaguuagcuuuuucccucaagccgaaaccuguaaaguacaauccaaucgaguauuuugcgacacuaugaacucuagaaccuuacccuccgaaguaaaccuauguaacauagacauauuuaaucccaaauaugauugcaaaaucaugacauccaaaacagauguaucaagcucuguaauaaccucacuaggagcaauaguuucaugcuaugguaaaacaaaaugcaccgccucaaacaaaaauagagggauaaucaaaaccuucucaaauggaugcgacuacguaucaaauaaaggaguagacaccgucuccguaggaaacacacuauacuacguaaacaaacaagaaggaaaaucacuauacguaaaaggagaaccaaucauaaacuucuacgacccacuuguuuucccaucagaugaauuugaugccuccauaucacaaguaaacgaaaaaauaaaccaaucucuagccuucaucagaaaauccgacgaacuuuuacacaacguaaacguagguaaaucaacaaccaacaucaugauaacaacaauaauaauaguaauaauuguaauacuuuuacuacuuaucgccguaggccuauucuuauauuguaaagcaagaugaggacuaguacuggcugcaucucccuuuccucuguccuccauccuucucccaggauggugaagggggaccugguacccagugauccccaccccaggauccuaaaucaugacuuaccugcuaauaaaaacucauuggaaaagugagaagaucuaaaaaaaaaaaaaaaaaaaaaaaaaaaaaaaaaaaaaaaaaaaaaaaaaaaaaaaaaaaaaaaaugcaucccccccccccccccccccccccccccccccaaaggcucuuuucagagccaccagaauu

SEQ ID NO: 13907 - RNA, 1998 nt, Artificial Sequence
  mRNA product Design h-5 comprising derived and/or modified sequence from HRSV(Memphis-37)__AIY60640.1__F-del_DSCav1_mut0 (opt11)
gggagagggcgcuuggcuugcaaggacccugagcugcggcauugaagcacacccaacccaacucgacugaagucagccucacugaaccggaucugagaaucuucucucucugggcuugccagggcucuccgaaccuagcuagcauccucuucaauuccaacuagaaagcuuaccauggaacuaccaauccucaaaaccaacgccaucacuacaauccuagccgcgguaacccugugcuucgccuccucacaaaacaucacagaagaauuuuaccaaucaaccugcuccgccguauccaaaggauaccugagcgcccugagaaccggcugguacaccuccgucaucaccauagaacucuccaacaucaaagaaaacaaaugcaacgguacggacgccaaaguuaaacucaucaaacaagaacuugacaaauacaagaacgccgucacagaacugcaacuccucaugcaauccacccccgccgccggcuccggcuccgccauagccuccggcaucgccgucugcaaagucuuacaccuagaaggcgaagucaacaaaaucaaaaacgcacuacuuuccacaaacaaagccgucgucucacucuccaacggcguauccguccucaccuucaaaguacuugaccucaaaaacuacaucgacaaacaacuacuccccauccugaacaaacaauccugcucaaucuccaacaucgaaaccguaaucgaguuccaacagaaaaauaaucgccuccuggagaucacccgcgaguucuccgucaaugcaggagucacaaccccaguaucaaccuacaugcucaccaacuccgaacuccugucgcucaucaacgacaugcccaucacaaacgaccaaaagaaacucauguccaacaacguacaaaucgucagacaacaauccuauucuauaaugugcaucaucaaagaagaaguccucgccuacgucguacaacucccccucuacggcguuaucgacacccccugcuggaaacuccacaccucaccccucugcaccaccaacacaaaagaaggcuccaacaucugccucacucggaccgaccgcggcugguacugcgacaaugccggcagcgucuccuucuucccacaagccgaaaccugcaaaguccaguccaaccgcguauucugcgacacuaugaacuccagaacccuccccuccgaaguaaaccucugcaacaucgacaucuucaacccaaaauacgacugcaaaaucaugaccucaaaaaccgacgucagcucgucagucauaaccagccucggagccauagucucaugcuacggaaaaaccaaaugcaccgccagcaacaaaaaccgcggcauaauaaaaacauucuccaacggcugcgacuauguauccaacaaaggagucgauaccgucuccguaggcaacacccuauacuacgucaacaaacaagaaggcaaaucccucuacgucaaaggugaaccaaucaucaacuucuacgacccucucgucuuccccuccgaugaguucgacgccucaaucagccaaguaaacgaaaagauaaaccaaucacucgccuucauccgcaaauccgacgaacuucuucacaacgucaacgucggcaaaucuaccaccaacauaaugauaaccaccaucaucaucgucaucaucguaauacuccuccuucucaucgccgucggccuauuccuauacugcaaagcccgcuagggacuaguacuggcugcaucucccuuuccucuguccuccauccuucucccaggauggugaagggggaccugguacccagugauccccaccccaggauccuaaaucaugacuuaccugcuaauaaaaacucauuggaaaagugagaagaucuaaaaaaaaaaaaaaaaaaaaaaaaaaaaaaaaaaaaaaaaaaaaaaaaaaaaaaaaaaaaaaaaugcaucccccccccccccccccccccccccccccccaaaggcucuuuucagagccaccagaauu

SEQ ID NO: 13908 - RNA, 1931 nt, Artificial Sequence
  mRNA product Design i-1 comprising derived and/or modified sequence from HRSV(Memphis-37)__AIY60640.1__F-del_DSCav1_mut0 (opt1)
gggagagggcgcuuggcuugcaaggacccugagcugcggcauugaagcacacccaacccaacucgacugaagucagccucacugaaccggaucugagaaucuucucucucugggcuugccagggcucuccgaaccuagcuagcauccucuucaauuccaacuagaaagcuuaccauggagcugcccauccucaagaccaacgccaucaccacgauccuggccgcggugacccugugcuucgccagcucccagaacaucaccgaggaguucuaccagagcacgugcuccgccgucagcaagggcuaccucuccgcccugcgcaccgggugguacaccagcgugaucaccaucgagcuguccaacaucaaggagaacaagugcaacggcaccgacgccaaggugaagcucaucaagcaggagcuggacaaguacaagaacgcggucacggagcugcagcuccugaugcagagcaccccggccgccggcuccgggagcgcgaucgccuccggcaucgccgucugcaaggugcugcaccucgagggcgaggugaacaagaucaagaacgcccugcuguccaccaacaaggccgucgugagccucuccaacggggugagcguccugaccuucaaggugcuggaccucaagaacuacaucgacaagcagcugcugcccauccugaacaagcagagcugcuccaucagcaacaucgagaccgucaucgaguuccagcagaagaacaaccgccuccuggagaucacgcgggaguucagcgugaacgcgggcgugaccacccccgucuccaccuacaugcugacgaacagcgagcuccugucccugaucaacgacaugccgaucaccaacgaccagaagaagcucaugagcaacaacgugcagaucgugcgccagcaguccuacagcaucaugugcaucaucaaggaggagguccuggccuacguggugcagcugccccucuacggggucaucgacacccccugcuggaagcugcacaccagcccccugugcacgaccaacaccaaggagggcuccaacaucugccucacccggacggaccgcgggugguacugcgacaacgccggcagcguguccuucuucccgcaggccgagaccugcaagguccagagcaaccggguguucugcgacaccaugaacucccggacccugcccagcgaggugaaccucugcaacaucgacaucuucaaccccaaguacgacugcaagaucaugacguccaagaccgacgucagcuccagcgugaucaccucccugggcgccaucgugagcugcuacgggaagaccaagugcacggcgagcaacaagaaccgcggcaucaucaagaccuucuccaacgggugcgacuacgucagcaacaagggcguggacaccguguccgucggcaacacccuguacuacgugaacaagcaggagggcaagagccucuacgugaagggggagcccaucaucaacuucuacgacccgcuggucuuccccuccgacgaguucgacgccagcaucucccaggugaacgagaagaucaaccagagccuggccuucauccggaaguccgacgagcuccugcacaacgugaacgucggcaagagcaccacgaacaucaugaucaccaccaucaucaucgugaucaucgugauccugcugcuccugaucgccgucgggcuguuccucuacugcaaggcccgcugaggacuaguguccaccugucccuccugggcugcuggauugucucguuuuccugccaaauaaacaggaucagcgcuuuacagaucuaaaaaaaaaaaaaaaaaaaaaaaaaaaaaaaaaaaaaaaaaaaaaaaaaaaaaaaaaaaaaaaaugcaucccccccccccccccccccccccccccccccaaaggcucuuuucagagccaccagaauu

SEQ ID NO: 13909 - RNA, 1931 nt, Artificial Sequence
  mRNA product Design i-1 comprising derived and/or modified sequence from HRSV(Memphis-37)__AIY60640.1__F-del_DSCav1_mut0 (opt1)
gggagagggcgcuuggcuugcaaggacccugagcugcggcauugaagcacacccaacccaacucgacugaagucagccucacugaaccggaucugagaaucuucucucucugggcuugccagggcucuccgaaccuagcuagcauccucuucaauuccaacuagaaagcuuaccauggagcugcccauccucaagaccaacgccaucaccacgauccuggccgcggugacccugugcuucgccagcucccagaacaucaccgaggaguucuaccagagcacgugcuccgccgucagcaagggcuaccucuccgcccugcgcaccgggugguacaccagcgugaucaccaucgagcuguccaacaucaaggagaacaagugcaacggcaccgacgccaaggugaagcucaucaagcaggagcuggacaaguacaagaacgcggucacggagcugcagcuccugaugcagagcaccccggccgccggguccggcagcgccaucgcguccgggaucgccgugugcaaggugcugcaccucgagggcgaggucaacaagaucaagaacgcccugcugagcaccaacaaggccguggugucccucagcaacggcgucuccgugcugaccuucaaggugcuggaccucaagaacuacaucgacaagcagcugcugcccauccucaacaagcagagcugcuccaucagcaacaucgagacggucaucgaguuccagcagaagaacaaccggcugcuggagaucacccgcgaguucuccgugaacgccggggugaccacccccgucagcacguacaugcucaccaacagcgagcugcugucccucaucaacgacaugcccaucaccaacgaccagaagaagcugaugagcaacaacgugcagaucgugcggcagcaguccuacagcaucaugugcaucaucaaggaggagguccuggcguacguggugcagcucccgcuguacggcgucaucgacacccccugcuggaagcugcacacgagcccccucugcaccaccaacaccaaggagggguccaacaucugccugacgcgcaccgaccggggcugguacugcgacaacgccggguccgugagcuucuucccccaggccgagaccugcaaggugcaguccaaccgcgucuucugcgacaccaugaacagccggacgcucccguccgaggugaaccugugcaacaucgacaucuucaaccccaaguacgacugcaagaucaugaccagcaagaccgacgucuccagcuccgugaucaccagccugggcgccaucguguccugcuacggcaagacgaagugcaccgccagcaacaagaaccgggggaucaucaagaccuucuccaacggcugcgacuacgucagcaacaaggggguggacaccgugagcgucggcaacacgcucuacuacgugaacaagcaggagggcaagucccuguacgugaagggggagcccaucaucaacuucuacgacccccuggucuucccgagcgacgaguucgacgcguccaucagccaggugaacgagaagaucaaccagucccucgccuucauccgcaagagcgacgagcugcugcacaacgugaacgucggcaaguccaccaccaacaucaugaucaccaccaucaucaucgugaucaucgugauccuccugcugcucaucgccgucgggcuguuccuguacugcaaggcccggugaggacuaguguccaccugucccuccugggcugcuggauugucucguuuuccugccaaauaaacaggaucagcgcuuuacagaucuaaaaaaaaaaaaaaaaaaaaaaaaaaaaaaaaaaaaaaaaaaaaaaaaaaaaaaaaaaaaaaaaugcaucccccccccccccccccccccccccccccccaaaggcucuuuucagagccaccagaauu

SEQ ID NO: 13910 - RNA, 1931 nt, Artificial Sequence
  mRNA product Design i-1 comprising derived and/or modified sequence from HRSV(Memphis-37)__AIY60640.1__F-del_DSCav1_mut0 (opt2)
gggagagggcgcuuggcuugcaaggacccugagcugcggcauugaagcacacccaacccaacucgacugaagucagccucacugaaccggaucugagaaucuucucucucugggcuugccagggcucuccgaaccuagcuagcauccucuucaauuccaacuagaaagcuuaccauggagcuccccauccucaagaccaacgccaucaccaccauccucgccgccgucacccucugcuucgccuccucccagaacaucaccgaggaguucuaccaguccaccugcuccgccgucuccaagggcuaccucuccgcccuccgcaccggcugguacaccuccgucaucaccaucgagcucuccaacaucaaggagaacaagugcaacggcaccgacgccaaggucaagcucaucaagcaggagcucgacaaguacaagaacgccgucaccgagcuccagcuccucaugcaguccacccccgccgccggcuccggcuccgccaucgccuccggcaucgccgucugcaagguccuccaccucgagggcgaggucaacaagaucaagaacgcccuccucuccaccaacaaggccgucgucucccucuccaacggcgucuccguccucaccuucaagguccucgaccucaagaacuacaucgacaagcagcuccuccccauccucaacaagcaguccugcuccaucuccaacaucgagaccgucaucgaguuccagcagaagaacaaccgccuccucgagaucacccgcgaguucuccgucaacgccggcgucaccacccccgucuccaccuacaugcucaccaacuccgagcuccucucccucaucaacgacaugcccaucaccaacgaccagaagaagcucauguccaacaacguccagaucguccgccagcaguccuacuccaucaugugcaucaucaaggaggagguccucgccuacgucguccagcucccccucuacggcgucaucgacacccccugcuggaagcuccacaccuccccccucugcaccaccaacaccaaggagggcuccaacaucugccucacccgcaccgaccgcggcugguacugcgacaacgccggcuccgucuccuucuucccccaggccgagaccugcaagguccaguccaaccgcgucuucugcgacaccaugaacucccgcacccuccccuccgaggucaaccucugcaacaucgacaucuucaaccccaaguacgacugcaagaucaugaccuccaagaccgacgucuccuccuccgucaucaccucccucggcgccaucgucuccugcuacggcaagaccaagugcaccgccuccaacaagaaccgcggcaucaucaagaccuucuccaacggcugcgacuacgucuccaacaagggcgucgacaccgucuccgucggcaacacccucuacuacgucaacaagcaggagggcaagucccucuacgucaagggcgagcccaucaucaacuucuacgacccccucgucuuccccuccgacgaguucgacgccuccaucucccaggucaacgagaagaucaaccagucccucgccuucauccgcaaguccgacgagcuccuccacaacgucaacgucggcaaguccaccaccaacaucaugaucaccaccaucaucaucgucaucaucgucauccuccuccuccucaucgccgucggccucuuccucuacugcaaggcccgcugaggacuaguguccaccugucccuccugggcugcuggauugucucguuuuccugccaaauaaacaggaucagcgcuuuacagaucuaaaaaaaaaaaaaaaaaaaaaaaaaaaaaaaaaaaaaaaaaaaaaaaaaaaaaaaaaaaaaaaaugcaucccccccccccccccccccccccccccccccaaaggcucuuuucagagccaccagaauu

SEQ ID NO: 13911 - RNA, 1931 nt, Artificial Sequence
  mRNA product Design i-1 comprising derived and/or modified sequence from HRSV(Memphis-37)__AIY60640.1__F-del_DSCav1_mut0 (opt3)
gggagagggcgcuuggcuugcaaggacccugagcugcggcauugaagcacacccaacccaacucgacugaagucagccucacugaaccggaucugagaaucuucucucucugggcuugccagggcucuccgaaccuagcuagcauccucuucaauuccaacuagaaagcuuaccauggagcugcccauccucaagaccaacgccauuacaacuauacuugcugcagugacgcugugcuucgccagcucccagaauaucaccgaagaguuuuaccaaucuacauguucagcggucaguaaaggcuauuugagcgcuuuaagaacugggugguacaccuccguuauuacaaucgaacugucuaacauuaaggagaauaaaugcaacggaaccgacgccaaggugaaacuaaucaagcaggaacucgauaaguauaaaaaugcaguaacugagcugcagcuucugaugcagucgaccccugccgcugguucaggcagcgcaauagccagugggaucgcuguguguaaggucuugcaccucgagggagaagugaacaaaauuaagaaugcccugcuguccacaaacaaagcgguugugucucucagcaauggcgucuccguguuaacguucaagguacuggaccuuaagaacuacaucgauaaacaauugcugccaauucuaaauaagcagucaugcaguaucagcaacauagagacuguuauugaauuucagcagaaaaauaacaggcuccuggagaucacccgggaguucucugugaaugccggugucacaacuccgguguccaccuauaugcuuacaaacucagaacuguugagccucauuaacgacaugcccaucaccaaugaucaaaagaaacugaugaguaacaaugugcagaucguccgccagcagucuuacuccauuauguguauaaucaaggaggaaguuuuagcauaugugguacaacugccucucuacggggugauugacacgccaugcuggaaacuucauacuagcccccuguguacaaccaacacuaaggagggaucgaauaucugcuugacacgaaccgaucguggcugguacugugacaacgcuggcucugucuccuuuuucccucaggccgaaacgugcaaggugcagucaaauagaguguuuugugauaccaugaacaguagaacacugccaagcgaggugaaucucugcaacauagacauuuucaaucccaaauaugauugcaagaucaugacuuccaaaaccgacgucucuagcucagugaucacaagucugggggcaauuguauccuguuacggaaagacuaaaugcaccgcuagcaacaagaauagggguaucauuaagacauuuucuaacggcugugauuauguuucaaauaaagggguggacaccgucagugugggaaacacucuuuacuaugucaacaagcaagagggcaaaagccuguacgugaagggugaaccuauaaucaauuucuaugacccauugguuuuuccguccgaugaguucgacgccucuauuucgcagguuaacgagaaaaucaaucagagccucgcguuuauccggaaguccgaugaacuguuacacaacguaaaugucgggaagucaacgacaaacauuaugauaaccacuaucauuaucgugauuaucguuauacugcuacuccugaucgccgugggacuuuucuuguacugcaaagcacgcugaggacuaguguccaccugucccuccugggcugcuggauugucucguuuuccugccaaauaaacaggaucagcgcuuuacagaucuaaaaaaaaaaaaaaaaaaaaaaaaaaaaaaaaaaaaaaaaaaaaaaaaaaaaaaaaaaaaaaaaugcaucccccccccccccccccccccccccccccccaaaggcucuuuucagagccaccagaauu

SEQ ID NO: 13912 - RNA, 1931 nt, Artificial Sequence
  mRNA product Design i-1 comprising derived and/or modified sequence from HRSV(Memphis-37)__AIY60640.1__F-del_DSCav1_mut0 (opt4)
gggagagggcgcuuggcuugcaaggacccugagcugcggcauugaagcacacccaacccaacucgacugaagucagccucacugaaccggaucugagaaucuucucucucugggcuugccagggcucuccgaaccuagcuagcauccucuucaauuccaacuagaaagcuuaccauggagcugcccauccugaagaccaacgccaucaccaccauccuggccgccgugacccugugcuucgccagcagccagaacaucaccgaggaguucuaccagagcaccugcagcgccgugagcaagggcuaccugagcgcccugagaaccggcugguacaccagcgugaucaccaucgagcugagcaacaucaaggagaacaagugcaacggcaccgacgccaaggugaagcugaucaagcaggagcuggacaaguacaagaacgccgugaccgagcugcagcugcugaugcagagcacccccgccgccggcagcggcagcgccaucgccagcggcaucgccgugugcaaggugcugcaccuggagggcgaggugaacaagaucaagaacgcccugcugagcaccaacaaggccguggugagccugagcaacggcgugagcgugcugaccuucaaggugcuggaccugaagaacuacaucgacaagcagcugcugcccauccugaacaagcagagcugcagcaucagcaacaucgagaccgugaucgaguuccagcagaagaacaacagacugcuggagaucaccagagaguucagcgugaacgccggcgugaccacccccgugagcaccuacaugcugaccaacagcgagcugcugagccugaucaacgacaugcccaucaccaacgaccagaagaagcugaugagcaacaacgugcagaucgugagacagcagagcuacagcaucaugugcaucaucaaggaggaggugcuggccuacguggugcagcugccccuguacggcgugaucgacacccccugcuggaagcugcacaccagcccccugugcaccaccaacaccaaggagggcagcaacaucugccugaccagaaccgacagaggcugguacugcgacaacgccggcagcgugagcuucuucccccaggccgagaccugcaaggugcagagcaacagaguguucugcgacaccaugaacagcagaacccugcccagcgaggugaaccugugcaacaucgacaucuucaaccccaaguacgacugcaagaucaugaccagcaagaccgacgugagcagcagcgugaucaccagccugggcgccaucgugagcugcuacggcaagaccaagugcaccgccagcaacaagaacagaggcaucaucaagaccuucagcaacggcugcgacuacgugagcaacaagggcguggacaccgugagcgugggcaacacccuguacuacgugaacaagcaggagggcaagagccuguacgugaagggcgagcccaucaucaacuucuacgacccccugguguuccccagcgacgaguucgacgccagcaucagccaggugaacgagaagaucaaccagagccuggccuucaucagaaagagcgacgagcugcugcacaacgugaacgugggcaagagcaccaccaacaucaugaucaccaccaucaucaucgugaucaucgugauccugcugcugcugaucgccgugggccuguuccuguacugcaaggccagaugaggacuaguguccaccugucccuccugggcugcuggauugucucguuuuccugccaaauaaacaggaucagcgcuuuacagaucuaaaaaaaaaaaaaaaaaaaaaaaaaaaaaaaaaaaaaaaaaaaaaaaaaaaaaaaaaaaaaaaaugcaucccccccccccccccccccccccccccccccaaaggcucuuuucagagccaccagaauu

SEQ ID NO: 13913 - RNA, 1931 nt, Artificial Sequence
  mRNA product Design i-1 comprising derived and/or modified sequence from HRSV(Memphis-37)__AIY60640.1__F-del_DSCav1_mut0 (opt5)
gggagagggcgcuuggcuugcaaggacccugagcugcggcauugaagcacacccaacccaacucgacugaagucagccucacugaaccggaucugagaaucuucucucucugggcuugccagggcucuccgaaccuagcuagcauccucuucaauuccaacuagaaagcuuaccauggagcugcccauccucaagaccaacgccauuacaacgauccuggcugccgugacccuuugcuucgcgagcucccagaauauuacagaagaguuuuaccaaucuaccuguagcgcugucuccaaaggcuaucugucugcccucagaacagggugguacaccagcguuaucacaauugaacuguccaacaucaaggagaauaaaugcaacggaaccgacgccaaggugaaacuuaucaagcaggaacuggauaaguauaaaaaugcugugacggagcuccagcugcugaugcagucuaccccugccgcuggcagcggguccgccauugcgagcggaaucgccgucuguaaggugcuccaccuggagggcgaaguuaacaaaauuaagaaugcccuucugucuacaaacaaagcuguggucucccucagcaauggggugucuguucugaccuucaaggugcuugaccugaagaacuacaucgauaaacaacuccugccgauucugaauaagcaguccugcagcaucucuaacauugagacagucaucgaauuucagcagaaaaauaaccggcuccuggagaucacccgcgaguucuccgugaaugcuggagugacgacacccgucagcaccuauaugcuuacaaacuccgaacugcucucucugauuaacgacaugccuaucaccaaugaucaaaagaaacuuaugagcaacaauguucagauugugagacagcaguccuacagcaucauguguauuaucaaggaggaagugcuggccuaugucgugcaacucccccuguacggcguuaucgacaccccuugcuggaaacugcauacaucuccccucuguacgaccaacacaaaggagggcuccaauauuugccugacccggacagaucgcgggugguacugugacaacgcgggaagcgugagcuuuuucccucaggccgaaaccugcaagguccagucuaauagaguguuuugugauacgaugaacuccagaacacugccgucugagguuaaucucugcaacaucgacauuuucaaucccaaauaugauugcaagaucaugaccagcaaaaccgacguguccagcucugucauuacaucccugggcgcuaucgugagcuguuacgggaagaccaaaugcacagccucuaacaagaaucggggaaucauuaagacguuuuccaacggcugugauuaugucagcaauaaagggguggacaccguuuccgugggaaacacacuuuacuaugucaacaagcaagagggcaaaucucuguacgugaagggcgaaccuaucauuaauuucuaugacccccucguuuuuccuagcgaugaguucgacgcuuccaucucucaggugaacgaaaagauuaaucagagccuggccuuuauccgcaaguccgaugagcugcuccacaacgucaauguggggaaaagcaccacaaacauuaugaucaccacgaucauuaucgugauuaucguuauucugcuucugcucaucgccgucggacuguuccuguacugcaaagcuagaugaggacuaguguccaccugucccuccugggcugcuggauugucucguuuuccugccaaauaaacaggaucagcgcuuuacagaucuaaaaaaaaaaaaaaaaaaaaaaaaaaaaaaaaaaaaaaaaaaaaaaaaaaaaaaaaaaaaaaaaugcaucccccccccccccccccccccccccccccccaaaggcucuuuucagagccaccagaauu

SEQ ID NO: 13914 - RNA, 1931 nt, Artificial Sequence
  mRNA product Design i-1 comprising derived and/or modified sequence from HRSV(Memphis-37)__AIY60640.1__F-del_DSCav1_mut0 (opt6)
gggagagggcgcuuggcuugcaaggacccugagcugcggcauugaagcacacccaacccaacucgacugaagucagccucacugaaccggaucugagaaucuucucucucugggcuugccagggcucuccgaaccuagcuagcauccucuucaauuccaacuagaaagcuuaccauggaacucccaauacuuaaaacaaacgcaaucacaacaauacuagcugcagucacacuaugcuucgccucaucacaaaauauaacagaagaauuuuaucaaucaacaugcuccgcaguaucaaaaggauaucucucugcauuacgaacagguugguacaccucgguaauaacaauagaauuaucaaacauaaaagaaaauaaaugcaauggaaccgaugccaaaguaaaacuaaucaaacaagaacuugacaaauacaaaaacgcaguaacagaacuacaacuauuaaugcaaucaacaccagcagcagguucaggcuccgcaaucgcuucaggaauagccguuuguaaaguacuacacuuagaaggagaaguaaauaaaauaaaaaacgccuuacuaucaacaaacaaagcaguagucucccuuuccaacggaguaucagucuuaacuuuuaaaguacucgacuuaaaaaauuacaucgacaaacaacuacuacccauucuaaauaaacaaucaugcucaauaucaaacaucgaaacaguaaucgaauuucaacaaaaaaauaauagauuacuagaaauaacacgagaauuuuccguaaaugccggaguaacgaccccagucucaacauacauguuaacaaacucagaauuacuaucacucauuaacgauaugccaauaacaaaugaccaaaaaaaacuaaugucaaacaacguccaaauaguacgacaacaaucauacucuaucauguguauaauaaaagaagaaguuuuagcauacguaguacaacuaccacuuuacggagucauagacaccccaugcuggaaacuacacacaucacccuuauguacaacaaacaccaaagaagggucuaacauaugucucacuagaacagaucgaggcugguacugcgacaacgcaggaucaguuagcuuuuucccucaagccgaaaccuguaaaguacaauccaaucgaguauuuugcgacacuaugaacucuagaaccuuacccuccgaaguaaaccuauguaacauagacauauuuaaucccaaauaugauugcaaaaucaugacauccaaaacagauguaucaagcucuguaauaaccucacuaggagcaauaguuucaugcuaugguaaaacaaaaugcaccgccucaaacaaaaauagagggauaaucaaaaccuucucaaauggaugcgacuacguaucaaauaaaggaguagacaccgucuccguaggaaacacacuauacuacguaaacaaacaagaaggaaaaucacuauacguaaaaggagaaccaaucauaaacuucuacgacccacuuguuuucccaucagaugaauuugaugccuccauaucacaaguaaacgaaaaaauaaaccaaucucuagccuucaucagaaaauccgacgaacuuuuacacaacguaaacguagguaaaucaacaaccaacaucaugauaacaacaauaauaauaguaauaauuguaauacuuuuacuacuuaucgccguaggccuauucuuauauuguaaagcaagaugaggacuaguguccaccugucccuccugggcugcuggauugucucguuuuccugccaaauaaacaggaucagcgcuuuacagaucuaaaaaaaaaaaaaaaaaaaaaaaaaaaaaaaaaaaaaaaaaaaaaaaaaaaaaaaaaaaaaaaaugcaucccccccccccccccccccccccccccccccaaaggcucuuuucagagccaccagaauu

SEQ ID NO: 13915 - RNA, 1931 nt, Artificial Sequence
  mRNA product Design i-1 comprising derived and/or modified sequence from HRSV(Memphis-37)__AIY60640.1__F-del_DSCav1_mut0 (opt11)
gggagagggcgcuuggcuugcaaggacccugagcugcggcauugaagcacacccaacccaacucgacugaagucagccucacugaaccggaucugagaaucuucucucucugggcuugccagggcucuccgaaccuagcuagcauccucuucaauuccaacuagaaagcuuaccauggaacuaccaauccucaaaaccaacgccaucacuacaauccuagccgcgguaacccugugcuucgccuccucacaaaacaucacagaagaauuuuaccaaucaaccugcuccgccguauccaaaggauaccugagcgcccugagaaccggcugguacaccuccgucaucaccauagaacucuccaacaucaaagaaaacaaaugcaacgguacggacgccaaaguuaaacucaucaaacaagaacuugacaaauacaagaacgccgucacagaacugcaacuccucaugcaauccacccccgccgccggcuccggcuccgccauagccuccggcaucgccgucugcaaagucuuacaccuagaaggcgaagucaacaaaaucaaaaacgcacuacuuuccacaaacaaagccgucgucucacucuccaacggcguauccguccucaccuucaaaguacuugaccucaaaaacuacaucgacaaacaacuacuccccauccugaacaaacaauccugcucaaucuccaacaucgaaaccguaaucgaguuccaacagaaaaauaaucgccuccuggagaucacccgcgaguucuccgucaaugcaggagucacaaccccaguaucaaccuacaugcucaccaacuccgaacuccugucgcucaucaacgacaugcccaucacaaacgaccaaaagaaacucauguccaacaacguacaaaucgucagacaacaauccuauucuauaaugugcaucaucaaagaagaaguccucgccuacgucguacaacucccccucuacggcguuaucgacacccccugcuggaaacuccacaccucaccccucugcaccaccaacacaaaagaaggcuccaacaucugccucacucggaccgaccgcggcugguacugcgacaaugccggcagcgucuccuucuucccacaagccgaaaccugcaaaguccaguccaaccgcguauucugcgacacuaugaacuccagaacccuccccuccgaaguaaaccucugcaacaucgacaucuucaacccaaaauacgacugcaaaaucaugaccucaaaaaccgacgucagcucgucagucauaaccagccucggagccauagucucaugcuacggaaaaaccaaaugcaccgccagcaacaaaaaccgcggcauaauaaaaacauucuccaacggcugcgacuauguauccaacaaaggagucgauaccgucuccguaggcaacacccuauacuacgucaacaaacaagaaggcaaaucccucuacgucaaaggugaaccaaucaucaacuucuacgacccucucgucuuccccuccgaugaguucgacgccucaaucagccaaguaaacgaaaagauaaaccaaucacucgccuucauccgcaaauccgacgaacuucuucacaacgucaacgucggcaaaucuaccaccaacauaaugauaaccaccaucaucaucgucaucaucguaauacuccuccuucucaucgccgucggccuauuccuauacugcaaagcccgcuagggacuaguguccaccugucccuccugggcugcuggauugucucguuuuccugccaaauaaacaggaucagcgcuuuacagaucuaaaaaaaaaaaaaaaaaaaaaaaaaaaaaaaaaaaaaaaaaaaaaaaaaaaaaaaaaaaaaaaaugcaucccccccccccccccccccccccccccccccaaaggcucuuuucagagccaccagaauu

SEQ ID NO: 13916 - RNA, 1931 nt, Artificial Sequence
  mRNA product Design i-2 comprising derived and/or modified sequence from HRSV(Memphis-37)__AIY60640.1__F-del_DSCav1_mut0 (opt1)
gggagaggcgcugccuacggagguggcagccaucuccuucucggcaucaagcuuaccauggagcugcccauccucaagaccaacgccaucaccacgauccuggccgcggugacccugugcuucgccagcucccagaacaucaccgaggaguucuaccagagcacgugcuccgccgucagcaagggcuaccucuccgcccugcgcaccgggugguacaccagcgugaucaccaucgagcuguccaacaucaaggagaacaagugcaacggcaccgacgccaaggugaagcucaucaagcaggagcuggacaaguacaagaacgcggucacggagcugcagcuccugaugcagagcaccccggccgccggcuccgggagcgcgaucgccuccggcaucgccgucugcaaggugcugcaccucgagggcgaggugaacaagaucaagaacgcccugcuguccaccaacaaggccgucgugagccucuccaacggggugagcguccugaccuucaaggugcuggaccucaagaacuacaucgacaagcagcugcugcccauccugaacaagcagagcugcuccaucagcaacaucgagaccgucaucgaguuccagcagaagaacaaccgccuccuggagaucacgcgggaguucagcgugaacgcgggcgugaccacccccgucuccaccuacaugcugacgaacagcgagcuccugucccugaucaacgacaugccgaucaccaacgaccagaagaagcucaugagcaacaacgugcagaucgugcgccagcaguccuacagcaucaugugcaucaucaaggaggagguccuggccuacguggugcagcugccccucuacggggucaucgacacccccugcuggaagcugcacaccagcccccugugcacgaccaacaccaaggagggcuccaacaucugccucacccggacggaccgcgggugguacugcgacaacgccggcagcguguccuucuucccgcaggccgagaccugcaagguccagagcaaccggguguucugcgacaccaugaacucccggacccugcccagcgaggugaaccucugcaacaucgacaucuucaaccccaaguacgacugcaagaucaugacguccaagaccgacgucagcuccagcgugaucaccucccugggcgccaucgugagcugcuacgggaagaccaagugcacggcgagcaacaagaaccgcggcaucaucaagaccuucuccaacgggugcgacuacgucagcaacaagggcguggacaccguguccgucggcaacacccuguacuacgugaacaagcaggagggcaagagccucuacgugaagggggagcccaucaucaacuucuacgacccgcuggucuuccccuccgacgaguucgacgccagcaucucccaggugaacgagaagaucaaccagagccuggccuucauccggaaguccgacgagcuccugcacaacgugaacgucggcaagagcaccacgaacaucaugaucaccaccaucaucaucgugaucaucgugauccugcugcuccugaucgccgucgggcuguuccucuacugcaaggcccgcugaggacuagugcaucacauuuaaaagcaucucagccuaccaugagaauaagagaaagaaaaugaagaucaauagcuuauucaucucuuuuucuuuuucguugguguaaagccaacacccugucuaaaaaacauaaauuucuuuaaucauuuugccucuuuucucugugcuucaauuaauaaaaaauggaaagaaccuagaucuaaaaaaaaaaaaaaaaaaaaaaaaaaaaaaaaaaaaaaaaaaaaaaaaaaaaaaaaaaaaaaaaugcaucccccccccccccccccccccccccccccccaaaggcucuuuucagagccaccagaauu

SEQ ID NO: 13917 - RNA, 1931 nt, Artificial Sequence
  mRNA product Design i-2 comprising derived and/or modified sequence from HRSV(Memphis-37)__AIY60640.1__F-del_DSCav1_mut0 (opt1)
gggagaggcgcugccuacggagguggcagccaucuccuucucggcaucaagcuuaccauggagcugcccauccucaagaccaacgccaucaccacgauccuggccgcggugacccugugcuucgccagcucccagaacaucaccgaggaguucuaccagagcacgugcuccgccgucagcaagggcuaccucuccgcccugcgcaccgggugguacaccagcgugaucaccaucgagcuguccaacaucaaggagaacaagugcaacggcaccgacgccaaggugaagcucaucaagcaggagcuggacaaguacaagaacgcggucacggagcugcagcuccugaugcagagcaccccggccgccggguccggcagcgccaucgcguccgggaucgccgugugcaaggugcugcaccucgagggcgaggucaacaagaucaagaacgcccugcugagcaccaacaaggccguggugucccucagcaacggcgucuccgugcugaccuucaaggugcuggaccucaagaacuacaucgacaagcagcugcugcccauccucaacaagcagagcugcuccaucagcaacaucgagacggucaucgaguuccagcagaagaacaaccggcugcuggagaucacccgcgaguucuccgugaacgccggggugaccacccccgucagcacguacaugcucaccaacagcgagcugcugucccucaucaacgacaugcccaucaccaacgaccagaagaagcugaugagcaacaacgugcagaucgugcggcagcaguccuacagcaucaugugcaucaucaaggaggagguccuggcguacguggugcagcucccgcuguacggcgucaucgacacccccugcuggaagcugcacacgagcccccucugcaccaccaacaccaaggagggguccaacaucugccugacgcgcaccgaccggggcugguacugcgacaacgccggguccgugagcuucuucccccaggccgagaccugcaaggugcaguccaaccgcgucuucugcgacaccaugaacagccggacgcucccguccgaggugaaccugugcaacaucgacaucuucaaccccaaguacgacugcaagaucaugaccagcaagaccgacgucuccagcuccgugaucaccagccugggcgccaucguguccugcuacggcaagacgaagugcaccgccagcaacaagaaccgggggaucaucaagaccuucuccaacggcugcgacuacgucagcaacaaggggguggacaccgugagcgucggcaacacgcucuacuacgugaacaagcaggagggcaagucccuguacgugaagggggagcccaucaucaacuucuacgacccccuggucuucccgagcgacgaguucgacgcguccaucagccaggugaacgagaagaucaaccagucccucgccuucauccgcaagagcgacgagcugcugcacaacgugaacgucggcaaguccaccaccaacaucaugaucaccaccaucaucaucgugaucaucgugauccuccugcugcucaucgccgucgggcuguuccuguacugcaaggcccggugaggacuagugcaucacauuuaaaagcaucucagccuaccaugagaauaagagaaagaaaaugaagaucaauagcuuauucaucucuuuuucuuuuucguugguguaaagccaacacccugucuaaaaaacauaaauuucuuuaaucauuuugccucuuuucucugugcuucaauuaauaaaaaauggaaagaaccuagaucuaaaaaaaaaaaaaaaaaaaaaaaaaaaaaaaaaaaaaaaaaaaaaaaaaaaaaaaaaaaaaaaaugcaucccccccccccccccccccccccccccccccaaaggcucuuuucagagccaccagaauu

SEQ ID NO: 13918 - RNA, 1931 nt, Artificial Sequence
  mRNA product Design i-2 comprising derived and/or modified sequence from HRSV(Memphis-37)__AIY60640.1__F-del_DSCav1_mut0 (opt2)
gggagaggcgcugccuacggagguggcagccaucuccuucucggcaucaagcuuaccauggagcuccccauccucaagaccaacgccaucaccaccauccucgccgccgucacccucugcuucgccuccucccagaacaucaccgaggaguucuaccaguccaccugcuccgccgucuccaagggcuaccucuccgcccuccgcaccggcugguacaccuccgucaucaccaucgagcucuccaacaucaaggagaacaagugcaacggcaccgacgccaaggucaagcucaucaagcaggagcucgacaaguacaagaacgccgucaccgagcuccagcuccucaugcaguccacccccgccgccggcuccggcuccgccaucgccuccggcaucgccgucugcaagguccuccaccucgagggcgaggucaacaagaucaagaacgcccuccucuccaccaacaaggccgucgucucccucuccaacggcgucuccguccucaccuucaagguccucgaccucaagaacuacaucgacaagcagcuccuccccauccucaacaagcaguccugcuccaucuccaacaucgagaccgucaucgaguuccagcagaagaacaaccgccuccucgagaucacccgcgaguucuccgucaacgccggcgucaccacccccgucuccaccuacaugcucaccaacuccgagcuccucucccucaucaacgacaugcccaucaccaacgaccagaagaagcucauguccaacaacguccagaucguccgccagcaguccuacuccaucaugugcaucaucaaggaggagguccucgccuacgucguccagcucccccucuacggcgucaucgacacccccugcuggaagcuccacaccuccccccucugcaccaccaacaccaaggagggcuccaacaucugccucacccgcaccgaccgcggcugguacugcgacaacgccggcuccgucuccuucuucccccaggccgagaccugcaagguccaguccaaccgcgucuucugcgacaccaugaacucccgcacccuccccuccgaggucaaccucugcaacaucgacaucuucaaccccaaguacgacugcaagaucaugaccuccaagaccgacgucuccuccuccgucaucaccucccucggcgccaucgucuccugcuacggcaagaccaagugcaccgccuccaacaagaaccgcggcaucaucaagaccuucuccaacggcugcgacuacgucuccaacaagggcgucgacaccgucuccgucggcaacacccucuacuacgucaacaagcaggagggcaagucccucuacgucaagggcgagcccaucaucaacuucuacgacccccucgucuuccccuccgacgaguucgacgccuccaucucccaggucaacgagaagaucaaccagucccucgccuucauccgcaaguccgacgagcuccuccacaacgucaacgucggcaaguccaccaccaacaucaugaucaccaccaucaucaucgucaucaucgucauccuccuccuccucaucgccgucggccucuuccucuacugcaaggcccgcugaggacuagugcaucacauuuaaaagcaucucagccuaccaugagaauaagagaaagaaaaugaagaucaauagcuuauucaucucuuuuucuuuuucguugguguaaagccaacacccugucuaaaaaacauaaauuucuuuaaucauuuugccucuuuucucugugcuucaauuaauaaaaaauggaaagaaccuagaucuaaaaaaaaaaaaaaaaaaaaaaaaaaaaaaaaaaaaaaaaaaaaaaaaaaaaaaaaaaaaaaaaugcaucccccccccccccccccccccccccccccccaaaggcucuuuucagagccaccagaauu

SEQ ID NO: 13919 - RNA, 1931 nt, Artificial Sequence
  mRNA product Design i-2 comprising derived and/or modified sequence from HRSV(Memphis-37)__AIY60640.1__F-del_DSCav1_mut0 (opt3)
gggagaggcgcugccuacggagguggcagccaucuccuucucggcaucaagcuuaccauggagcugcccauccucaagaccaacgccauuacaacuauacuugcugcagugacgcugugcuucgccagcucccagaauaucaccgaagaguuuuaccaaucuacauguucagcggucaguaaaggcuauuugagcgcuuuaagaacugggugguacaccuccguuauuacaaucgaacugucuaacauuaaggagaauaaaugcaacggaaccgacgccaaggugaaacuaaucaagcaggaacucgauaaguauaaaaaugcaguaacugagcugcagcuucugaugcagucgaccccugccgcugguucaggcagcgcaauagccagugggaucgcuguguguaaggucuugcaccucgagggagaagugaacaaaauuaagaaugcccugcuguccacaaacaaagcgguugugucucucagcaauggcgucuccguguuaacguucaagguacuggaccuuaagaacuacaucgauaaacaauugcugccaauucuaaauaagcagucaugcaguaucagcaacauagagacuguuauugaauuucagcagaaaaauaacaggcuccuggagaucacccgggaguucucugugaaugccggugucacaacuccgguguccaccuauaugcuuacaaacucagaacuguugagccucauuaacgacaugcccaucaccaaugaucaaaagaaacugaugaguaacaaugugcagaucguccgccagcagucuuacuccauuauguguauaaucaaggaggaaguuuuagcauaugugguacaacugccucucuacggggugauugacacgccaugcuggaaacuucauacuagcccccuguguacaaccaacacuaaggagggaucgaauaucugcuugacacgaaccgaucguggcugguacugugacaacgcuggcucugucuccuuuuucccucaggccgaaacgugcaaggugcagucaaauagaguguuuugugauaccaugaacaguagaacacugccaagcgaggugaaucucugcaacauagacauuuucaaucccaaauaugauugcaagaucaugacuuccaaaaccgacgucucuagcucagugaucacaagucugggggcaauuguauccuguuacggaaagacuaaaugcaccgcuagcaacaagaauagggguaucauuaagacauuuucuaacggcugugauuauguuucaaauaaagggguggacaccgucagugugggaaacacucuuuacuaugucaacaagcaagagggcaaaagccuguacgugaagggugaaccuauaaucaauuucuaugacccauugguuuuuccguccgaugaguucgacgccucuauuucgcagguuaacgagaaaaucaaucagagccucgcguuuauccggaaguccgaugaacuguuacacaacguaaaugucgggaagucaacgacaaacauuaugauaaccacuaucauuaucgugauuaucguuauacugcuacuccugaucgccgugggacuuuucuuguacugcaaagcacgcugaggacuagugcaucacauuuaaaagcaucucagccuaccaugagaauaagagaaagaaaaugaagaucaauagcuuauucaucucuuuuucuuuuucguugguguaaagccaacacccugucuaaaaaacauaaauuucuuuaaucauuuugccucuuuucucugugcuucaauuaauaaaaaauggaaagaaccuagaucuaaaaaaaaaaaaaaaaaaaaaaaaaaaaaaaaaaaaaaaaaaaaaaaaaaaaaaaaaaaaaaaaugcaucccccccccccccccccccccccccccccccaaaggcucuuuucagagccaccagaauu

SEQ ID NO: 13920 - RNA, 1931 nt, Artificial Sequence
  mRNA product Design i-2 comprising derived and/or modified sequence from HRSV(Memphis-37)__AIY60640.1__F-del_DSCav1_mut0 (opt4)
gggagaggcgcugccuacggagguggcagccaucuccuucucggcaucaagcuuaccauggagcugcccauccugaagaccaacgccaucaccaccauccuggccgccgugacccugugcuucgccagcagccagaacaucaccgaggaguucuaccagagcaccugcagcgccgugagcaagggcuaccugagcgcccugagaaccggcugguacaccagcgugaucaccaucgagcugagcaacaucaaggagaacaagugcaacggcaccgacgccaaggugaagcugaucaagcaggagcuggacaaguacaagaacgccgugaccgagcugcagcugcugaugcagagcacccccgccgccggcagcggcagcgccaucgccagcggcaucgccgugugcaaggugcugcaccuggagggcgaggugaacaagaucaagaacgcccugcugagcaccaacaaggccguggugagccugagcaacggcgugagcgugcugaccuucaaggugcuggaccugaagaacuacaucgacaagcagcugcugcccauccugaacaagcagagcugcagcaucagcaacaucgagaccgugaucgaguuccagcagaagaacaacagacugcuggagaucaccagagaguucagcgugaacgccggcgugaccacccccgugagcaccuacaugcugaccaacagcgagcugcugagccugaucaacgacaugcccaucaccaacgaccagaagaagcugaugagcaacaacgugcagaucgugagacagcagagcuacagcaucaugugcaucaucaaggaggaggugcuggccuacguggugcagcugccccuguacggcgugaucgacacccccugcuggaagcugcacaccagcccccugugcaccaccaacaccaaggagggcagcaacaucugccugaccagaaccgacagaggcugguacugcgacaacgccggcagcgugagcuucuucccccaggccgagaccugcaaggugcagagcaacagaguguucugcgacaccaugaacagcagaacccugcccagcgaggugaaccugugcaacaucgacaucuucaaccccaaguacgacugcaagaucaugaccagcaagaccgacgugagcagcagcgugaucaccagccugggcgccaucgugagcugcuacggcaagaccaagugcaccgccagcaacaagaacagaggcaucaucaagaccuucagcaacggcugcgacuacgugagcaacaagggcguggacaccgugagcgugggcaacacccuguacuacgugaacaagcaggagggcaagagccuguacgugaagggcgagcccaucaucaacuucuacgacccccugguguuccccagcgacgaguucgacgccagcaucagccaggugaacgagaagaucaaccagagccuggccuucaucagaaagagcgacgagcugcugcacaacgugaacgugggcaagagcaccaccaacaucaugaucaccaccaucaucaucgugaucaucgugauccugcugcugcugaucgccgugggccuguuccuguacugcaaggccagaugaggacuagugcaucacauuuaaaagcaucucagccuaccaugagaauaagagaaagaaaaugaagaucaauagcuuauucaucucuuuuucuuuuucguugguguaaagccaacacccugucuaaaaaacauaaauuucuuuaaucauuuugccucuuuucucugugcuucaauuaauaaaaaauggaaagaaccuagaucuaaaaaaaaaaaaaaaaaaaaaaaaaaaaaaaaaaaaaaaaaaaaaaaaaaaaaaaaaaaaaaaaugcaucccccccccccccccccccccccccccccccaaaggcucuuuucagagccaccagaauu

SEQ ID NO: 13921 - RNA, 1931 nt, Artificial Sequence
  mRNA product Design i-2 comprising derived and/or modified sequence from HRSV(Memphis-37)__AIY60640.1__F-del_DSCav1_mut0 (opt5)
gggagaggcgcugccuacggagguggcagccaucuccuucucggcaucaagcuuaccauggagcugcccauccucaagaccaacgccauuacaacgauccuggcugccgugacccuuugcuucgcgagcucccagaauauuacagaagaguuuuaccaaucuaccuguagcgcugucuccaaaggcuaucugucugcccucagaacagggugguacaccagcguuaucacaauugaacuguccaacaucaaggagaauaaaugcaacggaaccgacgccaaggugaaacuuaucaagcaggaacuggauaaguauaaaaaugcugugacggagcuccagcugcugaugcagucuaccccugccgcuggcagcggguccgccauugcgagcggaaucgccgucuguaaggugcuccaccuggagggcgaaguuaacaaaauuaagaaugcccuucugucuacaaacaaagcuguggucucccucagcaauggggugucuguucugaccuucaaggugcuugaccugaagaacuacaucgauaaacaacuccugccgauucugaauaagcaguccugcagcaucucuaacauugagacagucaucgaauuucagcagaaaaauaaccggcuccuggagaucacccgcgaguucuccgugaaugcuggagugacgacacccgucagcaccuauaugcuuacaaacuccgaacugcucucucugauuaacgacaugccuaucaccaaugaucaaaagaaacuuaugagcaacaauguucagauugugagacagcaguccuacagcaucauguguauuaucaaggaggaagugcuggccuaugucgugcaacucccccuguacggcguuaucgacaccccuugcuggaaacugcauacaucuccccucuguacgaccaacacaaaggagggcuccaauauuugccugacccggacagaucgcgggugguacugugacaacgcgggaagcgugagcuuuuucccucaggccgaaaccugcaagguccagucuaauagaguguuuugugauacgaugaacuccagaacacugccgucugagguuaaucucugcaacaucgacauuuucaaucccaaauaugauugcaagaucaugaccagcaaaaccgacguguccagcucugucauuacaucccugggcgcuaucgugagcuguuacgggaagaccaaaugcacagccucuaacaagaaucggggaaucauuaagacguuuuccaacggcugugauuaugucagcaauaaagggguggacaccguuuccgugggaaacacacuuuacuaugucaacaagcaagagggcaaaucucuguacgugaagggcgaaccuaucauuaauuucuaugacccccucguuuuuccuagcgaugaguucgacgcuuccaucucucaggugaacgaaaagauuaaucagagccuggccuuuauccgcaaguccgaugagcugcuccacaacgucaauguggggaaaagcaccacaaacauuaugaucaccacgaucauuaucgugauuaucguuauucugcuucugcucaucgccgucggacuguuccuguacugcaaagcuagaugaggacuagugcaucacauuuaaaagcaucucagccuaccaugagaauaagagaaagaaaaugaagaucaauagcuuauucaucucuuuuucuuuuucguugguguaaagccaacacccugucuaaaaaacauaaauuucuuuaaucauuuugccucuuuucucugugcuucaauuaauaaaaaauggaaagaaccuagaucuaaaaaaaaaaaaaaaaaaaaaaaaaaaaaaaaaaaaaaaaaaaaaaaaaaaaaaaaaaaaaaaaugcaucccccccccccccccccccccccccccccccaaaggcucuuuucagagccaccagaauu

SEQ ID NO: 13922 - RNA, 1931 nt, Artificial Sequence
  mRNA product Design i-2 comprising derived and/or modified sequence from HRSV(Memphis-37)__AIY60640.1__F-del_DSCav1_mut0 (opt6)
gggagaggcgcugccuacggagguggcagccaucuccuucucggcaucaagcuuaccauggaacucccaauacuuaaaacaaacgcaaucacaacaauacuagcugcagucacacuaugcuucgccucaucacaaaauauaacagaagaauuuuaucaaucaacaugcuccgcaguaucaaaaggauaucucucugcauuacgaacagguugguacaccucgguaauaacaauagaauuaucaaacauaaaagaaaauaaaugcaauggaaccgaugccaaaguaaaacuaaucaaacaagaacuugacaaauacaaaaacgcaguaacagaacuacaacuauuaaugcaaucaacaccagcagcagguucaggcuccgcaaucgcuucaggaauagccguuuguaaaguacuacacuuagaaggagaaguaaauaaaauaaaaaacgccuuacuaucaacaaacaaagcaguagucucccuuuccaacggaguaucagucuuaacuuuuaaaguacucgacuuaaaaaauuacaucgacaaacaacuacuacccauucuaaauaaacaaucaugcucaauaucaaacaucgaaacaguaaucgaauuucaacaaaaaaauaauagauuacuagaaauaacacgagaauuuuccguaaaugccggaguaacgaccccagucucaacauacauguuaacaaacucagaauuacuaucacucauuaacgauaugccaauaacaaaugaccaaaaaaaacuaaugucaaacaacguccaaauaguacgacaacaaucauacucuaucauguguauaauaaaagaagaaguuuuagcauacguaguacaacuaccacuuuacggagucauagacaccccaugcuggaaacuacacacaucacccuuauguacaacaaacaccaaagaagggucuaacauaugucucacuagaacagaucgaggcugguacugcgacaacgcaggaucaguuagcuuuuucccucaagccgaaaccuguaaaguacaauccaaucgaguauuuugcgacacuaugaacucuagaaccuuacccuccgaaguaaaccuauguaacauagacauauuuaaucccaaauaugauugcaaaaucaugacauccaaaacagauguaucaagcucuguaauaaccucacuaggagcaauaguuucaugcuaugguaaaacaaaaugcaccgccucaaacaaaaauagagggauaaucaaaaccuucucaaauggaugcgacuacguaucaaauaaaggaguagacaccgucuccguaggaaacacacuauacuacguaaacaaacaagaaggaaaaucacuauacguaaaaggagaaccaaucauaaacuucuacgacccacuuguuuucccaucagaugaauuugaugccuccauaucacaaguaaacgaaaaaauaaaccaaucucuagccuucaucagaaaauccgacgaacuuuuacacaacguaaacguagguaaaucaacaaccaacaucaugauaacaacaauaauaauaguaauaauuguaauacuuuuacuacuuaucgccguaggccuauucuuauauuguaaagcaagaugaggacuagugcaucacauuuaaaagcaucucagccuaccaugagaauaagagaaagaaaaugaagaucaauagcuuauucaucucuuuuucuuuuucguugguguaaagccaacacccugucuaaaaaacauaaauuucuuuaaucauuuugccucuuuucucugugcuucaauuaauaaaaaauggaaagaaccuagaucuaaaaaaaaaaaaaaaaaaaaaaaaaaaaaaaaaaaaaaaaaaaaaaaaaaaaaaaaaaaaaaaaugcaucccccccccccccccccccccccccccccccaaaggcucuuuucagagccaccagaauu

SEQ ID NO: 13923 - RNA, 1931 nt, Artificial Sequence
  mRNA product Design i-2 comprising derived and/or modified sequence from HRSV(Memphis-37)__AIY60640.1__F-del_DSCav1_mut0 (opt11)
gggagaggcgcugccuacggagguggcagccaucuccuucucggcaucaagcuuaccauggaacuaccaauccucaaaaccaacgccaucacuacaauccuagccgcgguaacccugugcuucgccuccucacaaaacaucacagaagaauuuuaccaaucaaccugcuccgccguauccaaaggauaccugagcgcccugagaaccggcugguacaccuccgucaucaccauagaacucuccaacaucaaagaaaacaaaugcaacgguacggacgccaaaguuaaacucaucaaacaagaacuugacaaauacaagaacgccgucacagaacugcaacuccucaugcaauccacccccgccgccggcuccggcuccgccauagccuccggcaucgccgucugcaaagucuuacaccuagaaggcgaagucaacaaaaucaaaaacgcacuacuuuccacaaacaaagccgucgucucacucuccaacggcguauccguccucaccuucaaaguacuugaccucaaaaacuacaucgacaaacaacuacuccccauccugaacaaacaauccugcucaaucuccaacaucgaaaccguaaucgaguuccaacagaaaaauaaucgccuccuggagaucacccgcgaguucuccgucaaugcaggagucacaaccccaguaucaaccuacaugcucaccaacuccgaacuccugucgcucaucaacgacaugcccaucacaaacgaccaaaagaaacucauguccaacaacguacaaaucgucagacaacaauccuauucuauaaugugcaucaucaaagaagaaguccucgccuacgucguacaacucccccucuacggcguuaucgacacccccugcuggaaacuccacaccucaccccucugcaccaccaacacaaaagaaggcuccaacaucugccucacucggaccgaccgcggcugguacugcgacaaugccggcagcgucuccuucuucccacaagccgaaaccugcaaaguccaguccaaccgcguauucugcgacacuaugaacuccagaacccuccccuccgaaguaaaccucugcaacaucgacaucuucaacccaaaauacgacugcaaaaucaugaccucaaaaaccgacgucagcucgucagucauaaccagccucggagccauagucucaugcuacggaaaaaccaaaugcaccgccagcaacaaaaaccgcggcauaauaaaaacauucuccaacggcugcgacuauguauccaacaaaggagucgauaccgucuccguaggcaacacccuauacuacgucaacaaacaagaaggcaaaucccucuacgucaaaggugaaccaaucaucaacuucuacgacccucucgucuuccccuccgaugaguucgacgccucaaucagccaaguaaacgaaaagauaaaccaaucacucgccuucauccgcaaauccgacgaacuucuucacaacgucaacgucggcaaaucuaccaccaacauaaugauaaccaccaucaucaucgucaucaucguaauacuccuccuucucaucgccgucggccuauuccuauacugcaaagcccgcuagggacuagugcaucacauuuaaaagcaucucagccuaccaugagaauaagagaaagaaaaugaagaucaauagcuuauucaucucuuuuucuuuuucguugguguaaagccaacacccugucuaaaaaacauaaauuucuuuaaucauuuugccucuuuucucugugcuucaauuaauaaaaaauggaaagaaccuagaucuaaaaaaaaaaaaaaaaaaaaaaaaaaaaaaaaaaaaaaaaaaaaaaaaaaaaaaaaaaaaaaaaugcaucccccccccccccccccccccccccccccccaaaggcucuuuucagagccaccagaauu

SEQ ID NO: 13924 - RNA, 1927 nt, Artificial Sequence
  mRNA product Design i-2 comprising derived and/or modified sequence from HRSV(Memphis-37)__AIY60640.1__F-del_DSCav1_mut0 (opt1)
ggggcgcugccuacggagguggcagccaucuccuucucggcaucaagcuuaccauggagcugcccauccucaagaccaacgccaucaccacgauccuggccgcggugacccugugcuucgccagcucccagaacaucaccgaggaguucuaccagagcacgugcuccgccgucagcaagggcuaccucuccgcccugcgcaccgggugguacaccagcgugaucaccaucgagcuguccaacaucaaggagaacaagugcaacggcaccgacgccaaggugaagcucaucaagcaggagcuggacaaguacaagaacgcggucacggagcugcagcuccugaugcagagcaccccggccgccggcuccgggagcgcgaucgccuccggcaucgccgucugcaaggugcugcaccucgagggcgaggugaacaagaucaagaacgcccugcuguccaccaacaaggccgucgugagccucuccaacggggugagcguccugaccuucaaggugcuggaccucaagaacuacaucgacaagcagcugcugcccauccugaacaagcagagcugcuccaucagcaacaucgagaccgucaucgaguuccagcagaagaacaaccgccuccuggagaucacgcgggaguucagcgugaacgcgggcgugaccacccccgucuccaccuacaugcugacgaacagcgagcuccugucccugaucaacgacaugccgaucaccaacgaccagaagaagcucaugagcaacaacgugcagaucgugcgccagcaguccuacagcaucaugugcaucaucaaggaggagguccuggccuacguggugcagcugccccucuacggggucaucgacacccccugcuggaagcugcacaccagcccccugugcacgaccaacaccaaggagggcuccaacaucugccucacccggacggaccgcgggugguacugcgacaacgccggcagcguguccuucuucccgcaggccgagaccugcaagguccagagcaaccggguguucugcgacaccaugaacucccggacccugcccagcgaggugaaccucugcaacaucgacaucuucaaccccaaguacgacugcaagaucaugacguccaagaccgacgucagcuccagcgugaucaccucccugggcgccaucgugagcugcuacgggaagaccaagugcacggcgagcaacaagaaccgcggcaucaucaagaccuucuccaacgggugcgacuacgucagcaacaagggcguggacaccguguccgucggcaacacccuguacuacgugaacaagcaggagggcaagagccucuacgugaagggggagcccaucaucaacuucuacgacccgcuggucuuccccuccgacgaguucgacgccagcaucucccaggugaacgagaagaucaaccagagccuggccuucauccggaaguccgacgagcuccugcacaacgugaacgucggcaagagcaccacgaacaucaugaucaccaccaucaucaucgugaucaucgugauccugcugcuccugaucgccgucgggcuguuccucuacugcaaggcccgcugaggacuagugcaucacauuuaaaagcaucucagccuaccaugagaauaagagaaagaaaaugaagaucaauagcuuauucaucucuuuuucuuuuucguugguguaaagccaacacccugucuaaaaaacauaaauuucuuuaaucauuuugccucuuuucucugugcuucaauuaauaaaaaauggaaagaaccuagaucuaaaaaaaaaaaaaaaaaaaaaaaaaaaaaaaaaaaaaaaaaaaaaaaaaaaaaaaaaaaaaaaaugcaucccccccccccccccccccccccccccccccaaaggcucuuuucagagccaccagaauu

SEQ ID NO: 13925 - RNA, 1927 nt, Artificial Sequence
  mRNA product Design i-2 comprising derived and/or modified sequence from HRSV(Memphis-37)__AIY60640.1__F-del_DSCav1_mut0 (opt1)
ggggcgcugccuacggagguggcagccaucuccuucucggcaucaagcuuaccauggagcugcccauccucaagaccaacgccaucaccacgauccuggccgcggugacccugugcuucgccagcucccagaacaucaccgaggaguucuaccagagcacgugcuccgccgucagcaagggcuaccucuccgcccugcgcaccgggugguacaccagcgugaucaccaucgagcuguccaacaucaaggagaacaagugcaacggcaccgacgccaaggugaagcucaucaagcaggagcuggacaaguacaagaacgcggucacggagcugcagcuccugaugcagagcaccccggccgccggguccggcagcgccaucgcguccgggaucgccgugugcaaggugcugcaccucgagggcgaggucaacaagaucaagaacgcccugcugagcaccaacaaggccguggugucccucagcaacggcgucuccgugcugaccuucaaggugcuggaccucaagaacuacaucgacaagcagcugcugcccauccucaacaagcagagcugcuccaucagcaacaucgagacggucaucgaguuccagcagaagaacaaccggcugcuggagaucacccgcgaguucuccgugaacgccggggugaccacccccgucagcacguacaugcucaccaacagcgagcugcugucccucaucaacgacaugcccaucaccaacgaccagaagaagcugaugagcaacaacgugcagaucgugcggcagcaguccuacagcaucaugugcaucaucaaggaggagguccuggcguacguggugcagcucccgcuguacggcgucaucgacacccccugcuggaagcugcacacgagcccccucugcaccaccaacaccaaggagggguccaacaucugccugacgcgcaccgaccggggcugguacugcgacaacgccggguccgugagcuucuucccccaggccgagaccugcaaggugcaguccaaccgcgucuucugcgacaccaugaacagccggacgcucccguccgaggugaaccugugcaacaucgacaucuucaaccccaaguacgacugcaagaucaugaccagcaagaccgacgucuccagcuccgugaucaccagccugggcgccaucguguccugcuacggcaagacgaagugcaccgccagcaacaagaaccgggggaucaucaagaccuucuccaacggcugcgacuacgucagcaacaaggggguggacaccgugagcgucggcaacacgcucuacuacgugaacaagcaggagggcaagucccuguacgugaagggggagcccaucaucaacuucuacgacccccuggucuucccgagcgacgaguucgacgcguccaucagccaggugaacgagaagaucaaccagucccucgccuucauccgcaagagcgacgagcugcugcacaacgugaacgucggcaaguccaccaccaacaucaugaucaccaccaucaucaucgugaucaucgugauccuccugcugcucaucgccgucgggcuguuccuguacugcaaggcccggugaggacuagugcaucacauuuaaaagcaucucagccuaccaugagaauaagagaaagaaaaugaagaucaauagcuuauucaucucuuuuucuuuuucguugguguaaagccaacacccugucuaaaaaacauaaauuucuuuaaucauuuugccucuuuucucugugcuucaauuaauaaaaaauggaaagaaccuagaucuaaaaaaaaaaaaaaaaaaaaaaaaaaaaaaaaaaaaaaaaaaaaaaaaaaaaaaaaaaaaaaaaugcaucccccccccccccccccccccccccccccccaaaggcucuuuucagagccaccagaauu

SEQ ID NO: 13926 - RNA, 1927 nt, Artificial Sequence
  mRNA product Design i-2 comprising derived and/or modified sequence from HRSV(Memphis-37)__AIY60640.1__F-del_DSCav1_mut0 (opt2)
ggggcgcugccuacggagguggcagccaucuccuucucggcaucaagcuuaccauggagcuccccauccucaagaccaacgccaucaccaccauccucgccgccgucacccucugcuucgccuccucccagaacaucaccgaggaguucuaccaguccaccugcuccgccgucuccaagggcuaccucuccgcccuccgcaccggcugguacaccuccgucaucaccaucgagcucuccaacaucaaggagaacaagugcaacggcaccgacgccaaggucaagcucaucaagcaggagcucgacaaguacaagaacgccgucaccgagcuccagcuccucaugcaguccacccccgccgccggcuccggcuccgccaucgccuccggcaucgccgucugcaagguccuccaccucgagggcgaggucaacaagaucaagaacgcccuccucuccaccaacaaggccgucgucucccucuccaacggcgucuccguccucaccuucaagguccucgaccucaagaacuacaucgacaagcagcuccuccccauccucaacaagcaguccugcuccaucuccaacaucgagaccgucaucgaguuccagcagaagaacaaccgccuccucgagaucacccgcgaguucuccgucaacgccggcgucaccacccccgucuccaccuacaugcucaccaacuccgagcuccucucccucaucaacgacaugcccaucaccaacgaccagaagaagcucauguccaacaacguccagaucguccgccagcaguccuacuccaucaugugcaucaucaaggaggagguccucgccuacgucguccagcucccccucuacggcgucaucgacacccccugcuggaagcuccacaccuccccccucugcaccaccaacaccaaggagggcuccaacaucugccucacccgcaccgaccgcggcugguacugcgacaacgccggcuccgucuccuucuucccccaggccgagaccugcaagguccaguccaaccgcgucuucugcgacaccaugaacucccgcacccuccccuccgaggucaaccucugcaacaucgacaucuucaaccccaaguacgacugcaagaucaugaccuccaagaccgacgucuccuccuccgucaucaccucccucggcgccaucgucuccugcuacggcaagaccaagugcaccgccuccaacaagaaccgcggcaucaucaagaccuucuccaacggcugcgacuacgucuccaacaagggcgucgacaccgucuccgucggcaacacccucuacuacgucaacaagcaggagggcaagucccucuacgucaagggcgagcccaucaucaacuucuacgacccccucgucuuccccuccgacgaguucgacgccuccaucucccaggucaacgagaagaucaaccagucccucgccuucauccgcaaguccgacgagcuccuccacaacgucaacgucggcaaguccaccaccaacaucaugaucaccaccaucaucaucgucaucaucgucauccuccuccuccucaucgccgucggccucuuccucuacugcaaggcccgcugaggacuagugcaucacauuuaaaagcaucucagccuaccaugagaauaagagaaagaaaaugaagaucaauagcuuauucaucucuuuuucuuuuucguugguguaaagccaacacccugucuaaaaaacauaaauuucuuuaaucauuuugccucuuuucucugugcuucaauuaauaaaaaauggaaagaaccuagaucuaaaaaaaaaaaaaaaaaaaaaaaaaaaaaaaaaaaaaaaaaaaaaaaaaaaaaaaaaaaaaaaaugcaucccccccccccccccccccccccccccccccaaaggcucuuuucagagccaccagaauu

SEQ ID NO: 13927 - RNA, 1927 nt, Artificial Sequence
  mRNA product Design i-2 comprising derived and/or modified sequence from HRSV(Memphis-37)__AIY60640.1__F-del_DSCav1_mut0 (opt3)
ggggcgcugccuacggagguggcagccaucuccuucucggcaucaagcuuaccauggagcugcccauccucaagaccaacgccauuacaacuauacuugcugcagugacgcugugcuucgccagcucccagaauaucaccgaagaguuuuaccaaucuacauguucagcggucaguaaaggcuauuugagcgcuuuaagaacugggugguacaccuccguuauuacaaucgaacugucuaacauuaaggagaauaaaugcaacggaaccgacgccaaggugaaacuaaucaagcaggaacucgauaaguauaaaaaugcaguaacugagcugcagcuucugaugcagucgaccccugccgcugguucaggcagcgcaauagccagugggaucgcuguguguaaggucuugcaccucgagggagaagugaacaaaauuaagaaugcccugcuguccacaaacaaagcgguugugucucucagcaauggcgucuccguguuaacguucaagguacuggaccuuaagaacuacaucgauaaacaauugcugccaauucuaaauaagcagucaugcaguaucagcaacauagagacuguuauugaauuucagcagaaaaauaacaggcuccuggagaucacccgggaguucucugugaaugccggugucacaacuccgguguccaccuauaugcuuacaaacucagaacuguugagccucauuaacgacaugcccaucaccaaugaucaaaagaaacugaugaguaacaaugugcagaucguccgccagcagucuuacuccauuauguguauaaucaaggaggaaguuuuagcauaugugguacaacugccucucuacggggugauugacacgccaugcuggaaacuucauacuagcccccuguguacaaccaacacuaaggagggaucgaauaucugcuugacacgaaccgaucguggcugguacugugacaacgcuggcucugucuccuuuuucccucaggccgaaacgugcaaggugcagucaaauagaguguuuugugauaccaugaacaguagaacacugccaagcgaggugaaucucugcaacauagacauuuucaaucccaaauaugauugcaagaucaugacuuccaaaaccgacgucucuagcucagugaucacaagucugggggcaauuguauccuguuacggaaagacuaaaugcaccgcuagcaacaagaauagggguaucauuaagacauuuucuaacggcugugauuauguuucaaauaaagggguggacaccgucagugugggaaacacucuuuacuaugucaacaagcaagagggcaaaagccuguacgugaagggugaaccuauaaucaauuucuaugacccauugguuuuuccguccgaugaguucgacgccucuauuucgcagguuaacgagaaaaucaaucagagccucgcguuuauccggaaguccgaugaacuguuacacaacguaaaugucgggaagucaacgacaaacauuaugauaaccacuaucauuaucgugauuaucguuauacugcuacuccugaucgccgugggacuuuucuuguacugcaaagcacgcugaggacuagugcaucacauuuaaaagcaucucagccuaccaugagaauaagagaaagaaaaugaagaucaauagcuuauucaucucuuuuucuuuuucguugguguaaagccaacacccugucuaaaaaacauaaauuucuuuaaucauuuugccucuuuucucugugcuucaauuaauaaaaaauggaaagaaccuagaucuaaaaaaaaaaaaaaaaaaaaaaaaaaaaaaaaaaaaaaaaaaaaaaaaaaaaaaaaaaaaaaaaugcaucccccccccccccccccccccccccccccccaaaggcucuuuucagagccaccagaauu

SEQ ID NO: 13928 - RNA, 1927 nt, Artificial Sequence
  mRNA product Design i-2 comprising derived and/or modified sequence from HRSV(Memphis-37)__AIY60640.1__F-del_DSCav1_mut0 (opt4)
ggggcgcugccuacggagguggcagccaucuccuucucggcaucaagcuuaccauggagcugcccauccugaagaccaacgccaucaccaccauccuggccgccgugacccugugcuucgccagcagccagaacaucaccgaggaguucuaccagagcaccugcagcgccgugagcaagggcuaccugagcgcccugagaaccggcugguacaccagcgugaucaccaucgagcugagcaacaucaaggagaacaagugcaacggcaccgacgccaaggugaagcugaucaagcaggagcuggacaaguacaagaacgccgugaccgagcugcagcugcugaugcagagcacccccgccgccggcagcggcagcgccaucgccagcggcaucgccgugugcaaggugcugcaccuggagggcgaggugaacaagaucaagaacgcccugcugagcaccaacaaggccguggugagccugagcaacggcgugagcgugcugaccuucaaggugcuggaccugaagaacuacaucgacaagcagcugcugcccauccugaacaagcagagcugcagcaucagcaacaucgagaccgugaucgaguuccagcagaagaacaacagacugcuggagaucaccagagaguucagcgugaacgccggcgugaccacccccgugagcaccuacaugcugaccaacagcgagcugcugagccugaucaacgacaugcccaucaccaacgaccagaagaagcugaugagcaacaacgugcagaucgugagacagcagagcuacagcaucaugugcaucaucaaggaggaggugcuggccuacguggugcagcugccccuguacggcgugaucgacacccccugcuggaagcugcacaccagcccccugugcaccaccaacaccaaggagggcagcaacaucugccugaccagaaccgacagaggcugguacugcgacaacgccggcagcgugagcuucuucccccaggccgagaccugcaaggugcagagcaacagaguguucugcgacaccaugaacagcagaacccugcccagcgaggugaaccugugcaacaucgacaucuucaaccccaaguacgacugcaagaucaugaccagcaagaccgacgugagcagcagcgugaucaccagccugggcgccaucgugagcugcuacggcaagaccaagugcaccgccagcaacaagaacagaggcaucaucaagaccuucagcaacggcugcgacuacgugagcaacaagggcguggacaccgugagcgugggcaacacccuguacuacgugaacaagcaggagggcaagagccuguacgugaagggcgagcccaucaucaacuucuacgacccccugguguuccccagcgacgaguucgacgccagcaucagccaggugaacgagaagaucaaccagagccuggccuucaucagaaagagcgacgagcugcugcacaacgugaacgugggcaagagcaccaccaacaucaugaucaccaccaucaucaucgugaucaucgugauccugcugcugcugaucgccgugggccuguuccuguacugcaaggccagaugaggacuagugcaucacauuuaaaagcaucucagccuaccaugagaauaagagaaagaaaaugaagaucaauagcuuauucaucucuuuuucuuuuucguugguguaaagccaacacccugucuaaaaaacauaaauuucuuuaaucauuuugccucuuuucucugugcuucaauuaauaaaaaauggaaagaaccuagaucuaaaaaaaaaaaaaaaaaaaaaaaaaaaaaaaaaaaaaaaaaaaaaaaaaaaaaaaaaaaaaaaaugcaucccccccccccccccccccccccccccccccaaaggcucuuuucagagccaccagaauu

SEQ ID NO: 13929 - RNA, 1927 nt, Artificial Sequence
  mRNA product Design i-2 comprising derived and/or modified sequence from HRSV(Memphis-37)__AIY60640.1__F-del_DSCav1_mut0 (opt5)
ggggcgcugccuacggagguggcagccaucuccuucucggcaucaagcuuaccauggagcugcccauccucaagaccaacgccauuacaacgauccuggcugccgugacccuuugcuucgcgagcucccagaauauuacagaagaguuuuaccaaucuaccuguagcgcugucuccaaaggcuaucugucugcccucagaacagggugguacaccagcguuaucacaauugaacuguccaacaucaaggagaauaaaugcaacggaaccgacgccaaggugaaacuuaucaagcaggaacuggauaaguauaaaaaugcugugacggagcuccagcugcugaugcagucuaccccugccgcuggcagcggguccgccauugcgagcggaaucgccgucuguaaggugcuccaccuggagggcgaaguuaacaaaauuaagaaugcccuucugucuacaaacaaagcuguggucucccucagcaauggggugucuguucugaccuucaaggugcuugaccugaagaacuacaucgauaaacaacuccugccgauucugaauaagcaguccugcagcaucucuaacauugagacagucaucgaauuucagcagaaaaauaaccggcuccuggagaucacccgcgaguucuccgugaaugcuggagugacgacacccgucagcaccuauaugcuuacaaacuccgaacugcucucucugauuaacgacaugccuaucaccaaugaucaaaagaaacuuaugagcaacaauguucagauugugagacagcaguccuacagcaucauguguauuaucaaggaggaagugcuggccuaugucgugcaacucccccuguacggcguuaucgacaccccuugcuggaaacugcauacaucuccccucuguacgaccaacacaaaggagggcuccaauauuugccugacccggacagaucgcgggugguacugugacaacgcgggaagcgugagcuuuuucccucaggccgaaaccugcaagguccagucuaauagaguguuuugugauacgaugaacuccagaacacugccgucugagguuaaucucugcaacaucgacauuuucaaucccaaauaugauugcaagaucaugaccagcaaaaccgacguguccagcucugucauuacaucccugggcgcuaucgugagcuguuacgggaagaccaaaugcacagccucuaacaagaaucggggaaucauuaagacguuuuccaacggcugugauuaugucagcaauaaagggguggacaccguuuccgugggaaacacacuuuacuaugucaacaagcaagagggcaaaucucuguacgugaagggcgaaccuaucauuaauuucuaugacccccucguuuuuccuagcgaugaguucgacgcuuccaucucucaggugaacgaaaagauuaaucagagccuggccuuuauccgcaaguccgaugagcugcuccacaacgucaauguggggaaaagcaccacaaacauuaugaucaccacgaucauuaucgugauuaucguuauucugcuucugcucaucgccgucggacuguuccuguacugcaaagcuagaugaggacuagugcaucacauuuaaaagcaucucagccuaccaugagaauaagagaaagaaaaugaagaucaauagcuuauucaucucuuuuucuuuuucguugguguaaagccaacacccugucuaaaaaacauaaauuucuuuaaucauuuugccucuuuucucugugcuucaauuaauaaaaaauggaaagaaccuagaucuaaaaaaaaaaaaaaaaaaaaaaaaaaaaaaaaaaaaaaaaaaaaaaaaaaaaaaaaaaaaaaaaugcaucccccccccccccccccccccccccccccccaaaggcucuuuucagagccaccagaauu

SEQ ID NO: 13930 - RNA, 1927 nt, Artificial Sequence
  mRNA product Design i-2 comprising derived and/or modified sequence from HRSV(Memphis-37)__AIY60640.1__F-del_DSCav1_mut0 (opt6)
ggggcgcugccuacggagguggcagccaucuccuucucggcaucaagcuuaccauggaacucccaauacuuaaaacaaacgcaaucacaacaauacuagcugcagucacacuaugcuucgccucaucacaaaauauaacagaagaauuuuaucaaucaacaugcuccgcaguaucaaaaggauaucucucugcauuacgaacagguugguacaccucgguaauaacaauagaauuaucaaacauaaaagaaaauaaaugcaauggaaccgaugccaaaguaaaacuaaucaaacaagaacuugacaaauacaaaaacgcaguaacagaacuacaacuauuaaugcaaucaacaccagcagcagguucaggcuccgcaaucgcuucaggaauagccguuuguaaaguacuacacuuagaaggagaaguaaauaaaauaaaaaacgccuuacuaucaacaaacaaagcaguagucucccuuuccaacggaguaucagucuuaacuuuuaaaguacucgacuuaaaaaauuacaucgacaaacaacuacuacccauucuaaauaaacaaucaugcucaauaucaaacaucgaaacaguaaucgaauuucaacaaaaaaauaauagauuacuagaaauaacacgagaauuuuccguaaaugccggaguaacgaccccagucucaacauacauguuaacaaacucagaauuacuaucacucauuaacgauaugccaauaacaaaugaccaaaaaaaacuaaugucaaacaacguccaaauaguacgacaacaaucauacucuaucauguguauaauaaaagaagaaguuuuagcauacguaguacaacuaccacuuuacggagucauagacaccccaugcuggaaacuacacacaucacccuuauguacaacaaacaccaaagaagggucuaacauaugucucacuagaacagaucgaggcugguacugcgacaacgcaggaucaguuagcuuuuucccucaagccgaaaccuguaaaguacaauccaaucgaguauuuugcgacacuaugaacucuagaaccuuacccuccgaaguaaaccuauguaacauagacauauuuaaucccaaauaugauugcaaaaucaugacauccaaaacagauguaucaagcucuguaauaaccucacuaggagcaauaguuucaugcuaugguaaaacaaaaugcaccgccucaaacaaaaauagagggauaaucaaaaccuucucaaauggaugcgacuacguaucaaauaaaggaguagacaccgucuccguaggaaacacacuauacuacguaaacaaacaagaaggaaaaucacuauacguaaaaggagaaccaaucauaaacuucuacgacccacuuguuuucccaucagaugaauuugaugccuccauaucacaaguaaacgaaaaaauaaaccaaucucuagccuucaucagaaaauccgacgaacuuuuacacaacguaaacguagguaaaucaacaaccaacaucaugauaacaacaauaauaauaguaauaauuguaauacuuuuacuacuuaucgccguaggccuauucuuauauuguaaagcaagaugaggacuagugcaucacauuuaaaagcaucucagccuaccaugagaauaagagaaagaaaaugaagaucaauagcuuauucaucucuuuuucuuuuucguugguguaaagccaacacccugucuaaaaaacauaaauuucuuuaaucauuuugccucuuuucucugugcuucaauuaauaaaaaauggaaagaaccuagaucuaaaaaaaaaaaaaaaaaaaaaaaaaaaaaaaaaaaaaaaaaaaaaaaaaaaaaaaaaaaaaaaaugcaucccccccccccccccccccccccccccccccaaaggcucuuuucagagccaccagaauu

SEQ ID NO: 13931 - RNA, 1927 nt, Artificial Sequence
  mRNA product Design i-2 comprising derived and/or modified sequence from HRSV(Memphis-37)__AIY60640.1__F-del_DSCav1_mut0 (opt11)
ggggcgcugccuacggagguggcagccaucuccuucucggcaucaagcuuaccauggaacuaccaauccucaaaaccaacgccaucacuacaauccuagccgcgguaacccugugcuucgccuccucacaaaacaucacagaagaauuuuaccaaucaaccugcuccgccguauccaaaggauaccugagcgcccugagaaccggcugguacaccuccgucaucaccauagaacucuccaacaucaaagaaaacaaaugcaacgguacggacgccaaaguuaaacucaucaaacaagaacuugacaaauacaagaacgccgucacagaacugcaacuccucaugcaauccacccccgccgccggcuccggcuccgccauagccuccggcaucgccgucugcaaagucuuacaccuagaaggcgaagucaacaaaaucaaaaacgcacuacuuuccacaaacaaagccgucgucucacucuccaacggcguauccguccucaccuucaaaguacuugaccucaaaaacuacaucgacaaacaacuacuccccauccugaacaaacaauccugcucaaucuccaacaucgaaaccguaaucgaguuccaacagaaaaauaaucgccuccuggagaucacccgcgaguucuccgucaaugcaggagucacaaccccaguaucaaccuacaugcucaccaacuccgaacuccugucgcucaucaacgacaugcccaucacaaacgaccaaaagaaacucauguccaacaacguacaaaucgucagacaacaauccuauucuauaaugugcaucaucaaagaagaaguccucgccuacgucguacaacucccccucuacggcguuaucgacacccccugcuggaaacuccacaccucaccccucugcaccaccaacacaaaagaaggcuccaacaucugccucacucggaccgaccgcggcugguacugcgacaaugccggcagcgucuccuucuucccacaagccgaaaccugcaaaguccaguccaaccgcguauucugcgacacuaugaacuccagaacccuccccuccgaaguaaaccucugcaacaucgacaucuucaacccaaaauacgacugcaaaaucaugaccucaaaaaccgacgucagcucgucagucauaaccagccucggagccauagucucaugcuacggaaaaaccaaaugcaccgccagcaacaaaaaccgcggcauaauaaaaacauucuccaacggcugcgacuauguauccaacaaaggagucgauaccgucuccguaggcaacacccuauacuacgucaacaaacaagaaggcaaaucccucuacgucaaaggugaaccaaucaucaacuucuacgacccucucgucuuccccuccgaugaguucgacgccucaaucagccaaguaaacgaaaagauaaaccaaucacucgccuucauccgcaaauccgacgaacuucuucacaacgucaacgucggcaaaucuaccaccaacauaaugauaaccaccaucaucaucgucaucaucguaauacuccuccuucucaucgccgucggccuauuccuauacugcaaagcccgcuagggacuagugcaucacauuuaaaagcaucucagccuaccaugagaauaagagaaagaaaaugaagaucaauagcuuauucaucucuuuuucuuuuucguugguguaaagccaacacccugucuaaaaaacauaaauuucuuuaaucauuuugccucuuuucucugugcuucaauuaauaaaaaauggaaagaaccuagaucuaaaaaaaaaaaaaaaaaaaaaaaaaaaaaaaaaaaaaaaaaaaaaaaaaaaaaaaaaaaaaaaaugcaucccccccccccccccccccccccccccccccaaaggcucuuuucagagccaccagaauu

SEQ ID NO: 13932 - RNA, 1762 nt, Artificial Sequence
  mRNA product Design i-3 comprising derived and/or modified sequence from HRSV(Memphis-37)__AIY60640.1__F-del_DSCav1_mut0 (opt1)
gggagaaagcuuaccauggagcugcccauccucaagaccaacgccaucaccacgauccuggccgcggugacccugugcuucgccagcucccagaacaucaccgaggaguucuaccagagcacgugcuccgccgucagcaagggcuaccucuccgcccugcgcaccgggugguacaccagcgugaucaccaucgagcuguccaacaucaaggagaacaagugcaacggcaccgacgccaaggugaagcucaucaagcaggagcuggacaaguacaagaacgcggucacggagcugcagcuccugaugcagagcaccccggccgccggcuccgggagcgcgaucgccuccggcaucgccgucugcaaggugcugcaccucgagggcgaggugaacaagaucaagaacgcccugcuguccaccaacaaggccgucgugagccucuccaacggggugagcguccugaccuucaaggugcuggaccucaagaacuacaucgacaagcagcugcugcccauccugaacaagcagagcugcuccaucagcaacaucgagaccgucaucgaguuccagcagaagaacaaccgccuccuggagaucacgcgggaguucagcgugaacgcgggcgugaccacccccgucuccaccuacaugcugacgaacagcgagcuccugucccugaucaacgacaugccgaucaccaacgaccagaagaagcucaugagcaacaacgugcagaucgugcgccagcaguccuacagcaucaugugcaucaucaaggaggagguccuggccuacguggugcagcugccccucuacggggucaucgacacccccugcuggaagcugcacaccagcccccugugcacgaccaacaccaaggagggcuccaacaucugccucacccggacggaccgcgggugguacugcgacaacgccggcagcguguccuucuucccgcaggccgagaccugcaagguccagagcaaccggguguucugcgacaccaugaacucccggacccugcccagcgaggugaaccucugcaacaucgacaucuucaaccccaaguacgacugcaagaucaugacguccaagaccgacgucagcuccagcgugaucaccucccugggcgccaucgugagcugcuacgggaagaccaagugcacggcgagcaacaagaaccgcggcaucaucaagaccuucuccaacgggugcgacuacgucagcaacaagggcguggacaccguguccgucggcaacacccuguacuacgugaacaagcaggagggcaagagccucuacgugaagggggagcccaucaucaacuucuacgacccgcuggucuuccccuccgacgaguucgacgccagcaucucccaggugaacgagaagaucaaccagagccuggccuucauccggaaguccgacgagcuccugcacaacgugaacgucggcaagagcaccacgaacaucaugaucaccaccaucaucaucgugaucaucgugauccugcugcuccugaucgccgucgggcuguuccucuacugcaaggcccgcugaggacuaguuauaagacugacuagcccgaugggccucccaacgggcccuccuccccuccuugcaccgagauuaauaaaaaaaaaaaaaaaaaaaaaaaaaaaaaaaaaaaaaaaaaaaaaaaaaaaaaaaaaaaaaaaaugcaucccccccccccccccccccccccccccccccaaaggcucuuuucagagccaccagaauu

SEQ ID NO: 13933 - RNA, 1762 nt, Artificial Sequence
  mRNA product Design i-3 comprising derived and/or modified sequence from HRSV(Memphis-37)__AIY60640.1__F-del_DSCav1_mut0 (opt1)
gggagaaagcuuaccauggagcugcccauccucaagaccaacgccaucaccacgauccuggccgcggugacccugugcuucgccagcucccagaacaucaccgaggaguucuaccagagcacgugcuccgccgucagcaagggcuaccucuccgcccugcgcaccgggugguacaccagcgugaucaccaucgagcuguccaacaucaaggagaacaagugcaacggcaccgacgccaaggugaagcucaucaagcaggagcuggacaaguacaagaacgcggucacggagcugcagcuccugaugcagagcaccccggccgccggguccggcagcgccaucgcguccgggaucgccgugugcaaggugcugcaccucgagggcgaggucaacaagaucaagaacgcccugcugagcaccaacaaggccguggugucccucagcaacggcgucuccgugcugaccuucaaggugcuggaccucaagaacuacaucgacaagcagcugcugcccauccucaacaagcagagcugcuccaucagcaacaucgagacggucaucgaguuccagcagaagaacaaccggcugcuggagaucacccgcgaguucuccgugaacgccggggugaccacccccgucagcacguacaugcucaccaacagcgagcugcugucccucaucaacgacaugcccaucaccaacgaccagaagaagcugaugagcaacaacgugcagaucgugcggcagcaguccuacagcaucaugugcaucaucaaggaggagguccuggcguacguggugcagcucccgcuguacggcgucaucgacacccccugcuggaagcugcacacgagcccccucugcaccaccaacaccaaggagggguccaacaucugccugacgcgcaccgaccggggcugguacugcgacaacgccggguccgugagcuucuucccccaggccgagaccugcaaggugcaguccaaccgcgucuucugcgacaccaugaacagccggacgcucccguccgaggugaaccugugcaacaucgacaucuucaaccccaaguacgacugcaagaucaugaccagcaagaccgacgucuccagcuccgugaucaccagccugggcgccaucguguccugcuacggcaagacgaagugcaccgccagcaacaagaaccgggggaucaucaagaccuucuccaacggcugcgacuacgucagcaacaaggggguggacaccgugagcgucggcaacacgcucuacuacgugaacaagcaggagggcaagucccuguacgugaagggggagcccaucaucaacuucuacgacccccuggucuucccgagcgacgaguucgacgcguccaucagccaggugaacgagaagaucaaccagucccucgccuucauccgcaagagcgacgagcugcugcacaacgugaacgucggcaaguccaccaccaacaucaugaucaccaccaucaucaucgugaucaucgugauccuccugcugcucaucgccgucgggcuguuccuguacugcaaggcccggugaggacuaguuauaagacugacuagcccgaugggccucccaacgggcccuccuccccuccuugcaccgagauuaauaaaaaaaaaaaaaaaaaaaaaaaaaaaaaaaaaaaaaaaaaaaaaaaaaaaaaaaaaaaaaaaaugcaucccccccccccccccccccccccccccccccaaaggcucuuuucagagccaccagaauu

SEQ ID NO: 13934 - RNA, 1762 nt, Artificial Sequence
  mRNA product Design i-3 comprising derived and/or modified sequence from HRSV(Memphis-37)__AIY60640.1__F-del_DSCav1_mut0 (opt2)
gggagaaagcuuaccauggagcuccccauccucaagaccaacgccaucaccaccauccucgccgccgucacccucugcuucgccuccucccagaacaucaccgaggaguucuaccaguccaccugcuccgccgucuccaagggcuaccucuccgcccuccgcaccggcugguacaccuccgucaucaccaucgagcucuccaacaucaaggagaacaagugcaacggcaccgacgccaaggucaagcucaucaagcaggagcucgacaaguacaagaacgccgucaccgagcuccagcuccucaugcaguccacccccgccgccggcuccggcuccgccaucgccuccggcaucgccgucugcaagguccuccaccucgagggcgaggucaacaagaucaagaacgcccuccucuccaccaacaaggccgucgucucccucuccaacggcgucuccguccucaccuucaagguccucgaccucaagaacuacaucgacaagcagcuccuccccauccucaacaagcaguccugcuccaucuccaacaucgagaccgucaucgaguuccagcagaagaacaaccgccuccucgagaucacccgcgaguucuccgucaacgccggcgucaccacccccgucuccaccuacaugcucaccaacuccgagcuccucucccucaucaacgacaugcccaucaccaacgaccagaagaagcucauguccaacaacguccagaucguccgccagcaguccuacuccaucaugugcaucaucaaggaggagguccucgccuacgucguccagcucccccucuacggcgucaucgacacccccugcuggaagcuccacaccuccccccucugcaccaccaacaccaaggagggcuccaacaucugccucacccgcaccgaccgcggcugguacugcgacaacgccggcuccgucuccuucuucccccaggccgagaccugcaagguccaguccaaccgcgucuucugcgacaccaugaacucccgcacccuccccuccgaggucaaccucugcaacaucgacaucuucaaccccaaguacgacugcaagaucaugaccuccaagaccgacgucuccuccuccgucaucaccucccucggcgccaucgucuccugcuacggcaagaccaagugcaccgccuccaacaagaaccgcggcaucaucaagaccuucuccaacggcugcgacuacgucuccaacaagggcgucgacaccgucuccgucggcaacacccucuacuacgucaacaagcaggagggcaagucccucuacgucaagggcgagcccaucaucaacuucuacgacccccucgucuuccccuccgacgaguucgacgccuccaucucccaggucaacgagaagaucaaccagucccucgccuucauccgcaaguccgacgagcuccuccacaacgucaacgucggcaaguccaccaccaacaucaugaucaccaccaucaucaucgucaucaucgucauccuccuccuccucaucgccgucggccucuuccucuacugcaaggcccgcugaggacuaguuauaagacugacuagcccgaugggccucccaacgggcccuccuccccuccuugcaccgagauuaauaaaaaaaaaaaaaaaaaaaaaaaaaaaaaaaaaaaaaaaaaaaaaaaaaaaaaaaaaaaaaaaaugcaucccccccccccccccccccccccccccccccaaaggcucuuuucagagccaccagaauu

SEQ ID NO: 13935 - RNA, 1762 nt, Artificial Sequence
  mRNA product Design i-3 comprising derived and/or modified sequence from HRSV(Memphis-37)__AIY60640.1__F-del_DSCav1_mut0 (opt3)
gggagaaagcuuaccauggagcugcccauccucaagaccaacgccauuacaacuauacuugcugcagugacgcugugcuucgccagcucccagaauaucaccgaagaguuuuaccaaucuacauguucagcggucaguaaaggcuauuugagcgcuuuaagaacugggugguacaccuccguuauuacaaucgaacugucuaacauuaaggagaauaaaugcaacggaaccgacgccaaggugaaacuaaucaagcaggaacucgauaaguauaaaaaugcaguaacugagcugcagcuucugaugcagucgaccccugccgcugguucaggcagcgcaauagccagugggaucgcuguguguaaggucuugcaccucgagggagaagugaacaaaauuaagaaugcccugcuguccacaaacaaagcgguugugucucucagcaauggcgucuccguguuaacguucaagguacuggaccuuaagaacuacaucgauaaacaauugcugccaauucuaaauaagcagucaugcaguaucagcaacauagagacuguuauugaauuucagcagaaaaauaacaggcuccuggagaucacccgggaguucucugugaaugccggugucacaacuccgguguccaccuauaugcuuacaaacucagaacuguugagccucauuaacgacaugcccaucaccaaugaucaaaagaaacugaugaguaacaaugugcagaucguccgccagcagucuuacuccauuauguguauaaucaaggaggaaguuuuagcauaugugguacaacugccucucuacggggugauugacacgccaugcuggaaacuucauacuagcccccuguguacaaccaacacuaaggagggaucgaauaucugcuugacacgaaccgaucguggcugguacugugacaacgcuggcucugucuccuuuuucccucaggccgaaacgugcaaggugcagucaaauagaguguuuugugauaccaugaacaguagaacacugccaagcgaggugaaucucugcaacauagacauuuucaaucccaaauaugauugcaagaucaugacuuccaaaaccgacgucucuagcucagugaucacaagucugggggcaauuguauccuguuacggaaagacuaaaugcaccgcuagcaacaagaauagggguaucauuaagacauuuucuaacggcugugauuauguuucaaauaaagggguggacaccgucagugugggaaacacucuuuacuaugucaacaagcaagagggcaaaagccuguacgugaagggugaaccuauaaucaauuucuaugacccauugguuuuuccguccgaugaguucgacgccucuauuucgcagguuaacgagaaaaucaaucagagccucgcguuuauccggaaguccgaugaacuguuacacaacguaaaugucgggaagucaacgacaaacauuaugauaaccacuaucauuaucgugauuaucguuauacugcuacuccugaucgccgugggacuuuucuuguacugcaaagcacgcugaggacuaguuauaagacugacuagcccgaugggccucccaacgggcccuccuccccuccuugcaccgagauuaauaaaaaaaaaaaaaaaaaaaaaaaaaaaaaaaaaaaaaaaaaaaaaaaaaaaaaaaaaaaaaaaaugcaucccccccccccccccccccccccccccccccaaaggcucuuuucagagccaccagaauu

SEQ ID NO: 13936 - RNA, 1762 nt, Artificial Sequence
  mRNA product Design i-3 comprising derived and/or modified sequence from HRSV(Memphis-37)__AIY60640.1__F-del_DSCav1_mut0 (opt4)
gggagaaagcuuaccauggagcugcccauccugaagaccaacgccaucaccaccauccuggccgccgugacccugugcuucgccagcagccagaacaucaccgaggaguucuaccagagcaccugcagcgccgugagcaagggcuaccugagcgcccugagaaccggcugguacaccagcgugaucaccaucgagcugagcaacaucaaggagaacaagugcaacggcaccgacgccaaggugaagcugaucaagcaggagcuggacaaguacaagaacgccgugaccgagcugcagcugcugaugcagagcacccccgccgccggcagcggcagcgccaucgccagcggcaucgccgugugcaaggugcugcaccuggagggcgaggugaacaagaucaagaacgcccugcugagcaccaacaaggccguggugagccugagcaacggcgugagcgugcugaccuucaaggugcuggaccugaagaacuacaucgacaagcagcugcugcccauccugaacaagcagagcugcagcaucagcaacaucgagaccgugaucgaguuccagcagaagaacaacagacugcuggagaucaccagagaguucagcgugaacgccggcgugaccacccccgugagcaccuacaugcugaccaacagcgagcugcugagccugaucaacgacaugcccaucaccaacgaccagaagaagcugaugagcaacaacgugcagaucgugagacagcagagcuacagcaucaugugcaucaucaaggaggaggugcuggccuacguggugcagcugccccuguacggcgugaucgacacccccugcuggaagcugcacaccagcccccugugcaccaccaacaccaaggagggcagcaacaucugccugaccagaaccgacagaggcugguacugcgacaacgccggcagcgugagcuucuucccccaggccgagaccugcaaggugcagagcaacagaguguucugcgacaccaugaacagcagaacccugcccagcgaggugaaccugugcaacaucgacaucuucaaccccaaguacgacugcaagaucaugaccagcaagaccgacgugagcagcagcgugaucaccagccugggcgccaucgugagcugcuacggcaagaccaagugcaccgccagcaacaagaacagaggcaucaucaagaccuucagcaacggcugcgacuacgugagcaacaagggcguggacaccgugagcgugggcaacacccuguacuacgugaacaagcaggagggcaagagccuguacgugaagggcgagcccaucaucaacuucuacgacccccugguguuccccagcgacgaguucgacgccagcaucagccaggugaacgagaagaucaaccagagccuggccuucaucagaaagagcgacgagcugcugcacaacgugaacgugggcaagagcaccaccaacaucaugaucaccaccaucaucaucgugaucaucgugauccugcugcugcugaucgccgugggccuguuccuguacugcaaggccagaugaggacuaguuauaagacugacuagcccgaugggccucccaacgggcccuccuccccuccuugcaccgagauuaauaaaaaaaaaaaaaaaaaaaaaaaaaaaaaaaaaaaaaaaaaaaaaaaaaaaaaaaaaaaaaaaaugcaucccccccccccccccccccccccccccccccaaaggcucuuuucagagccaccagaauu

SEQ ID NO: 13937 - RNA, 1762 nt, Artificial Sequence
  mRNA product Design i-3 comprising derived and/or modified sequence from HRSV(Memphis-37)__AIY60640.1__F-del_DSCav1_mut0 (opt5)
gggagaaagcuuaccauggagcugcccauccucaagaccaacgccauuacaacgauccuggcugccgugacccuuugcuucgcgagcucccagaauauuacagaagaguuuuaccaaucuaccuguagcgcugucuccaaaggcuaucugucugcccucagaacagggugguacaccagcguuaucacaauugaacuguccaacaucaaggagaauaaaugcaacggaaccgacgccaaggugaaacuuaucaagcaggaacuggauaaguauaaaaaugcugugacggagcuccagcugcugaugcagucuaccccugccgcuggcagcggguccgccauugcgagcggaaucgccgucuguaaggugcuccaccuggagggcgaaguuaacaaaauuaagaaugcccuucugucuacaaacaaagcuguggucucccucagcaauggggugucuguucugaccuucaaggugcuugaccugaagaacuacaucgauaaacaacuccugccgauucugaauaagcaguccugcagcaucucuaacauugagacagucaucgaauuucagcagaaaaauaaccggcuccuggagaucacccgcgaguucuccgugaaugcuggagugacgacacccgucagcaccuauaugcuuacaaacuccgaacugcucucucugauuaacgacaugccuaucaccaaugaucaaaagaaacuuaugagcaacaauguucagauugugagacagcaguccuacagcaucauguguauuaucaaggaggaagugcuggccuaugucgugcaacucccccuguacggcguuaucgacaccccuugcuggaaacugcauacaucuccccucuguacgaccaacacaaaggagggcuccaauauuugccugacccggacagaucgcgggugguacugugacaacgcgggaagcgugagcuuuuucccucaggccgaaaccugcaagguccagucuaauagaguguuuugugauacgaugaacuccagaacacugccgucugagguuaaucucugcaacaucgacauuuucaaucccaaauaugauugcaagaucaugaccagcaaaaccgacguguccagcucugucauuacaucccugggcgcuaucgugagcuguuacgggaagaccaaaugcacagccucuaacaagaaucggggaaucauuaagacguuuuccaacggcugugauuaugucagcaauaaagggguggacaccguuuccgugggaaacacacuuuacuaugucaacaagcaagagggcaaaucucuguacgugaagggcgaaccuaucauuaauuucuaugacccccucguuuuuccuagcgaugaguucgacgcuuccaucucucaggugaacgaaaagauuaaucagagccuggccuuuauccgcaaguccgaugagcugcuccacaacgucaauguggggaaaagcaccacaaacauuaugaucaccacgaucauuaucgugauuaucguuauucugcuucugcucaucgccgucggacuguuccuguacugcaaagcuagaugaggacuaguuauaagacugacuagcccgaugggccucccaacgggcccuccuccccuccuugcaccgagauuaauaaaaaaaaaaaaaaaaaaaaaaaaaaaaaaaaaaaaaaaaaaaaaaaaaaaaaaaaaaaaaaaaugcaucccccccccccccccccccccccccccccccaaaggcucuuuucagagccaccagaauu

SEQ ID NO: 13938 - RNA, 1762 nt, Artificial Sequence
  mRNA product Design i-3 comprising derived and/or modified sequence from HRSV(Memphis-37)__AIY60640.1__F-del_DSCav1_mut0 (opt6)
gggagaaagcuuaccauggaacucccaauacuuaaaacaaacgcaaucacaacaauacuagcugcagucacacuaugcuucgccucaucacaaaauauaacagaagaauuuuaucaaucaacaugcuccgcaguaucaaaaggauaucucucugcauuacgaacagguugguacaccucgguaauaacaauagaauuaucaaacauaaaagaaaauaaaugcaauggaaccgaugccaaaguaaaacuaaucaaacaagaacuugacaaauacaaaaacgcaguaacagaacuacaacuauuaaugcaaucaacaccagcagcagguucaggcuccgcaaucgcuucaggaauagccguuuguaaaguacuacacuuagaaggagaaguaaauaaaauaaaaaacgccuuacuaucaacaaacaaagcaguagucucccuuuccaacggaguaucagucuuaacuuuuaaaguacucgacuuaaaaaauuacaucgacaaacaacuacuacccauucuaaauaaacaaucaugcucaauaucaaacaucgaaacaguaaucgaauuucaacaaaaaaauaauagauuacuagaaauaacacgagaauuuuccguaaaugccggaguaacgaccccagucucaacauacauguuaacaaacucagaauuacuaucacucauuaacgauaugccaauaacaaaugaccaaaaaaaacuaaugucaaacaacguccaaauaguacgacaacaaucauacucuaucauguguauaauaaaagaagaaguuuuagcauacguaguacaacuaccacuuuacggagucauagacaccccaugcuggaaacuacacacaucacccuuauguacaacaaacaccaaagaagggucuaacauaugucucacuagaacagaucgaggcugguacugcgacaacgcaggaucaguuagcuuuuucccucaagccgaaaccuguaaaguacaauccaaucgaguauuuugcgacacuaugaacucuagaaccuuacccuccgaaguaaaccuauguaacauagacauauuuaaucccaaauaugauugcaaaaucaugacauccaaaacagauguaucaagcucuguaauaaccucacuaggagcaauaguuucaugcuaugguaaaacaaaaugcaccgccucaaacaaaaauagagggauaaucaaaaccuucucaaauggaugcgacuacguaucaaauaaaggaguagacaccgucuccguaggaaacacacuauacuacguaaacaaacaagaaggaaaaucacuauacguaaaaggagaaccaaucauaaacuucuacgacccacuuguuuucccaucagaugaauuugaugccuccauaucacaaguaaacgaaaaaauaaaccaaucucuagccuucaucagaaaauccgacgaacuuuuacacaacguaaacguagguaaaucaacaaccaacaucaugauaacaacaauaauaauaguaauaauuguaauacuuuuacuacuuaucgccguaggccuauucuuauauuguaaagcaagaugaggacuaguuauaagacugacuagcccgaugggccucccaacgggcccuccuccccuccuugcaccgagauuaauaaaaaaaaaaaaaaaaaaaaaaaaaaaaaaaaaaaaaaaaaaaaaaaaaaaaaaaaaaaaaaaaugcaucccccccccccccccccccccccccccccccaaaggcucuuuucagagccaccagaauu

SEQ ID NO: 13939 - RNA, 1762 nt, Artificial Sequence
  mRNA product Design i-3 comprising derived and/or modified sequence from HRSV(Memphis-37)__AIY60640.1__F-del_DSCav1_mut0 (opt11)
gggagaaagcuuaccauggaacuaccaauccucaaaaccaacgccaucacuacaauccuagccgcgguaacccugugcuucgccuccucacaaaacaucacagaagaauuuuaccaaucaaccugcuccgccguauccaaaggauaccugagcgcccugagaaccggcugguacaccuccgucaucaccauagaacucuccaacaucaaagaaaacaaaugcaacgguacggacgccaaaguuaaacucaucaaacaagaacuugacaaauacaagaacgccgucacagaacugcaacuccucaugcaauccacccccgccgccggcuccggcuccgccauagccuccggcaucgccgucugcaaagucuuacaccuagaaggcgaagucaacaaaaucaaaaacgcacuacuuuccacaaacaaagccgucgucucacucuccaacggcguauccguccucaccuucaaaguacuugaccucaaaaacuacaucgacaaacaacuacuccccauccugaacaaacaauccugcucaaucuccaacaucgaaaccguaaucgaguuccaacagaaaaauaaucgccuccuggagaucacccgcgaguucuccgucaaugcaggagucacaaccccaguaucaaccuacaugcucaccaacuccgaacuccugucgcucaucaacgacaugcccaucacaaacgaccaaaagaaacucauguccaacaacguacaaaucgucagacaacaauccuauucuauaaugugcaucaucaaagaagaaguccucgccuacgucguacaacucccccucuacggcguuaucgacacccccugcuggaaacuccacaccucaccccucugcaccaccaacacaaaagaaggcuccaacaucugccucacucggaccgaccgcggcugguacugcgacaaugccggcagcgucuccuucuucccacaagccgaaaccugcaaaguccaguccaaccgcguauucugcgacacuaugaacuccagaacccuccccuccgaaguaaaccucugcaacaucgacaucuucaacccaaaauacgacugcaaaaucaugaccucaaaaaccgacgucagcucgucagucauaaccagccucggagccauagucucaugcuacggaaaaaccaaaugcaccgccagcaacaaaaaccgcggcauaauaaaaacauucuccaacggcugcgacuauguauccaacaaaggagucgauaccgucuccguaggcaacacccuauacuacgucaacaaacaagaaggcaaaucccucuacgucaaaggugaaccaaucaucaacuucuacgacccucucgucuuccccuccgaugaguucgacgccucaaucagccaaguaaacgaaaagauaaaccaaucacucgccuucauccgcaaauccgacgaacuucuucacaacgucaacgucggcaaaucuaccaccaacauaaugauaaccaccaucaucaucgucaucaucguaauacuccuccuucucaucgccgucggccuauuccuauacugcaaagcccgcuagggacuaguuauaagacugacuagcccgaugggccucccaacgggcccuccuccccuccuugcaccgagauuaauaaaaaaaaaaaaaaaaaaaaaaaaaaaaaaaaaaaaaaaaaaaaaaaaaaaaaaaaaaaaaaaaugcaucccccccccccccccccccccccccccccccaaaggcucuuuucagagccaccagaauu

SEQ ID NO: 13940 - protein, 535 aa, Artificial Sequence
  derived and/or modified protein sequence (artificial) from HRSV(Memphis-37)__AIY60640.1__F_DSCav1_mut1
MELPILKTNAITTILAAVTLCFASSQNITEEFYQSTCSAVSKGYLGALRTGWYTSVITIELSNIKENKCNGTDAKVKLIKQELDKYKNAVTELQLLMQSTPAAGSGSAICSGIAVCKVLHLEGEVNKIKNALLSTNKAVVSLSNGVSVLTFKVLDLKNYIDKQLLPILNKQSCSIPNIETVIEFQQKNNRLLEITREFSVNAGVTTPVSTYMLTNSELLSLINDMPITNDQKKLMSNNVQIVRQQSYSIMCIIKEEVLAYVVQLPLYGVIDTPCWKLHTSPLCTTNTKEGSNICLTRTDRGWYCDNAGSVSFFPQAETCKVQSNRVFCDTMNSLTLPSEVNLCNIDIFNPKYDCKIMTSKTDVSSSVITSLGAIVSCYGKTKCTASNKNRGIIKTFSNGCDYVSNKGVDTVSVGNTLYCVNKQEGQSLYVKGEPIINFYDPLVFPSDEFDASISQVNEKINQSLAFIRKSDELLHNVNVGKSTTNIMITTIIIVIIVILLLLIAVGLFLYCKARSTPVTLSKDQLSGINNIAFSN

SEQ ID NO: 13941 - RNA, 1608 nt, Artificial Sequence
  derived and/or modified CDS sequence (opt1) from HRSV(Memphis-37)__AIY60640.1__F_DSCav1_mut1
auggagcugcccauccucaagaccaacgccaucaccacgauccuggccgcggugacccugugcuucgccagcucccagaacaucaccgaggaguucuaccagagcacgugcuccgccgucagcaagggcuaccucggcgcccugcgcaccgggugguacaccagcgugaucaccaucgagcuguccaacaucaaggagaacaagugcaacggcaccgacgccaaggugaagcucaucaagcaggagcuggacaaguacaagaacgcggucacggagcugcagcuccugaugcagagcaccccggccgccggcuccgggagcgcgaucugcuccggcaucgccgucugcaaggugcugcaccucgagggcgaggugaacaagaucaagaacgcccugcuguccaccaacaaggccgucgugagccucuccaacggggugagcguccugaccuucaaggugcuggaccucaagaacuacaucgacaagcagcugcugcccauccugaacaagcagagcugcuccauccccaacaucgagaccgucaucgaguuccagcagaagaacaaccgccuccuggagaucacgcgggaguucagcgugaacgcgggcgugaccacccccgucuccaccuacaugcugacgaacagcgagcuccugucccugaucaacgacaugccgaucaccaacgaccagaagaagcucaugagcaacaacgugcagaucgugcgccagcaguccuacagcaucaugugcaucaucaaggaggagguccuggccuacguggugcagcugccccucuacggggucaucgacacccccugcuggaagcugcacaccagcccccugugcacgaccaacaccaaggagggcuccaacaucugccucacccggacggaccgcgggugguacugcgacaacgccggcagcguguccuucuucccgcaggccgagaccugcaagguccagagcaaccggguguucugcgacaccaugaacucccugacccugcccagcgaggugaaccucugcaacaucgacaucuucaaccccaaguacgacugcaagaucaugacguccaagaccgacgucagcuccagcgugaucaccucccugggcgccaucgugagcugcuacgggaagaccaagugcacggcgagcaacaagaaccgcggcaucaucaagaccuucuccaacgggugcgacuacgucagcaacaagggcguggacaccguguccgucggcaacacccuguacugcgugaacaagcaggagggccagagccucuacgugaagggggagcccaucaucaacuucuacgacccgcuggucuuccccuccgacgaguucgacgccagcaucucccaggugaacgagaagaucaaccagagccuggccuucauccggaaguccgacgagcuccugcacaacgugaacgucggcaagagcaccacgaacaucaugaucaccaccaucaucaucgugaucaucgugauccugcugcuccugaucgccgucgggcuguuccucuacugcaaggcccgcuccacccccgugacgcugagcaaggaccagcuguccgggaucaacaacaucgcguucagcaacuga

SEQ ID NO: 13942 - RNA, 1608 nt, Artificial Sequence
  derived and/or modified CDS sequence (opt1) from HRSV(Memphis-37)__AIY60640.1__F_DSCav1_mut1
auggagcugcccauccucaagaccaacgccaucaccacgauccuggccgcggugacccugugcuucgccagcucccagaacaucaccgaggaguucuaccagagcacgugcuccgccgucagcaagggcuaccucggggcccugcgcaccggcugguacaccuccgugaucaccaucgagcugagcaacaucaaggagaacaagugcaacgggaccgacgccaaggugaagcucaucaagcaggagcuggacaaguacaagaacgcggucacggagcugcagcuccugaugcaguccaccccggccgccggcagcggguccgccaucugcagcggcaucgcggugugcaaggugcugcaccucgagggcgaggucaacaagaucaagaacgcccugcuguccaccaacaaggccguggugagccucuccaacggggucagcgugcugaccuucaaggugcuggaccucaagaacuacaucgacaagcagcugcugcccauccucaacaagcaguccugcagcauccccaacaucgagacggucaucgaguuccagcagaagaacaaccggcugcuggagaucacccgcgaguucuccgugaacgccggcgugaccacccccgucagcacguacaugcucaccaacuccgagcugcugagccucaucaacgacaugccgaucaccaacgaccagaagaagcugaugagcaacaacgugcagaucgugcggcagcaguccuacagcaucaugugcaucaucaaggaggagguccuggccuacguggugcagcucccccuguacggggucaucgacacccccugcuggaagcugcacacgagcccccucugcaccaccaacaccaaggagggcuccaacaucugccugacgcgcaccgaccgggggugguacugcgacaacgcgggcuccgugagcuucuucccgcaggccgagaccugcaaggugcaguccaaccgcgucuucugcgacaccaugaacagccugacgcuccccuccgaggugaaccugugcaacaucgacaucuucaaccccaaguacgacugcaagaucaugaccagcaagaccgacgucuccagcuccgugaucaccagccugggcgccaucguguccugcuacgggaagacgaagugcaccgccagcaacaagaaccggggcaucaucaagaccuucuccaacgggugcgacuacgucagcaacaagggcguggacaccguguccgucggcaacacgcucuacugcgugaacaagcaggaggggcagagccuguacgugaagggcgagcccaucaucaacuucuacgacccgcuggucuuccccagcgacgaguucgacgccuccaucagccaggugaacgagaagaucaaccagucccucgcguucauccgcaagagcgacgagcugcugcacaacgugaacgucgggaaguccaccaccaacaucaugaucaccaccaucaucaucgugaucaucgugauccuccugcugcucaucgccgucggccuguuccuguacugcaaggcccggagcacgcccgugacccuguccaaggaccagcucagcgggaucaacaacaucgccuucuccaacuga

SEQ ID NO: 13943 - RNA, 1608 nt, Artificial Sequence
  derived and/or modified CDS sequence (opt2) from HRSV(Memphis-37)__AIY60640.1__F_DSCav1_mut1
auggagcuccccauccucaagaccaacgccaucaccaccauccucgccgccgucacccucugcuucgccuccucccagaacaucaccgaggaguucuaccaguccaccugcuccgccgucuccaagggcuaccucggcgcccuccgcaccggcugguacaccuccgucaucaccaucgagcucuccaacaucaaggagaacaagugcaacggcaccgacgccaaggucaagcucaucaagcaggagcucgacaaguacaagaacgccgucaccgagcuccagcuccucaugcaguccacccccgccgccggcuccggcuccgccaucugcuccggcaucgccgucugcaagguccuccaccucgagggcgaggucaacaagaucaagaacgcccuccucuccaccaacaaggccgucgucucccucuccaacggcgucuccguccucaccuucaagguccucgaccucaagaacuacaucgacaagcagcuccuccccauccucaacaagcaguccugcuccauccccaacaucgagaccgucaucgaguuccagcagaagaacaaccgccuccucgagaucacccgcgaguucuccgucaacgccggcgucaccacccccgucuccaccuacaugcucaccaacuccgagcuccucucccucaucaacgacaugcccaucaccaacgaccagaagaagcucauguccaacaacguccagaucguccgccagcaguccuacuccaucaugugcaucaucaaggaggagguccucgccuacgucguccagcucccccucuacggcgucaucgacacccccugcuggaagcuccacaccuccccccucugcaccaccaacaccaaggagggcuccaacaucugccucacccgcaccgaccgcggcugguacugcgacaacgccggcuccgucuccuucuucccccaggccgagaccugcaagguccaguccaaccgcgucuucugcgacaccaugaacucccucacccuccccuccgaggucaaccucugcaacaucgacaucuucaaccccaaguacgacugcaagaucaugaccuccaagaccgacgucuccuccuccgucaucaccucccucggcgccaucgucuccugcuacggcaagaccaagugcaccgccuccaacaagaaccgcggcaucaucaagaccuucuccaacggcugcgacuacgucuccaacaagggcgucgacaccgucuccgucggcaacacccucuacugcgucaacaagcaggagggccagucccucuacgucaagggcgagcccaucaucaacuucuacgacccccucgucuuccccuccgacgaguucgacgccuccaucucccaggucaacgagaagaucaaccagucccucgccuucauccgcaaguccgacgagcuccuccacaacgucaacgucggcaaguccaccaccaacaucaugaucaccaccaucaucaucgucaucaucgucauccuccuccuccucaucgccgucggccucuuccucuacugcaaggcccgcuccacccccgucacccucuccaaggaccagcucuccggcaucaacaacaucgccuucuccaacuga

SEQ ID NO: 13944 - RNA, 1608 nt, Artificial Sequence
  derived and/or modified CDS sequence (opt3) from HRSV(Memphis-37)__AIY60640.1__F_DSCav1_mut1
auggagcugcccauccucaagaccaacgccauuacaacuauacuugcugcagugacgcugugcuucgccagcucccagaauaucaccgaagaguuuuaccaaucuacauguucagcggucaguaaaggcuauuugggggcuuuaagaacuggaugguacaccagcguuauuacaaucgaacuguccaacauuaaggagaauaaaugcaacgguaccgacgccaaggugaaacuaaucaagcaggaacucgauaaguauaaaaaugcaguaacugagcugcagcuucugaugcagucuacuccugccgcuggcucggggucagcaauauguagcggaaucgccgugugcaaggucuugcaccucgagggcgaagugaacaaaauuaagaaugcucugcugaguaccaacaaagccguugugucccucucuaauggugucagcguguuaacguucaagguacuggaccuuaagaacuacaucgauaaacaauugcugccaauucuaaauaagcaguccuguucaaucccgaacauagagacuguuauugaauuucagcagaaaaauaacaggcuccuggagaucacccgggaguucagugugaaugcgggggucacaacucccgugagcaccuauaugcuuacaaacucugaacuguugucccucauuaacgacaugccuaucaccaaugaucaaaagaaacugaugucaaacaaugugcagaucguccgccagcagagcuacaguauuaugugcauaaucaaggaggaaguuuuagcauaugugguacaacugccacucuacggagugauugacacgcccuguuggaaacuucauacuucuccucugugcacaaccaacacuaaggagggcuccaauaucuguuugacacgaaccgaucguggcugguacugcgacaacgccgggagcgucucguuuuucccacaggcugaaacguguaaggugcagucuaauagaguguuuugcgauaccaugaacucccuaacacugcccucagagguuaaucucugcaacauagacauuuucaauccuaaauaugauuguaagaucaugacaaguaaaaccgacgucagcuccucugugaucacaagccugggagccauuguaucaugcuacgguaagacuaaauguaccgcaaguaacaagaauaggggcaucauuaagacauuuuccaacgggugcgauuauguuagcaauaaaggaguggacaccgucucugugggcaacacucuuuacugugucaacaagcaagagggucagucacuguaugugaaaggggaaccaauaaucaauuucuacgacccguugguuuuucccagugaugaguucgacgcuagcauuucccaggugaacgaaaagaucaaucagucucucgccuuuauccggaaaucggaugagcuguuacacaacguaaaugucggaaagagcacgacaaacauuaugauaaccacuaucauuaucgugauuaucguuauacugcuacuccugaucgcggugggccuuuucuuguauugcaaggcccgcuccaccccugucacacugucaaaagaccaacucaguggcauuaauaacaucgcauucucuaauuga

SEQ ID NO: 13945 - RNA, 1608 nt, Artificial Sequence
  derived and/or modified CDS sequence (opt4) from HRSV(Memphis-37)__AIY60640.1__F_DSCav1_mut1
auggagcugcccauccugaagaccaacgccaucaccaccauccuggccgccgugacccugugcuucgccagcagccagaacaucaccgaggaguucuaccagagcaccugcagcgccgugagcaagggcuaccugggcgcccugagaaccggcugguacaccagcgugaucaccaucgagcugagcaacaucaaggagaacaagugcaacggcaccgacgccaaggugaagcugaucaagcaggagcuggacaaguacaagaacgccgugaccgagcugcagcugcugaugcagagcacccccgccgccggcagcggcagcgccaucugcagcggcaucgccgugugcaaggugcugcaccuggagggcgaggugaacaagaucaagaacgcccugcugagcaccaacaaggccguggugagccugagcaacggcgugagcgugcugaccuucaaggugcuggaccugaagaacuacaucgacaagcagcugcugcccauccugaacaagcagagcugcagcauccccaacaucgagaccgugaucgaguuccagcagaagaacaacagacugcuggagaucaccagagaguucagcgugaacgccggcgugaccacccccgugagcaccuacaugcugaccaacagcgagcugcugagccugaucaacgacaugcccaucaccaacgaccagaagaagcugaugagcaacaacgugcagaucgugagacagcagagcuacagcaucaugugcaucaucaaggaggaggugcuggccuacguggugcagcugccccuguacggcgugaucgacacccccugcuggaagcugcacaccagcccccugugcaccaccaacaccaaggagggcagcaacaucugccugaccagaaccgacagaggcugguacugcgacaacgccggcagcgugagcuucuucccccaggccgagaccugcaaggugcagagcaacagaguguucugcgacaccaugaacagccugacccugcccagcgaggugaaccugugcaacaucgacaucuucaaccccaaguacgacugcaagaucaugaccagcaagaccgacgugagcagcagcgugaucaccagccugggcgccaucgugagcugcuacggcaagaccaagugcaccgccagcaacaagaacagaggcaucaucaagaccuucagcaacggcugcgacuacgugagcaacaagggcguggacaccgugagcgugggcaacacccuguacugcgugaacaagcaggagggccagagccuguacgugaagggcgagcccaucaucaacuucuacgacccccugguguuccccagcgacgaguucgacgccagcaucagccaggugaacgagaagaucaaccagagccuggccuucaucagaaagagcgacgagcugcugcacaacgugaacgugggcaagagcaccaccaacaucaugaucaccaccaucaucaucgugaucaucgugauccugcugcugcugaucgccgugggccuguuccuguacugcaaggccagaagcacccccgugacccugagcaaggaccagcugagcggcaucaacaacaucgccuucagcaacuga

SEQ ID NO: 13946 - RNA, 1608 nt, Artificial Sequence
  derived and/or modified CDS sequence (opt5) from HRSV(Memphis-37)__AIY60640.1__F_DSCav1_mut1
auggagcugcccauccucaagaccaacgccauuacaacgauccuggcugccgugacccuuugcuucgcgagcucccagaauauuacagaagaguuuuaccaaucuaccuguagcgcugucuccaaaggcuaucugggggcccucagaacaggaugguacaccucuguuaucacaauugaacugagcaacaucaaggagaauaaaugcaacggcaccgacgccaaggugaaacuuaucaagcaggaacuggauaaguauaaaaaugcugugacggagcuccagcugcugaugcaguccaccccugccgcugggucuggaagcgccauuuguuccggcaucgcggucugcaaggugcuccaccuggagggggaaguuaacaaaauuaagaaugcccuucugagcacaaacaaagcuguggucucucucuccaauggagugagcguucugaccuucaaggugcuugaccugaagaacuacaucgauaaacaacuccugccgauucugaauaagcagucuuguuccauccccaacauugagacagucaucgaauuucagcagaaaaauaaccggcuccuggagaucacccgcgaguucagcgugaaugccggcgugacgacaccugucucuaccuauaugcuuacaaacuccgaacugcucagccugauuaacgacaugcccaucaccaaugaucaaaagaaacuuauguccaacaauguucagauugugagacagcagucuuacagcaucaugugcauuaucaaggaggaagugcuggcuuaugucgugcaacucccucuguacggcguuaucgacacccccuguuggaaacugcauacauccccucucugcacgaccaacacaaaggaggggagcaauauuugucugacccggacagaucgcggaugguacugcgacaacgccggcucuguguccuuuuucccgcaggcggaaaccuguaagguccagagcaauagaguguuuugcgauacgaugaacucucuuacacugcccagcgagguuaaucucugcaacaucgacauuuucaauccuaaauaugauuguaagaucaugaccuccaaaaccgacgugucuagcuccgucauuacaagccugggggccaucgugucuugcuacggaaagaccaaauguacagcuuccaacaagaaucggggcaucauuaagacguuuagcaacgggugcgauuaugucucuaauaaaggaguggacaccguuuccgugggcaacacacuuuacugugucaacaagcaagagggccagagccuguaugugaaaggggaacccaucauuaauuucuacgacccucucguuuuucccuccgaugaguucgacgccucuaucagccaggugaacgaaaagauuaaucagucccuggcuuuuauccgcaaaucugaugagcugcuccacaacgucaaugugggaaagagcaccacaaacauuaugaucaccacgaucauuaucgugauuaucguuauucugcuucugcucaucgccgucggccuguuccuguauugcaaggccagauccaccccggugacacuuagcaaagaccaacucucugggaucaauaacauugcuuucuccaauuga

SEQ ID NO: 13947 - RNA, 1608 nt, Artificial Sequence
  derived and/or modified CDS sequence (opt6) from HRSV(Memphis-37)__AIY60640.1__F_DSCav1_mut1
auggaacuuccaauucuaaaaaccaaugcuauaacaacaauauuagcagcaguuacauuaugcuucgccucaucacaaaauaucacagaagaauuuuaccaauccacaugcucagcaguaucuaaaggguaccuaggagcccuacgaacaggaugguacacaucaguaauaacaauagaacucucaaacaucaaagaaaacaaaugcaauggaacagacgcuaaaguaaaauuaauaaaacaagaacuagacaaauacaaaaacgccgucaccgaacuucaguuacucaugcaaagcacaccugcagcaggaucagguucagcaauaugcucaggaauagcaguuugcaaaguauuacaccuagaaggugaagucaacaaaauaaaaaacgcacuucuaaguacuaacaaagcuguaguaucauuaucaaacggaguauccguacuaaccuuuaaaguccuagaccuaaaaaacuacauagacaaacaacuacucccaauacucaauaaacaauccugcucaauucccaacaucgaaacaguaauagaauuucaacaaaaaaacaaucgccuucuagaaauaacaagagaauuuucagucaacgccggaguaacaacaccaguaucaacauauaugcuaacaaacagugaacuauuauccuuaauaaacgacaugccaauaacaaaugaccaaaaaaaacuaauguccaauaauguccaaauaguaagacaacaaagcuauucaauuauguguauaauaaaagaagaaguauuagcauacguaguucaacuaccacuauauggcguuauagacacaccaugcuggaaauuacacacaagcccacuaugcacaacaaauacaaaagaaggauccaacauuugcuuaacuagaacugacagaggaugguacugcgacaacgcuggaucagucucuuucuucccacaagcagaaaccuguaaaguacaaucaaauagagucuucugcgacacaaugaacucacuaacucucccaucugaaguaaacuuaugcaacaucgauauauuuaacccaaaauacgauuguaaaauaaugacauccaaaacagacguuucaucaagcguaaucaccucccucggagcaaucguaagcugcuacgguaaaacaaaaugcacagcauccaacaaaaacagaggcaucauaaaaacauucucaaacggaugugacuauguaucaaacaaaggaguagacacaguuucaguaggcaauaccuuauacugugucaauaaacaagaaggacaaucacuauauguaaaaggagaaccuauaauaaacuucuacgacccccucgucuucccuagcgaugaauuugacgcaucaauaucgcaaguaaacgaaaaaauaaaccaaucauuagccuuuauaagaaaaucagacgaauuauuacacaacguaaacguggggaaaagcacaacuaacaucaugauaacaacuaucauaauuguaaucaucgucauccuauuacuccuaaucgcaguaggacuauuccuauacugcaaagcuagaucaacaccagucacccuaucgaaagaucaauugucaggaauaaacaauauagccuuuucaaauuaa

SEQ ID NO: 13948 - RNA, 1608 nt, Artificial Sequence
  derived and/or modified CDS sequence (opt11) from HRSV(Memphis-37)__AIY60640.1__F_DSCav1_mut1
auggaacuccccauccucaaaacgaacgccaucacaaccauccucgccgccgucacccucugcuucgcgucaucccaaaacauaacugaagaguucuaucaaucaaccugcuccgcagucucaaaaggcuaccucggcgcccuacggaccggcugguacacaagcgucaucacaauagaacuuuccaacaucaaagaaaacaaauguaacggcaccgacgcaaaagucaaacucauaaaacaagaacuagacaaauauaaaaacgccguaacugaacuacaacuccucaugcaaucaacuccugcagccgguagcggcuccgcaaucugcucaggcaucgcagucugcaaagucuuacaccuagaaggcgaagucaacaaaaucaagaacgcccuacuauccacaaacaaagcaguagucucucuauccaacggagucuccguccucacauucaaaguacucgaccuaaagaacuacaucgacaaacaacuacuaccaaucuuaaacaaacaauccugcucaaucccuaacauugaaaccgucauagaguuccaacagaaaaacaaccgccuccucgaaauaaccagagaguucucagucaacgccggcgucaccaccccggucucaaccuacaugcuaaccaacucugaacuucucagccuaaucaacgacaugcccauuaccaacgaccaaaagaaacucauguccaauaacguccaaaucguucgacaacaauccuacucaaucaugugcaucauaaaagaagaaguccuagcauacgucguccaacucccacuauacggcguaaucgacacccccugcuggaaacuccacaccuccccucucuguaccaccaacaccaaagaaggguccaacaucugccucacgcgcaccgaccgaggcugguauugcgacaaugcaggcucugucuccuucuucccccaagccgaaaccugcaaaguccaaucuaaccgcgucuucugcgacaccaugaacagucuuacccucccgucagaagucaaccucugcaacauagauaucuucaacccaaaauacgacugcaaaaucaugaccucaaaaaccgacguuuccucauccguuaucaccucccucggcgcaaucgucagcugcuacggcaagacaaagugcacggcuucaaacaaaaaccgcggaaucaucaagacauucagcaacggcugcgacuacguauccaacaaaggaguggacacagucuccguuggaaacacccucuacugcguaaacaaacaagaaggccaaucacucuacgucaaaggcgaacccaucaucaacuucuacgacccacucgucuuccccuccgacgaguucgacgccucaaucagccaagucaacgagaaaauuaaccagucacucgccuucauacgcaaauccgacgaacuucuacacaacguaaacgucggaaaaucaaccacaaacaucaugauuaccacaauuaucauagucaucauaguaauccuccugcuacucauagcagucggacucuuccuauacugcaaagcccgcuccaccccugucacccuauccaaagaccaacuuuccggcaucaacaacauagccuuuuccaacuaa

SEQ ID NO: 13949 - RNA, 1884 nt, Artificial Sequence
  mRNA product Design a-1 comprising derived and/or modified sequence from HRSV(Memphis-37)__AIY60640.1__F_DSCav1_mut1 (opt1)
gggagagucccgcagucggcguccagcggcucugcuuguucgugugugugucguugcaggccuuauucaagcuuaccauggagcugcccauccucaagaccaacgccaucaccacgauccuggccgcggugacccugugcuucgccagcucccagaacaucaccgaggaguucuaccagagcacgugcuccgccgucagcaagggcuaccucggcgcccugcgcaccgggugguacaccagcgugaucaccaucgagcuguccaacaucaaggagaacaagugcaacggcaccgacgccaaggugaagcucaucaagcaggagcuggacaaguacaagaacgcggucacggagcugcagcuccugaugcagagcaccccggccgccggcuccgggagcgcgaucugcuccggcaucgccgucugcaaggugcugcaccucgagggcgaggugaacaagaucaagaacgcccugcuguccaccaacaaggccgucgugagccucuccaacggggugagcguccugaccuucaaggugcuggaccucaagaacuacaucgacaagcagcugcugcccauccugaacaagcagagcugcuccauccccaacaucgagaccgucaucgaguuccagcagaagaacaaccgccuccuggagaucacgcgggaguucagcgugaacgcgggcgugaccacccccgucuccaccuacaugcugacgaacagcgagcuccugucccugaucaacgacaugccgaucaccaacgaccagaagaagcucaugagcaacaacgugcagaucgugcgccagcaguccuacagcaucaugugcaucaucaaggaggagguccuggccuacguggugcagcugccccucuacggggucaucgacacccccugcuggaagcugcacaccagcccccugugcacgaccaacaccaaggagggcuccaacaucugccucacccggacggaccgcgggugguacugcgacaacgccggcagcguguccuucuucccgcaggccgagaccugcaagguccagagcaaccggguguucugcgacaccaugaacucccugacccugcccagcgaggugaaccucugcaacaucgacaucuucaaccccaaguacgacugcaagaucaugacguccaagaccgacgucagcuccagcgugaucaccucccugggcgccaucgugagcugcuacgggaagaccaagugcacggcgagcaacaagaaccgcggcaucaucaagaccuucuccaacgggugcgacuacgucagcaacaagggcguggacaccguguccgucggcaacacccuguacugcgugaacaagcaggagggccagagccucuacgugaagggggagcccaucaucaacuucuacgacccgcuggucuuccccuccgacgaguucgacgccagcaucucccaggugaacgagaagaucaaccagagccuggccuucauccggaaguccgacgagcuccugcacaacgugaacgucggcaagagcaccacgaacaucaugaucaccaccaucaucaucgugaucaucgugauccugcugcuccugaucgccgucgggcuguuccucuacugcaaggcccgcuccacccccgugacgcugagcaaggaccagcuguccgggaucaacaacaucgcguucagcaacugaggacuagucccuguucccagagcccacuuuuuuuucuuuuuuugaaauaaaauagccugucuuucagaucuaaaaaaaaaaaaaaaaaaaaaaaaaaaaaaaaaaaaaaaaaaaaaaaaaaaaaaaaaaaaaaaaugcaucccccccccccccccccccccccccccccccaaaggcucuuuucagagccaccagaauu

SEQ ID NO: 13950 - RNA, 1884 nt, Artificial Sequence
  mRNA product Design a-1 comprising derived and/or modified sequence from HRSV(Memphis-37)__AIY60640.1__F_DSCav1_mut1 (opt1)
gggagagucccgcagucggcguccagcggcucugcuuguucgugugugugucguugcaggccuuauucaagcuuaccauggagcugcccauccucaagaccaacgccaucaccacgauccuggccgcggugacccugugcuucgccagcucccagaacaucaccgaggaguucuaccagagcacgugcuccgccgucagcaagggcuaccucggggcccugcgcaccggcugguacaccuccgugaucaccaucgagcugagcaacaucaaggagaacaagugcaacgggaccgacgccaaggugaagcucaucaagcaggagcuggacaaguacaagaacgcggucacggagcugcagcuccugaugcaguccaccccggccgccggcagcggguccgccaucugcagcggcaucgcggugugcaaggugcugcaccucgagggcgaggucaacaagaucaagaacgcccugcuguccaccaacaaggccguggugagccucuccaacggggucagcgugcugaccuucaaggugcuggaccucaagaacuacaucgacaagcagcugcugcccauccucaacaagcaguccugcagcauccccaacaucgagacggucaucgaguuccagcagaagaacaaccggcugcuggagaucacccgcgaguucuccgugaacgccggcgugaccacccccgucagcacguacaugcucaccaacuccgagcugcugagccucaucaacgacaugccgaucaccaacgaccagaagaagcugaugagcaacaacgugcagaucgugcggcagcaguccuacagcaucaugugcaucaucaaggaggagguccuggccuacguggugcagcucccccuguacggggucaucgacacccccugcuggaagcugcacacgagcccccucugcaccaccaacaccaaggagggcuccaacaucugccugacgcgcaccgaccgggggugguacugcgacaacgcgggcuccgugagcuucuucccgcaggccgagaccugcaaggugcaguccaaccgcgucuucugcgacaccaugaacagccugacgcuccccuccgaggugaaccugugcaacaucgacaucuucaaccccaaguacgacugcaagaucaugaccagcaagaccgacgucuccagcuccgugaucaccagccugggcgccaucguguccugcuacgggaagacgaagugcaccgccagcaacaagaaccggggcaucaucaagaccuucuccaacgggugcgacuacgucagcaacaagggcguggacaccguguccgucggcaacacgcucuacugcgugaacaagcaggaggggcagagccuguacgugaagggcgagcccaucaucaacuucuacgacccgcuggucuuccccagcgacgaguucgacgccuccaucagccaggugaacgagaagaucaaccagucccucgcguucauccgcaagagcgacgagcugcugcacaacgugaacgucgggaaguccaccaccaacaucaugaucaccaccaucaucaucgugaucaucgugauccuccugcugcucaucgccgucggccuguuccuguacugcaaggcccggagcacgcccgugacccuguccaaggaccagcucagcgggaucaacaacaucgccuucuccaacugaggacuagucccuguucccagagcccacuuuuuuuucuuuuuuugaaauaaaauagccugucuuucagaucuaaaaaaaaaaaaaaaaaaaaaaaaaaaaaaaaaaaaaaaaaaaaaaaaaaaaaaaaaaaaaaaaugcaucccccccccccccccccccccccccccccccaaaggcucuuuucagagccaccagaauu

SEQ ID NO: 13951 - RNA, 1884 nt, Artificial Sequence
  mRNA product Design a-1 comprising derived and/or modified sequence from HRSV(Memphis-37)__AIY60640.1__F_DSCav1_mut1 (opt2)
gggagagucccgcagucggcguccagcggcucugcuuguucgugugugugucguugcaggccuuauucaagcuuaccauggagcuccccauccucaagaccaacgccaucaccaccauccucgccgccgucacccucugcuucgccuccucccagaacaucaccgaggaguucuaccaguccaccugcuccgccgucuccaagggcuaccucggcgcccuccgcaccggcugguacaccuccgucaucaccaucgagcucuccaacaucaaggagaacaagugcaacggcaccgacgccaaggucaagcucaucaagcaggagcucgacaaguacaagaacgccgucaccgagcuccagcuccucaugcaguccacccccgccgccggcuccggcuccgccaucugcuccggcaucgccgucugcaagguccuccaccucgagggcgaggucaacaagaucaagaacgcccuccucuccaccaacaaggccgucgucucccucuccaacggcgucuccguccucaccuucaagguccucgaccucaagaacuacaucgacaagcagcuccuccccauccucaacaagcaguccugcuccauccccaacaucgagaccgucaucgaguuccagcagaagaacaaccgccuccucgagaucacccgcgaguucuccgucaacgccggcgucaccacccccgucuccaccuacaugcucaccaacuccgagcuccucucccucaucaacgacaugcccaucaccaacgaccagaagaagcucauguccaacaacguccagaucguccgccagcaguccuacuccaucaugugcaucaucaaggaggagguccucgccuacgucguccagcucccccucuacggcgucaucgacacccccugcuggaagcuccacaccuccccccucugcaccaccaacaccaaggagggcuccaacaucugccucacccgcaccgaccgcggcugguacugcgacaacgccggcuccgucuccuucuucccccaggccgagaccugcaagguccaguccaaccgcgucuucugcgacaccaugaacucccucacccuccccuccgaggucaaccucugcaacaucgacaucuucaaccccaaguacgacugcaagaucaugaccuccaagaccgacgucuccuccuccgucaucaccucccucggcgccaucgucuccugcuacggcaagaccaagugcaccgccuccaacaagaaccgcggcaucaucaagaccuucuccaacggcugcgacuacgucuccaacaagggcgucgacaccgucuccgucggcaacacccucuacugcgucaacaagcaggagggccagucccucuacgucaagggcgagcccaucaucaacuucuacgacccccucgucuuccccuccgacgaguucgacgccuccaucucccaggucaacgagaagaucaaccagucccucgccuucauccgcaaguccgacgagcuccuccacaacgucaacgucggcaaguccaccaccaacaucaugaucaccaccaucaucaucgucaucaucgucauccuccuccuccucaucgccgucggccucuuccucuacugcaaggcccgcuccacccccgucacccucuccaaggaccagcucuccggcaucaacaacaucgccuucuccaacugaggacuagucccuguucccagagcccacuuuuuuuucuuuuuuugaaauaaaauagccugucuuucagaucuaaaaaaaaaaaaaaaaaaaaaaaaaaaaaaaaaaaaaaaaaaaaaaaaaaaaaaaaaaaaaaaaugcaucccccccccccccccccccccccccccccccaaaggcucuuuucagagccaccagaauu

SEQ ID NO: 13952 - RNA, 1884 nt, Artificial Sequence
  mRNA product Design a-1 comprising derived and/or modified sequence from HRSV(Memphis-37)__AIY60640.1__F_DSCav1_mut1 (opt3)
gggagagucccgcagucggcguccagcggcucugcuuguucgugugugugucguugcaggccuuauucaagcuuaccauggagcugcccauccucaagaccaacgccauuacaacuauacuugcugcagugacgcugugcuucgccagcucccagaauaucaccgaagaguuuuaccaaucuacauguucagcggucaguaaaggcuauuugggggcuuuaagaacuggaugguacaccagcguuauuacaaucgaacuguccaacauuaaggagaauaaaugcaacgguaccgacgccaaggugaaacuaaucaagcaggaacucgauaaguauaaaaaugcaguaacugagcugcagcuucugaugcagucuacuccugccgcuggcucggggucagcaauauguagcggaaucgccgugugcaaggucuugcaccucgagggcgaagugaacaaaauuaagaaugcucugcugaguaccaacaaagccguugugucccucucuaauggugucagcguguuaacguucaagguacuggaccuuaagaacuacaucgauaaacaauugcugccaauucuaaauaagcaguccuguucaaucccgaacauagagacuguuauugaauuucagcagaaaaauaacaggcuccuggagaucacccgggaguucagugugaaugcgggggucacaacucccgugagcaccuauaugcuuacaaacucugaacuguugucccucauuaacgacaugccuaucaccaaugaucaaaagaaacugaugucaaacaaugugcagaucguccgccagcagagcuacaguauuaugugcauaaucaaggaggaaguuuuagcauaugugguacaacugccacucuacggagugauugacacgcccuguuggaaacuucauacuucuccucugugcacaaccaacacuaaggagggcuccaauaucuguuugacacgaaccgaucguggcugguacugcgacaacgccgggagcgucucguuuuucccacaggcugaaacguguaaggugcagucuaauagaguguuuugcgauaccaugaacucccuaacacugcccucagagguuaaucucugcaacauagacauuuucaauccuaaauaugauuguaagaucaugacaaguaaaaccgacgucagcuccucugugaucacaagccugggagccauuguaucaugcuacgguaagacuaaauguaccgcaaguaacaagaauaggggcaucauuaagacauuuuccaacgggugcgauuauguuagcaauaaaggaguggacaccgucucugugggcaacacucuuuacugugucaacaagcaagagggucagucacuguaugugaaaggggaaccaauaaucaauuucuacgacccguugguuuuucccagugaugaguucgacgcuagcauuucccaggugaacgaaaagaucaaucagucucucgccuuuauccggaaaucggaugagcuguuacacaacguaaaugucggaaagagcacgacaaacauuaugauaaccacuaucauuaucgugauuaucguuauacugcuacuccugaucgcggugggccuuuucuuguauugcaaggcccgcuccaccccugucacacugucaaaagaccaacucaguggcauuaauaacaucgcauucucuaauugaggacuagucccuguucccagagcccacuuuuuuuucuuuuuuugaaauaaaauagccugucuuucagaucuaaaaaaaaaaaaaaaaaaaaaaaaaaaaaaaaaaaaaaaaaaaaaaaaaaaaaaaaaaaaaaaaugcaucccccccccccccccccccccccccccccccaaaggcucuuuucagagccaccagaauu

SEQ ID NO: 13953 - RNA, 1884 nt, Artificial Sequence
  mRNA product Design a-1 comprising derived and/or modified sequence from HRSV(Memphis-37)__AIY60640.1__F_DSCav1_mut1 (opt4)
gggagagucccgcagucggcguccagcggcucugcuuguucgugugugugucguugcaggccuuauucaagcuuaccauggagcugcccauccugaagaccaacgccaucaccaccauccuggccgccgugacccugugcuucgccagcagccagaacaucaccgaggaguucuaccagagcaccugcagcgccgugagcaagggcuaccugggcgcccugagaaccggcugguacaccagcgugaucaccaucgagcugagcaacaucaaggagaacaagugcaacggcaccgacgccaaggugaagcugaucaagcaggagcuggacaaguacaagaacgccgugaccgagcugcagcugcugaugcagagcacccccgccgccggcagcggcagcgccaucugcagcggcaucgccgugugcaaggugcugcaccuggagggcgaggugaacaagaucaagaacgcccugcugagcaccaacaaggccguggugagccugagcaacggcgugagcgugcugaccuucaaggugcuggaccugaagaacuacaucgacaagcagcugcugcccauccugaacaagcagagcugcagcauccccaacaucgagaccgugaucgaguuccagcagaagaacaacagacugcuggagaucaccagagaguucagcgugaacgccggcgugaccacccccgugagcaccuacaugcugaccaacagcgagcugcugagccugaucaacgacaugcccaucaccaacgaccagaagaagcugaugagcaacaacgugcagaucgugagacagcagagcuacagcaucaugugcaucaucaaggaggaggugcuggccuacguggugcagcugccccuguacggcgugaucgacacccccugcuggaagcugcacaccagcccccugugcaccaccaacaccaaggagggcagcaacaucugccugaccagaaccgacagaggcugguacugcgacaacgccggcagcgugagcuucuucccccaggccgagaccugcaaggugcagagcaacagaguguucugcgacaccaugaacagccugacccugcccagcgaggugaaccugugcaacaucgacaucuucaaccccaaguacgacugcaagaucaugaccagcaagaccgacgugagcagcagcgugaucaccagccugggcgccaucgugagcugcuacggcaagaccaagugcaccgccagcaacaagaacagaggcaucaucaagaccuucagcaacggcugcgacuacgugagcaacaagggcguggacaccgugagcgugggcaacacccuguacugcgugaacaagcaggagggccagagccuguacgugaagggcgagcccaucaucaacuucuacgacccccugguguuccccagcgacgaguucgacgccagcaucagccaggugaacgagaagaucaaccagagccuggccuucaucagaaagagcgacgagcugcugcacaacgugaacgugggcaagagcaccaccaacaucaugaucaccaccaucaucaucgugaucaucgugauccugcugcugcugaucgccgugggccuguuccuguacugcaaggccagaagcacccccgugacccugagcaaggaccagcugagcggcaucaacaacaucgccuucagcaacugaggacuagucccuguucccagagcccacuuuuuuuucuuuuuuugaaauaaaauagccugucuuucagaucuaaaaaaaaaaaaaaaaaaaaaaaaaaaaaaaaaaaaaaaaaaaaaaaaaaaaaaaaaaaaaaaaugcaucccccccccccccccccccccccccccccccaaaggcucuuuucagagccaccagaauu

SEQ ID NO: 13954 - RNA, 1884 nt, Artificial Sequence
  mRNA product Design a-1 comprising derived and/or modified sequence from HRSV(Memphis-37)__AIY60640.1__F_DSCav1_mut1 (opt5)
gggagagucccgcagucggcguccagcggcucugcuuguucgugugugugucguugcaggccuuauucaagcuuaccauggagcugcccauccucaagaccaacgccauuacaacgauccuggcugccgugacccuuugcuucgcgagcucccagaauauuacagaagaguuuuaccaaucuaccuguagcgcugucuccaaaggcuaucugggggcccucagaacaggaugguacaccucuguuaucacaauugaacugagcaacaucaaggagaauaaaugcaacggcaccgacgccaaggugaaacuuaucaagcaggaacuggauaaguauaaaaaugcugugacggagcuccagcugcugaugcaguccaccccugccgcugggucuggaagcgccauuuguuccggcaucgcggucugcaaggugcuccaccuggagggggaaguuaacaaaauuaagaaugcccuucugagcacaaacaaagcuguggucucucucuccaauggagugagcguucugaccuucaaggugcuugaccugaagaacuacaucgauaaacaacuccugccgauucugaauaagcagucuuguuccauccccaacauugagacagucaucgaauuucagcagaaaaauaaccggcuccuggagaucacccgcgaguucagcgugaaugccggcgugacgacaccugucucuaccuauaugcuuacaaacuccgaacugcucagccugauuaacgacaugcccaucaccaaugaucaaaagaaacuuauguccaacaauguucagauugugagacagcagucuuacagcaucaugugcauuaucaaggaggaagugcuggcuuaugucgugcaacucccucuguacggcguuaucgacacccccuguuggaaacugcauacauccccucucugcacgaccaacacaaaggaggggagcaauauuugucugacccggacagaucgcggaugguacugcgacaacgccggcucuguguccuuuuucccgcaggcggaaaccuguaagguccagagcaauagaguguuuugcgauacgaugaacucucuuacacugcccagcgagguuaaucucugcaacaucgacauuuucaauccuaaauaugauuguaagaucaugaccuccaaaaccgacgugucuagcuccgucauuacaagccugggggccaucgugucuugcuacggaaagaccaaauguacagcuuccaacaagaaucggggcaucauuaagacguuuagcaacgggugcgauuaugucucuaauaaaggaguggacaccguuuccgugggcaacacacuuuacugugucaacaagcaagagggccagagccuguaugugaaaggggaacccaucauuaauuucuacgacccucucguuuuucccuccgaugaguucgacgccucuaucagccaggugaacgaaaagauuaaucagucccuggcuuuuauccgcaaaucugaugagcugcuccacaacgucaaugugggaaagagcaccacaaacauuaugaucaccacgaucauuaucgugauuaucguuauucugcuucugcucaucgccgucggccuguuccuguauugcaaggccagauccaccccggugacacuuagcaaagaccaacucucugggaucaauaacauugcuuucuccaauugaggacuagucccuguucccagagcccacuuuuuuuucuuuuuuugaaauaaaauagccugucuuucagaucuaaaaaaaaaaaaaaaaaaaaaaaaaaaaaaaaaaaaaaaaaaaaaaaaaaaaaaaaaaaaaaaaugcaucccccccccccccccccccccccccccccccaaaggcucuuuucagagccaccagaauu

SEQ ID NO: 13955 - RNA, 1884 nt, Artificial Sequence
  mRNA product Design a-1 comprising derived and/or modified sequence from HRSV(Memphis-37)__AIY60640.1__F_DSCav1_mut1 (opt6)
gggagagucccgcagucggcguccagcggcucugcuuguucgugugugugucguugcaggccuuauucaagcuuaccauggaacuuccaauucuaaaaaccaaugcuauaacaacaauauuagcagcaguuacauuaugcuucgccucaucacaaaauaucacagaagaauuuuaccaauccacaugcucagcaguaucuaaaggguaccuaggagcccuacgaacaggaugguacacaucaguaauaacaauagaacucucaaacaucaaagaaaacaaaugcaauggaacagacgcuaaaguaaaauuaauaaaacaagaacuagacaaauacaaaaacgccgucaccgaacuucaguuacucaugcaaagcacaccugcagcaggaucagguucagcaauaugcucaggaauagcaguuugcaaaguauuacaccuagaaggugaagucaacaaaauaaaaaacgcacuucuaaguacuaacaaagcuguaguaucauuaucaaacggaguauccguacuaaccuuuaaaguccuagaccuaaaaaacuacauagacaaacaacuacucccaauacucaauaaacaauccugcucaauucccaacaucgaaacaguaauagaauuucaacaaaaaaacaaucgccuucuagaaauaacaagagaauuuucagucaacgccggaguaacaacaccaguaucaacauauaugcuaacaaacagugaacuauuauccuuaauaaacgacaugccaauaacaaaugaccaaaaaaaacuaauguccaauaauguccaaauaguaagacaacaaagcuauucaauuauguguauaauaaaagaagaaguauuagcauacguaguucaacuaccacuauauggcguuauagacacaccaugcuggaaauuacacacaagcccacuaugcacaacaaauacaaaagaaggauccaacauuugcuuaacuagaacugacagaggaugguacugcgacaacgcuggaucagucucuuucuucccacaagcagaaaccuguaaaguacaaucaaauagagucuucugcgacacaaugaacucacuaacucucccaucugaaguaaacuuaugcaacaucgauauauuuaacccaaaauacgauuguaaaauaaugacauccaaaacagacguuucaucaagcguaaucaccucccucggagcaaucguaagcugcuacgguaaaacaaaaugcacagcauccaacaaaaacagaggcaucauaaaaacauucucaaacggaugugacuauguaucaaacaaaggaguagacacaguuucaguaggcaauaccuuauacugugucaauaaacaagaaggacaaucacuauauguaaaaggagaaccuauaauaaacuucuacgacccccucgucuucccuagcgaugaauuugacgcaucaauaucgcaaguaaacgaaaaaauaaaccaaucauuagccuuuauaagaaaaucagacgaauuauuacacaacguaaacguggggaaaagcacaacuaacaucaugauaacaacuaucauaauuguaaucaucgucauccuauuacuccuaaucgcaguaggacuauuccuauacugcaaagcuagaucaacaccagucacccuaucgaaagaucaauugucaggaauaaacaauauagccuuuucaaauuaaggacuagucccuguucccagagcccacuuuuuuuucuuuuuuugaaauaaaauagccugucuuucagaucuaaaaaaaaaaaaaaaaaaaaaaaaaaaaaaaaaaaaaaaaaaaaaaaaaaaaaaaaaaaaaaaaugcaucccccccccccccccccccccccccccccccaaaggcucuuuucagagccaccagaauu

SEQ ID NO: 13956 - RNA, 1884 nt, Artificial Sequence
  mRNA product Design a-1 comprising derived and/or modified sequence from HRSV(Memphis-37)__AIY60640.1__F_DSCav1_mut1 (opt11)
gggagagucccgcagucggcguccagcggcucugcuuguucgugugugugucguugcaggccuuauucaagcuuaccauggaacuccccauccucaaaacgaacgccaucacaaccauccucgccgccgucacccucugcuucgcgucaucccaaaacauaacugaagaguucuaucaaucaaccugcuccgcagucucaaaaggcuaccucggcgcccuacggaccggcugguacacaagcgucaucacaauagaacuuuccaacaucaaagaaaacaaauguaacggcaccgacgcaaaagucaaacucauaaaacaagaacuagacaaauauaaaaacgccguaacugaacuacaacuccucaugcaaucaacuccugcagccgguagcggcuccgcaaucugcucaggcaucgcagucugcaaagucuuacaccuagaaggcgaagucaacaaaaucaagaacgcccuacuauccacaaacaaagcaguagucucucuauccaacggagucuccguccucacauucaaaguacucgaccuaaagaacuacaucgacaaacaacuacuaccaaucuuaaacaaacaauccugcucaaucccuaacauugaaaccgucauagaguuccaacagaaaaacaaccgccuccucgaaauaaccagagaguucucagucaacgccggcgucaccaccccggucucaaccuacaugcuaaccaacucugaacuucucagccuaaucaacgacaugcccauuaccaacgaccaaaagaaacucauguccaauaacguccaaaucguucgacaacaauccuacucaaucaugugcaucauaaaagaagaaguccuagcauacgucguccaacucccacuauacggcguaaucgacacccccugcuggaaacuccacaccuccccucucuguaccaccaacaccaaagaaggguccaacaucugccucacgcgcaccgaccgaggcugguauugcgacaaugcaggcucugucuccuucuucccccaagccgaaaccugcaaaguccaaucuaaccgcgucuucugcgacaccaugaacagucuuacccucccgucagaagucaaccucugcaacauagauaucuucaacccaaaauacgacugcaaaaucaugaccucaaaaaccgacguuuccucauccguuaucaccucccucggcgcaaucgucagcugcuacggcaagacaaagugcacggcuucaaacaaaaaccgcggaaucaucaagacauucagcaacggcugcgacuacguauccaacaaaggaguggacacagucuccguuggaaacacccucuacugcguaaacaaacaagaaggccaaucacucuacgucaaaggcgaacccaucaucaacuucuacgacccacucgucuuccccuccgacgaguucgacgccucaaucagccaagucaacgagaaaauuaaccagucacucgccuucauacgcaaauccgacgaacuucuacacaacguaaacgucggaaaaucaaccacaaacaucaugauuaccacaauuaucauagucaucauaguaauccuccugcuacucauagcagucggacucuuccuauacugcaaagcccgcuccaccccugucacccuauccaaagaccaacuuuccggcaucaacaacauagccuuuuccaacuaaggacuagucccuguucccagagcccacuuuuuuuucuuuuuuugaaauaaaauagccugucuuucagaucuaaaaaaaaaaaaaaaaaaaaaaaaaaaaaaaaaaaaaaaaaaaaaaaaaaaaaaaaaaaaaaaaugcaucccccccccccccccccccccccccccccccaaaggcucuuuucagagccaccagaauu

SEQ ID NO: 13957 - RNA, 1903 nt, Artificial Sequence
  mRNA product Design a-2 comprising derived and/or modified sequence from HRSV(Memphis-37)__AIY60640.1__F_DSCav1_mut1 (opt1)
gggagaguccgcucagccagguugcagaagcggcuuagcguguguccuaaucuucucucugcguguagguaggccugugccgcaaacaagcuuaccauggagcugcccauccucaagaccaacgccaucaccacgauccuggccgcggugacccugugcuucgccagcucccagaacaucaccgaggaguucuaccagagcacgugcuccgccgucagcaagggcuaccucggcgcccugcgcaccgggugguacaccagcgugaucaccaucgagcuguccaacaucaaggagaacaagugcaacggcaccgacgccaaggugaagcucaucaagcaggagcuggacaaguacaagaacgcggucacggagcugcagcuccugaugcagagcaccccggccgccggcuccgggagcgcgaucugcuccggcaucgccgucugcaaggugcugcaccucgagggcgaggugaacaagaucaagaacgcccugcuguccaccaacaaggccgucgugagccucuccaacggggugagcguccugaccuucaaggugcuggaccucaagaacuacaucgacaagcagcugcugcccauccugaacaagcagagcugcuccauccccaacaucgagaccgucaucgaguuccagcagaagaacaaccgccuccuggagaucacgcgggaguucagcgugaacgcgggcgugaccacccccgucuccaccuacaugcugacgaacagcgagcuccugucccugaucaacgacaugccgaucaccaacgaccagaagaagcucaugagcaacaacgugcagaucgugcgccagcaguccuacagcaucaugugcaucaucaaggaggagguccuggccuacguggugcagcugccccucuacggggucaucgacacccccugcuggaagcugcacaccagcccccugugcacgaccaacaccaaggagggcuccaacaucugccucacccggacggaccgcgggugguacugcgacaacgccggcagcguguccuucuucccgcaggccgagaccugcaagguccagagcaaccggguguucugcgacaccaugaacucccugacccugcccagcgaggugaaccucugcaacaucgacaucuucaaccccaaguacgacugcaagaucaugacguccaagaccgacgucagcuccagcgugaucaccucccugggcgccaucgugagcugcuacgggaagaccaagugcacggcgagcaacaagaaccgcggcaucaucaagaccuucuccaacgggugcgacuacgucagcaacaagggcguggacaccguguccgucggcaacacccuguacugcgugaacaagcaggagggccagagccucuacgugaagggggagcccaucaucaacuucuacgacccgcuggucuuccccuccgacgaguucgacgccagcaucucccaggugaacgagaagaucaaccagagccuggccuucauccggaaguccgacgagcuccugcacaacgugaacgucggcaagagcaccacgaacaucaugaucaccaccaucaucaucgugaucaucgugauccugcugcuccugaucgccgucgggcuguuccucuacugcaaggcccgcuccacccccgugacgcugagcaaggaccagcuguccgggaucaacaacaucgcguucagcaacugaggacuagucccuguucccagagcccacuuuuuuuucuuuuuuugaaauaaaauagccugucuuucagaucuaaaaaaaaaaaaaaaaaaaaaaaaaaaaaaaaaaaaaaaaaaaaaaaaaaaaaaaaaaaaaaaaugcaucccccccccccccccccccccccccccccccaaaggcucuuuucagagccaccagaauu

SEQ ID NO: 13958 - RNA, 1903 nt, Artificial Sequence
  mRNA product Design a-2 comprising derived and/or modified sequence from HRSV(Memphis-37)__AIY60640.1__F_DSCav1_mut1 (opt1)
gggagaguccgcucagccagguugcagaagcggcuuagcguguguccuaaucuucucucugcguguagguaggccugugccgcaaacaagcuuaccauggagcugcccauccucaagaccaacgccaucaccacgauccuggccgcggugacccugugcuucgccagcucccagaacaucaccgaggaguucuaccagagcacgugcuccgccgucagcaagggcuaccucggggcccugcgcaccggcugguacaccuccgugaucaccaucgagcugagcaacaucaaggagaacaagugcaacgggaccgacgccaaggugaagcucaucaagcaggagcuggacaaguacaagaacgcggucacggagcugcagcuccugaugcaguccaccccggccgccggcagcggguccgccaucugcagcggcaucgcggugugcaaggugcugcaccucgagggcgaggucaacaagaucaagaacgcccugcuguccaccaacaaggccguggugagccucuccaacggggucagcgugcugaccuucaaggugcuggaccucaagaacuacaucgacaagcagcugcugcccauccucaacaagcaguccugcagcauccccaacaucgagacggucaucgaguuccagcagaagaacaaccggcugcuggagaucacccgcgaguucuccgugaacgccggcgugaccacccccgucagcacguacaugcucaccaacuccgagcugcugagccucaucaacgacaugccgaucaccaacgaccagaagaagcugaugagcaacaacgugcagaucgugcggcagcaguccuacagcaucaugugcaucaucaaggaggagguccuggccuacguggugcagcucccccuguacggggucaucgacacccccugcuggaagcugcacacgagcccccucugcaccaccaacaccaaggagggcuccaacaucugccugacgcgcaccgaccgggggugguacugcgacaacgcgggcuccgugagcuucuucccgcaggccgagaccugcaaggugcaguccaaccgcgucuucugcgacaccaugaacagccugacgcuccccuccgaggugaaccugugcaacaucgacaucuucaaccccaaguacgacugcaagaucaugaccagcaagaccgacgucuccagcuccgugaucaccagccugggcgccaucguguccugcuacgggaagacgaagugcaccgccagcaacaagaaccggggcaucaucaagaccuucuccaacgggugcgacuacgucagcaacaagggcguggacaccguguccgucggcaacacgcucuacugcgugaacaagcaggaggggcagagccuguacgugaagggcgagcccaucaucaacuucuacgacccgcuggucuuccccagcgacgaguucgacgccuccaucagccaggugaacgagaagaucaaccagucccucgcguucauccgcaagagcgacgagcugcugcacaacgugaacgucgggaaguccaccaccaacaucaugaucaccaccaucaucaucgugaucaucgugauccuccugcugcucaucgccgucggccuguuccuguacugcaaggcccggagcacgcccgugacccuguccaaggaccagcucagcgggaucaacaacaucgccuucuccaacugaggacuagucccuguucccagagcccacuuuuuuuucuuuuuuugaaauaaaauagccugucuuucagaucuaaaaaaaaaaaaaaaaaaaaaaaaaaaaaaaaaaaaaaaaaaaaaaaaaaaaaaaaaaaaaaaaugcaucccccccccccccccccccccccccccccccaaaggcucuuuucagagccaccagaauu

SEQ ID NO: 13959 - RNA, 1903 nt, Artificial Sequence
  mRNA product Design a-2 comprising derived and/or modified sequence from HRSV(Memphis-37)__AIY60640.1__F_DSCav1_mut1 (opt2)
gggagaguccgcucagccagguugcagaagcggcuuagcguguguccuaaucuucucucugcguguagguaggccugugccgcaaacaagcuuaccauggagcuccccauccucaagaccaacgccaucaccaccauccucgccgccgucacccucugcuucgccuccucccagaacaucaccgaggaguucuaccaguccaccugcuccgccgucuccaagggcuaccucggcgcccuccgcaccggcugguacaccuccgucaucaccaucgagcucuccaacaucaaggagaacaagugcaacggcaccgacgccaaggucaagcucaucaagcaggagcucgacaaguacaagaacgccgucaccgagcuccagcuccucaugcaguccacccccgccgccggcuccggcuccgccaucugcuccggcaucgccgucugcaagguccuccaccucgagggcgaggucaacaagaucaagaacgcccuccucuccaccaacaaggccgucgucucccucuccaacggcgucuccguccucaccuucaagguccucgaccucaagaacuacaucgacaagcagcuccuccccauccucaacaagcaguccugcuccauccccaacaucgagaccgucaucgaguuccagcagaagaacaaccgccuccucgagaucacccgcgaguucuccgucaacgccggcgucaccacccccgucuccaccuacaugcucaccaacuccgagcuccucucccucaucaacgacaugcccaucaccaacgaccagaagaagcucauguccaacaacguccagaucguccgccagcaguccuacuccaucaugugcaucaucaaggaggagguccucgccuacgucguccagcucccccucuacggcgucaucgacacccccugcuggaagcuccacaccuccccccucugcaccaccaacaccaaggagggcuccaacaucugccucacccgcaccgaccgcggcugguacugcgacaacgccggcuccgucuccuucuucccccaggccgagaccugcaagguccaguccaaccgcgucuucugcgacaccaugaacucccucacccuccccuccgaggucaaccucugcaacaucgacaucuucaaccccaaguacgacugcaagaucaugaccuccaagaccgacgucuccuccuccgucaucaccucccucggcgccaucgucuccugcuacggcaagaccaagugcaccgccuccaacaagaaccgcggcaucaucaagaccuucuccaacggcugcgacuacgucuccaacaagggcgucgacaccgucuccgucggcaacacccucuacugcgucaacaagcaggagggccagucccucuacgucaagggcgagcccaucaucaacuucuacgacccccucgucuuccccuccgacgaguucgacgccuccaucucccaggucaacgagaagaucaaccagucccucgccuucauccgcaaguccgacgagcuccuccacaacgucaacgucggcaaguccaccaccaacaucaugaucaccaccaucaucaucgucaucaucgucauccuccuccuccucaucgccgucggccucuuccucuacugcaaggcccgcuccacccccgucacccucuccaaggaccagcucuccggcaucaacaacaucgccuucuccaacugaggacuagucccuguucccagagcccacuuuuuuuucuuuuuuugaaauaaaauagccugucuuucagaucuaaaaaaaaaaaaaaaaaaaaaaaaaaaaaaaaaaaaaaaaaaaaaaaaaaaaaaaaaaaaaaaaugcaucccccccccccccccccccccccccccccccaaaggcucuuuucagagccaccagaauu

SEQ ID NO: 13960 - RNA, 1903 nt, Artificial Sequence
  mRNA product Design a-2 comprising derived and/or modified sequence from HRSV(Memphis-37)__AIY60640.1__F_DSCav1_mut1 (opt3)
gggagaguccgcucagccagguugcagaagcggcuuagcguguguccuaaucuucucucugcguguagguaggccugugccgcaaacaagcuuaccauggagcugcccauccucaagaccaacgccauuacaacuauacuugcugcagugacgcugugcuucgccagcucccagaauaucaccgaagaguuuuaccaaucuacauguucagcggucaguaaaggcuauuugggggcuuuaagaacuggaugguacaccagcguuauuacaaucgaacuguccaacauuaaggagaauaaaugcaacgguaccgacgccaaggugaaacuaaucaagcaggaacucgauaaguauaaaaaugcaguaacugagcugcagcuucugaugcagucuacuccugccgcuggcucggggucagcaauauguagcggaaucgccgugugcaaggucuugcaccucgagggcgaagugaacaaaauuaagaaugcucugcugaguaccaacaaagccguugugucccucucuaauggugucagcguguuaacguucaagguacuggaccuuaagaacuacaucgauaaacaauugcugccaauucuaaauaagcaguccuguucaaucccgaacauagagacuguuauugaauuucagcagaaaaauaacaggcuccuggagaucacccgggaguucagugugaaugcgggggucacaacucccgugagcaccuauaugcuuacaaacucugaacuguugucccucauuaacgacaugccuaucaccaaugaucaaaagaaacugaugucaaacaaugugcagaucguccgccagcagagcuacaguauuaugugcauaaucaaggaggaaguuuuagcauaugugguacaacugccacucuacggagugauugacacgcccuguuggaaacuucauacuucuccucugugcacaaccaacacuaaggagggcuccaauaucuguuugacacgaaccgaucguggcugguacugcgacaacgccgggagcgucucguuuuucccacaggcugaaacguguaaggugcagucuaauagaguguuuugcgauaccaugaacucccuaacacugcccucagagguuaaucucugcaacauagacauuuucaauccuaaauaugauuguaagaucaugacaaguaaaaccgacgucagcuccucugugaucacaagccugggagccauuguaucaugcuacgguaagacuaaauguaccgcaaguaacaagaauaggggcaucauuaagacauuuuccaacgggugcgauuauguuagcaauaaaggaguggacaccgucucugugggcaacacucuuuacugugucaacaagcaagagggucagucacuguaugugaaaggggaaccaauaaucaauuucuacgacccguugguuuuucccagugaugaguucgacgcuagcauuucccaggugaacgaaaagaucaaucagucucucgccuuuauccggaaaucggaugagcuguuacacaacguaaaugucggaaagagcacgacaaacauuaugauaaccacuaucauuaucgugauuaucguuauacugcuacuccugaucgcggugggccuuuucuuguauugcaaggcccgcuccaccccugucacacugucaaaagaccaacucaguggcauuaauaacaucgcauucucuaauugaggacuagucccuguucccagagcccacuuuuuuuucuuuuuuugaaauaaaauagccugucuuucagaucuaaaaaaaaaaaaaaaaaaaaaaaaaaaaaaaaaaaaaaaaaaaaaaaaaaaaaaaaaaaaaaaaugcaucccccccccccccccccccccccccccccccaaaggcucuuuucagagccaccagaauu

SEQ ID NO: 13961 - RNA, 1903 nt, Artificial Sequence
  mRNA product Design a-2 comprising derived and/or modified sequence from HRSV(Memphis-37)__AIY60640.1__F_DSCav1_mut1 (opt4)
gggagaguccgcucagccagguugcagaagcggcuuagcguguguccuaaucuucucucugcguguagguaggccugugccgcaaacaagcuuaccauggagcugcccauccugaagaccaacgccaucaccaccauccuggccgccgugacccugugcuucgccagcagccagaacaucaccgaggaguucuaccagagcaccugcagcgccgugagcaagggcuaccugggcgcccugagaaccggcugguacaccagcgugaucaccaucgagcugagcaacaucaaggagaacaagugcaacggcaccgacgccaaggugaagcugaucaagcaggagcuggacaaguacaagaacgccgugaccgagcugcagcugcugaugcagagcacccccgccgccggcagcggcagcgccaucugcagcggcaucgccgugugcaaggugcugcaccuggagggcgaggugaacaagaucaagaacgcccugcugagcaccaacaaggccguggugagccugagcaacggcgugagcgugcugaccuucaaggugcuggaccugaagaacuacaucgacaagcagcugcugcccauccugaacaagcagagcugcagcauccccaacaucgagaccgugaucgaguuccagcagaagaacaacagacugcuggagaucaccagagaguucagcgugaacgccggcgugaccacccccgugagcaccuacaugcugaccaacagcgagcugcugagccugaucaacgacaugcccaucaccaacgaccagaagaagcugaugagcaacaacgugcagaucgugagacagcagagcuacagcaucaugugcaucaucaaggaggaggugcuggccuacguggugcagcugccccuguacggcgugaucgacacccccugcuggaagcugcacaccagcccccugugcaccaccaacaccaaggagggcagcaacaucugccugaccagaaccgacagaggcugguacugcgacaacgccggcagcgugagcuucuucccccaggccgagaccugcaaggugcagagcaacagaguguucugcgacaccaugaacagccugacccugcccagcgaggugaaccugugcaacaucgacaucuucaaccccaaguacgacugcaagaucaugaccagcaagaccgacgugagcagcagcgugaucaccagccugggcgccaucgugagcugcuacggcaagaccaagugcaccgccagcaacaagaacagaggcaucaucaagaccuucagcaacggcugcgacuacgugagcaacaagggcguggacaccgugagcgugggcaacacccuguacugcgugaacaagcaggagggccagagccuguacgugaagggcgagcccaucaucaacuucuacgacccccugguguuccccagcgacgaguucgacgccagcaucagccaggugaacgagaagaucaaccagagccuggccuucaucagaaagagcgacgagcugcugcacaacgugaacgugggcaagagcaccaccaacaucaugaucaccaccaucaucaucgugaucaucgugauccugcugcugcugaucgccgugggccuguuccuguacugcaaggccagaagcacccccgugacccugagcaaggaccagcugagcggcaucaacaacaucgccuucagcaacugaggacuagucccuguucccagagcccacuuuuuuuucuuuuuuugaaauaaaauagccugucuuucagaucuaaaaaaaaaaaaaaaaaaaaaaaaaaaaaaaaaaaaaaaaaaaaaaaaaaaaaaaaaaaaaaaaugcaucccccccccccccccccccccccccccccccaaaggcucuuuucagagccaccagaauu

SEQ ID NO: 13962 - RNA, 1903 nt, Artificial Sequence
  mRNA product Design a-2 comprising derived and/or modified sequence from HRSV(Memphis-37)__AIY60640.1__F_DSCav1_mut1 (opt5)
gggagaguccgcucagccagguugcagaagcggcuuagcguguguccuaaucuucucucugcguguagguaggccugugccgcaaacaagcuuaccauggagcugcccauccucaagaccaacgccauuacaacgauccuggcugccgugacccuuugcuucgcgagcucccagaauauuacagaagaguuuuaccaaucuaccuguagcgcugucuccaaaggcuaucugggggcccucagaacaggaugguacaccucuguuaucacaauugaacugagcaacaucaaggagaauaaaugcaacggcaccgacgccaaggugaaacuuaucaagcaggaacuggauaaguauaaaaaugcugugacggagcuccagcugcugaugcaguccaccccugccgcugggucuggaagcgccauuuguuccggcaucgcggucugcaaggugcuccaccuggagggggaaguuaacaaaauuaagaaugcccuucugagcacaaacaaagcuguggucucucucuccaauggagugagcguucugaccuucaaggugcuugaccugaagaacuacaucgauaaacaacuccugccgauucugaauaagcagucuuguuccauccccaacauugagacagucaucgaauuucagcagaaaaauaaccggcuccuggagaucacccgcgaguucagcgugaaugccggcgugacgacaccugucucuaccuauaugcuuacaaacuccgaacugcucagccugauuaacgacaugcccaucaccaaugaucaaaagaaacuuauguccaacaauguucagauugugagacagcagucuuacagcaucaugugcauuaucaaggaggaagugcuggcuuaugucgugcaacucccucuguacggcguuaucgacacccccuguuggaaacugcauacauccccucucugcacgaccaacacaaaggaggggagcaauauuugucugacccggacagaucgcggaugguacugcgacaacgccggcucuguguccuuuuucccgcaggcggaaaccuguaagguccagagcaauagaguguuuugcgauacgaugaacucucuuacacugcccagcgagguuaaucucugcaacaucgacauuuucaauccuaaauaugauuguaagaucaugaccuccaaaaccgacgugucuagcuccgucauuacaagccugggggccaucgugucuugcuacggaaagaccaaauguacagcuuccaacaagaaucggggcaucauuaagacguuuagcaacgggugcgauuaugucucuaauaaaggaguggacaccguuuccgugggcaacacacuuuacugugucaacaagcaagagggccagagccuguaugugaaaggggaacccaucauuaauuucuacgacccucucguuuuucccuccgaugaguucgacgccucuaucagccaggugaacgaaaagauuaaucagucccuggcuuuuauccgcaaaucugaugagcugcuccacaacgucaaugugggaaagagcaccacaaacauuaugaucaccacgaucauuaucgugauuaucguuauucugcuucugcucaucgccgucggccuguuccuguauugcaaggccagauccaccccggugacacuuagcaaagaccaacucucugggaucaauaacauugcuuucuccaauugaggacuagucccuguucccagagcccacuuuuuuuucuuuuuuugaaauaaaauagccugucuuucagaucuaaaaaaaaaaaaaaaaaaaaaaaaaaaaaaaaaaaaaaaaaaaaaaaaaaaaaaaaaaaaaaaaugcaucccccccccccccccccccccccccccccccaaaggcucuuuucagagccaccagaauu

SEQ ID NO: 13963 - RNA, 1903 nt, Artificial Sequence
  mRNA product Design a-2 comprising derived and/or modified sequence from HRSV(Memphis-37)__AIY60640.1__F_DSCav1_mut1 (opt6)
gggagaguccgcucagccagguugcagaagcggcuuagcguguguccuaaucuucucucugcguguagguaggccugugccgcaaacaagcuuaccauggaacuuccaauucuaaaaaccaaugcuauaacaacaauauuagcagcaguuacauuaugcuucgccucaucacaaaauaucacagaagaauuuuaccaauccacaugcucagcaguaucuaaaggguaccuaggagcccuacgaacaggaugguacacaucaguaauaacaauagaacucucaaacaucaaagaaaacaaaugcaauggaacagacgcuaaaguaaaauuaauaaaacaagaacuagacaaauacaaaaacgccgucaccgaacuucaguuacucaugcaaagcacaccugcagcaggaucagguucagcaauaugcucaggaauagcaguuugcaaaguauuacaccuagaaggugaagucaacaaaauaaaaaacgcacuucuaaguacuaacaaagcuguaguaucauuaucaaacggaguauccguacuaaccuuuaaaguccuagaccuaaaaaacuacauagacaaacaacuacucccaauacucaauaaacaauccugcucaauucccaacaucgaaacaguaauagaauuucaacaaaaaaacaaucgccuucuagaaauaacaagagaauuuucagucaacgccggaguaacaacaccaguaucaacauauaugcuaacaaacagugaacuauuauccuuaauaaacgacaugccaauaacaaaugaccaaaaaaaacuaauguccaauaauguccaaauaguaagacaacaaagcuauucaauuauguguauaauaaaagaagaaguauuagcauacguaguucaacuaccacuauauggcguuauagacacaccaugcuggaaauuacacacaagcccacuaugcacaacaaauacaaaagaaggauccaacauuugcuuaacuagaacugacagaggaugguacugcgacaacgcuggaucagucucuuucuucccacaagcagaaaccuguaaaguacaaucaaauagagucuucugcgacacaaugaacucacuaacucucccaucugaaguaaacuuaugcaacaucgauauauuuaacccaaaauacgauuguaaaauaaugacauccaaaacagacguuucaucaagcguaaucaccucccucggagcaaucguaagcugcuacgguaaaacaaaaugcacagcauccaacaaaaacagaggcaucauaaaaacauucucaaacggaugugacuauguaucaaacaaaggaguagacacaguuucaguaggcaauaccuuauacugugucaauaaacaagaaggacaaucacuauauguaaaaggagaaccuauaauaaacuucuacgacccccucgucuucccuagcgaugaauuugacgcaucaauaucgcaaguaaacgaaaaaauaaaccaaucauuagccuuuauaagaaaaucagacgaauuauuacacaacguaaacguggggaaaagcacaacuaacaucaugauaacaacuaucauaauuguaaucaucgucauccuauuacuccuaaucgcaguaggacuauuccuauacugcaaagcuagaucaacaccagucacccuaucgaaagaucaauugucaggaauaaacaauauagccuuuucaaauuaaggacuagucccuguucccagagcccacuuuuuuuucuuuuuuugaaauaaaauagccugucuuucagaucuaaaaaaaaaaaaaaaaaaaaaaaaaaaaaaaaaaaaaaaaaaaaaaaaaaaaaaaaaaaaaaaaugcaucccccccccccccccccccccccccccccccaaaggcucuuuucagagccaccagaauu

SEQ ID NO: 13964 - RNA, 1903 nt, Artificial Sequence
  mRNA product Design a-2 comprising derived and/or modified sequence from HRSV(Memphis-37)__AIY60640.1__F_DSCav1_mut1 (opt11)
gggagaguccgcucagccagguugcagaagcggcuuagcguguguccuaaucuucucucugcguguagguaggccugugccgcaaacaagcuuaccauggaacuccccauccucaaaacgaacgccaucacaaccauccucgccgccgucacccucugcuucgcgucaucccaaaacauaacugaagaguucuaucaaucaaccugcuccgcagucucaaaaggcuaccucggcgcccuacggaccggcugguacacaagcgucaucacaauagaacuuuccaacaucaaagaaaacaaauguaacggcaccgacgcaaaagucaaacucauaaaacaagaacuagacaaauauaaaaacgccguaacugaacuacaacuccucaugcaaucaacuccugcagccgguagcggcuccgcaaucugcucaggcaucgcagucugcaaagucuuacaccuagaaggcgaagucaacaaaaucaagaacgcccuacuauccacaaacaaagcaguagucucucuauccaacggagucuccguccucacauucaaaguacucgaccuaaagaacuacaucgacaaacaacuacuaccaaucuuaaacaaacaauccugcucaaucccuaacauugaaaccgucauagaguuccaacagaaaaacaaccgccuccucgaaauaaccagagaguucucagucaacgccggcgucaccaccccggucucaaccuacaugcuaaccaacucugaacuucucagccuaaucaacgacaugcccauuaccaacgaccaaaagaaacucauguccaauaacguccaaaucguucgacaacaauccuacucaaucaugugcaucauaaaagaagaaguccuagcauacgucguccaacucccacuauacggcguaaucgacacccccugcuggaaacuccacaccuccccucucuguaccaccaacaccaaagaaggguccaacaucugccucacgcgcaccgaccgaggcugguauugcgacaaugcaggcucugucuccuucuucccccaagccgaaaccugcaaaguccaaucuaaccgcgucuucugcgacaccaugaacagucuuacccucccgucagaagucaaccucugcaacauagauaucuucaacccaaaauacgacugcaaaaucaugaccucaaaaaccgacguuuccucauccguuaucaccucccucggcgcaaucgucagcugcuacggcaagacaaagugcacggcuucaaacaaaaaccgcggaaucaucaagacauucagcaacggcugcgacuacguauccaacaaaggaguggacacagucuccguuggaaacacccucuacugcguaaacaaacaagaaggccaaucacucuacgucaaaggcgaacccaucaucaacuucuacgacccacucgucuuccccuccgacgaguucgacgccucaaucagccaagucaacgagaaaauuaaccagucacucgccuucauacgcaaauccgacgaacuucuacacaacguaaacgucggaaaaucaaccacaaacaucaugauuaccacaauuaucauagucaucauaguaauccuccugcuacucauagcagucggacucuuccuauacugcaaagcccgcuccaccccugucacccuauccaaagaccaacuuuccggcaucaacaacauagccuuuuccaacuaaggacuagucccuguucccagagcccacuuuuuuuucuuuuuuugaaauaaaauagccugucuuucagaucuaaaaaaaaaaaaaaaaaaaaaaaaaaaaaaaaaaaaaaaaaaaaaaaaaaaaaaaaaaaaaaaaugcaucccccccccccccccccccccccccccccccaaaggcucuuuucagagccaccagaauu

SEQ ID NO: 13965 - RNA, 1981 nt, Artificial Sequence
  mRNA product Design a-3 comprising derived and/or modified sequence from HRSV(Memphis-37)__AIY60640.1__F_DSCav1_mut1 (opt1)
gggagagggcgcuuggcuugcaaggacccugagcugcggcauugaagcacacccaacccaacucgacugaagucagccucacugaaccggaucugagaaucuucucucucugggcuugccagggcucuccgaaccuagcuagcauccucuucaauuccaacuagaaagcuuaccauggagcugcccauccucaagaccaacgccaucaccacgauccuggccgcggugacccugugcuucgccagcucccagaacaucaccgaggaguucuaccagagcacgugcuccgccgucagcaagggcuaccucggcgcccugcgcaccgggugguacaccagcgugaucaccaucgagcuguccaacaucaaggagaacaagugcaacggcaccgacgccaaggugaagcucaucaagcaggagcuggacaaguacaagaacgcggucacggagcugcagcuccugaugcagagcaccccggccgccggcuccgggagcgcgaucugcuccggcaucgccgucugcaaggugcugcaccucgagggcgaggugaacaagaucaagaacgcccugcuguccaccaacaaggccgucgugagccucuccaacggggugagcguccugaccuucaaggugcuggaccucaagaacuacaucgacaagcagcugcugcccauccugaacaagcagagcugcuccauccccaacaucgagaccgucaucgaguuccagcagaagaacaaccgccuccuggagaucacgcgggaguucagcgugaacgcgggcgugaccacccccgucuccaccuacaugcugacgaacagcgagcuccugucccugaucaacgacaugccgaucaccaacgaccagaagaagcucaugagcaacaacgugcagaucgugcgccagcaguccuacagcaucaugugcaucaucaaggaggagguccuggccuacguggugcagcugccccucuacggggucaucgacacccccugcuggaagcugcacaccagcccccugugcacgaccaacaccaaggagggcuccaacaucugccucacccggacggaccgcgggugguacugcgacaacgccggcagcguguccuucuucccgcaggccgagaccugcaagguccagagcaaccggguguucugcgacaccaugaacucccugacccugcccagcgaggugaaccucugcaacaucgacaucuucaaccccaaguacgacugcaagaucaugacguccaagaccgacgucagcuccagcgugaucaccucccugggcgccaucgugagcugcuacgggaagaccaagugcacggcgagcaacaagaaccgcggcaucaucaagaccuucuccaacgggugcgacuacgucagcaacaagggcguggacaccguguccgucggcaacacccuguacugcgugaacaagcaggagggccagagccucuacgugaagggggagcccaucaucaacuucuacgacccgcuggucuuccccuccgacgaguucgacgccagcaucucccaggugaacgagaagaucaaccagagccuggccuucauccggaaguccgacgagcuccugcacaacgugaacgucggcaagagcaccacgaacaucaugaucaccaccaucaucaucgugaucaucgugauccugcugcuccugaucgccgucgggcuguuccucuacugcaaggcccgcuccacccccgugacgcugagcaaggaccagcuguccgggaucaacaacaucgcguucagcaacugaggacuagucccuguucccagagcccacuuuuuuuucuuuuuuugaaauaaaauagccugucuuucagaucuaaaaaaaaaaaaaaaaaaaaaaaaaaaaaaaaaaaaaaaaaaaaaaaaaaaaaaaaaaaaaaaaugcaucccccccccccccccccccccccccccccccaaaggcucuuuucagagccaccagaauu

SEQ ID NO: 13966 - RNA, 1981 nt, Artificial Sequence
  mRNA product Design a-3 comprising derived and/or modified sequence from HRSV(Memphis-37)__AIY60640.1__F_DSCav1_mut1 (opt1)
gggagagggcgcuuggcuugcaaggacccugagcugcggcauugaagcacacccaacccaacucgacugaagucagccucacugaaccggaucugagaaucuucucucucugggcuugccagggcucuccgaaccuagcuagcauccucuucaauuccaacuagaaagcuuaccauggagcugcccauccucaagaccaacgccaucaccacgauccuggccgcggugacccugugcuucgccagcucccagaacaucaccgaggaguucuaccagagcacgugcuccgccgucagcaagggcuaccucggggcccugcgcaccggcugguacaccuccgugaucaccaucgagcugagcaacaucaaggagaacaagugcaacgggaccgacgccaaggugaagcucaucaagcaggagcuggacaaguacaagaacgcggucacggagcugcagcuccugaugcaguccaccccggccgccggcagcggguccgccaucugcagcggcaucgcggugugcaaggugcugcaccucgagggcgaggucaacaagaucaagaacgcccugcuguccaccaacaaggccguggugagccucuccaacggggucagcgugcugaccuucaaggugcuggaccucaagaacuacaucgacaagcagcugcugcccauccucaacaagcaguccugcagcauccccaacaucgagacggucaucgaguuccagcagaagaacaaccggcugcuggagaucacccgcgaguucuccgugaacgccggcgugaccacccccgucagcacguacaugcucaccaacuccgagcugcugagccucaucaacgacaugccgaucaccaacgaccagaagaagcugaugagcaacaacgugcagaucgugcggcagcaguccuacagcaucaugugcaucaucaaggaggagguccuggccuacguggugcagcucccccuguacggggucaucgacacccccugcuggaagcugcacacgagcccccucugcaccaccaacaccaaggagggcuccaacaucugccugacgcgcaccgaccgggggugguacugcgacaacgcgggcuccgugagcuucuucccgcaggccgagaccugcaaggugcaguccaaccgcgucuucugcgacaccaugaacagccugacgcuccccuccgaggugaaccugugcaacaucgacaucuucaaccccaaguacgacugcaagaucaugaccagcaagaccgacgucuccagcuccgugaucaccagccugggcgccaucguguccugcuacgggaagacgaagugcaccgccagcaacaagaaccggggcaucaucaagaccuucuccaacgggugcgacuacgucagcaacaagggcguggacaccguguccgucggcaacacgcucuacugcgugaacaagcaggaggggcagagccuguacgugaagggcgagcccaucaucaacuucuacgacccgcuggucuuccccagcgacgaguucgacgccuccaucagccaggugaacgagaagaucaaccagucccucgcguucauccgcaagagcgacgagcugcugcacaacgugaacgucgggaaguccaccaccaacaucaugaucaccaccaucaucaucgugaucaucgugauccuccugcugcucaucgccgucggccuguuccuguacugcaaggcccggagcacgcccgugacccuguccaaggaccagcucagcgggaucaacaacaucgccuucuccaacugaggacuagucccuguucccagagcccacuuuuuuuucuuuuuuugaaauaaaauagccugucuuucagaucuaaaaaaaaaaaaaaaaaaaaaaaaaaaaaaaaaaaaaaaaaaaaaaaaaaaaaaaaaaaaaaaaugcaucccccccccccccccccccccccccccccccaaaggcucuuuucagagccaccagaauu

SEQ ID NO: 13967 - RNA, 1981 nt, Artificial Sequence
  mRNA product Design a-3 comprising derived and/or modified sequence from HRSV(Memphis-37)__AIY60640.1__F_DSCav1_mut1 (opt2)
gggagagggcgcuuggcuugcaaggacccugagcugcggcauugaagcacacccaacccaacucgacugaagucagccucacugaaccggaucugagaaucuucucucucugggcuugccagggcucuccgaaccuagcuagcauccucuucaauuccaacuagaaagcuuaccauggagcuccccauccucaagaccaacgccaucaccaccauccucgccgccgucacccucugcuucgccuccucccagaacaucaccgaggaguucuaccaguccaccugcuccgccgucuccaagggcuaccucggcgcccuccgcaccggcugguacaccuccgucaucaccaucgagcucuccaacaucaaggagaacaagugcaacggcaccgacgccaaggucaagcucaucaagcaggagcucgacaaguacaagaacgccgucaccgagcuccagcuccucaugcaguccacccccgccgccggcuccggcuccgccaucugcuccggcaucgccgucugcaagguccuccaccucgagggcgaggucaacaagaucaagaacgcccuccucuccaccaacaaggccgucgucucccucuccaacggcgucuccguccucaccuucaagguccucgaccucaagaacuacaucgacaagcagcuccuccccauccucaacaagcaguccugcuccauccccaacaucgagaccgucaucgaguuccagcagaagaacaaccgccuccucgagaucacccgcgaguucuccgucaacgccggcgucaccacccccgucuccaccuacaugcucaccaacuccgagcuccucucccucaucaacgacaugcccaucaccaacgaccagaagaagcucauguccaacaacguccagaucguccgccagcaguccuacuccaucaugugcaucaucaaggaggagguccucgccuacgucguccagcucccccucuacggcgucaucgacacccccugcuggaagcuccacaccuccccccucugcaccaccaacaccaaggagggcuccaacaucugccucacccgcaccgaccgcggcugguacugcgacaacgccggcuccgucuccuucuucccccaggccgagaccugcaagguccaguccaaccgcgucuucugcgacaccaugaacucccucacccuccccuccgaggucaaccucugcaacaucgacaucuucaaccccaaguacgacugcaagaucaugaccuccaagaccgacgucuccuccuccgucaucaccucccucggcgccaucgucuccugcuacggcaagaccaagugcaccgccuccaacaagaaccgcggcaucaucaagaccuucuccaacggcugcgacuacgucuccaacaagggcgucgacaccgucuccgucggcaacacccucuacugcgucaacaagcaggagggccagucccucuacgucaagggcgagcccaucaucaacuucuacgacccccucgucuuccccuccgacgaguucgacgccuccaucucccaggucaacgagaagaucaaccagucccucgccuucauccgcaaguccgacgagcuccuccacaacgucaacgucggcaaguccaccaccaacaucaugaucaccaccaucaucaucgucaucaucgucauccuccuccuccucaucgccgucggccucuuccucuacugcaaggcccgcuccacccccgucacccucuccaaggaccagcucuccggcaucaacaacaucgccuucuccaacugaggacuagucccuguucccagagcccacuuuuuuuucuuuuuuugaaauaaaauagccugucuuucagaucuaaaaaaaaaaaaaaaaaaaaaaaaaaaaaaaaaaaaaaaaaaaaaaaaaaaaaaaaaaaaaaaaugcaucccccccccccccccccccccccccccccccaaaggcucuuuucagagccaccagaauu

SEQ ID NO: 13968 - RNA, 1981 nt, Artificial Sequence
  mRNA product Design a-3 comprising derived and/or modified sequence from HRSV(Memphis-37)__AIY60640.1__F_DSCav1_mut1 (opt3)
gggagagggcgcuuggcuugcaaggacccugagcugcggcauugaagcacacccaacccaacucgacugaagucagccucacugaaccggaucugagaaucuucucucucugggcuugccagggcucuccgaaccuagcuagcauccucuucaauuccaacuagaaagcuuaccauggagcugcccauccucaagaccaacgccauuacaacuauacuugcugcagugacgcugugcuucgccagcucccagaauaucaccgaagaguuuuaccaaucuacauguucagcggucaguaaaggcuauuugggggcuuuaagaacuggaugguacaccagcguuauuacaaucgaacuguccaacauuaaggagaauaaaugcaacgguaccgacgccaaggugaaacuaaucaagcaggaacucgauaaguauaaaaaugcaguaacugagcugcagcuucugaugcagucuacuccugccgcuggcucggggucagcaauauguagcggaaucgccgugugcaaggucuugcaccucgagggcgaagugaacaaaauuaagaaugcucugcugaguaccaacaaagccguugugucccucucuaauggugucagcguguuaacguucaagguacuggaccuuaagaacuacaucgauaaacaauugcugccaauucuaaauaagcaguccuguucaaucccgaacauagagacuguuauugaauuucagcagaaaaauaacaggcuccuggagaucacccgggaguucagugugaaugcgggggucacaacucccgugagcaccuauaugcuuacaaacucugaacuguugucccucauuaacgacaugccuaucaccaaugaucaaaagaaacugaugucaaacaaugugcagaucguccgccagcagagcuacaguauuaugugcauaaucaaggaggaaguuuuagcauaugugguacaacugccacucuacggagugauugacacgcccuguuggaaacuucauacuucuccucugugcacaaccaacacuaaggagggcuccaauaucuguuugacacgaaccgaucguggcugguacugcgacaacgccgggagcgucucguuuuucccacaggcugaaacguguaaggugcagucuaauagaguguuuugcgauaccaugaacucccuaacacugcccucagagguuaaucucugcaacauagacauuuucaauccuaaauaugauuguaagaucaugacaaguaaaaccgacgucagcuccucugugaucacaagccugggagccauuguaucaugcuacgguaagacuaaauguaccgcaaguaacaagaauaggggcaucauuaagacauuuuccaacgggugcgauuauguuagcaauaaaggaguggacaccgucucugugggcaacacucuuuacugugucaacaagcaagagggucagucacuguaugugaaaggggaaccaauaaucaauuucuacgacccguugguuuuucccagugaugaguucgacgcuagcauuucccaggugaacgaaaagaucaaucagucucucgccuuuauccggaaaucggaugagcuguuacacaacguaaaugucggaaagagcacgacaaacauuaugauaaccacuaucauuaucgugauuaucguuauacugcuacuccugaucgcggugggccuuuucuuguauugcaaggcccgcuccaccccugucacacugucaaaagaccaacucaguggcauuaauaacaucgcauucucuaauugaggacuagucccuguucccagagcccacuuuuuuuucuuuuuuugaaauaaaauagccugucuuucagaucuaaaaaaaaaaaaaaaaaaaaaaaaaaaaaaaaaaaaaaaaaaaaaaaaaaaaaaaaaaaaaaaaugcaucccccccccccccccccccccccccccccccaaaggcucuuuucagagccaccagaauu

SEQ ID NO: 13969 - RNA, 1981 nt, Artificial Sequence
  mRNA product Design a-3 comprising derived and/or modified sequence from HRSV(Memphis-37)__AIY60640.1__F_DSCav1_mut1 (opt4)
gggagagggcgcuuggcuugcaaggacccugagcugcggcauugaagcacacccaacccaacucgacugaagucagccucacugaaccggaucugagaaucuucucucucugggcuugccagggcucuccgaaccuagcuagcauccucuucaauuccaacuagaaagcuuaccauggagcugcccauccugaagaccaacgccaucaccaccauccuggccgccgugacccugugcuucgccagcagccagaacaucaccgaggaguucuaccagagcaccugcagcgccgugagcaagggcuaccugggcgcccugagaaccggcugguacaccagcgugaucaccaucgagcugagcaacaucaaggagaacaagugcaacggcaccgacgccaaggugaagcugaucaagcaggagcuggacaaguacaagaacgccgugaccgagcugcagcugcugaugcagagcacccccgccgccggcagcggcagcgccaucugcagcggcaucgccgugugcaaggugcugcaccuggagggcgaggugaacaagaucaagaacgcccugcugagcaccaacaaggccguggugagccugagcaacggcgugagcgugcugaccuucaaggugcuggaccugaagaacuacaucgacaagcagcugcugcccauccugaacaagcagagcugcagcauccccaacaucgagaccgugaucgaguuccagcagaagaacaacagacugcuggagaucaccagagaguucagcgugaacgccggcgugaccacccccgugagcaccuacaugcugaccaacagcgagcugcugagccugaucaacgacaugcccaucaccaacgaccagaagaagcugaugagcaacaacgugcagaucgugagacagcagagcuacagcaucaugugcaucaucaaggaggaggugcuggccuacguggugcagcugccccuguacggcgugaucgacacccccugcuggaagcugcacaccagcccccugugcaccaccaacaccaaggagggcagcaacaucugccugaccagaaccgacagaggcugguacugcgacaacgccggcagcgugagcuucuucccccaggccgagaccugcaaggugcagagcaacagaguguucugcgacaccaugaacagccugacccugcccagcgaggugaaccugugcaacaucgacaucuucaaccccaaguacgacugcaagaucaugaccagcaagaccgacgugagcagcagcgugaucaccagccugggcgccaucgugagcugcuacggcaagaccaagugcaccgccagcaacaagaacagaggcaucaucaagaccuucagcaacggcugcgacuacgugagcaacaagggcguggacaccgugagcgugggcaacacccuguacugcgugaacaagcaggagggccagagccuguacgugaagggcgagcccaucaucaacuucuacgacccccugguguuccccagcgacgaguucgacgccagcaucagccaggugaacgagaagaucaaccagagccuggccuucaucagaaagagcgacgagcugcugcacaacgugaacgugggcaagagcaccaccaacaucaugaucaccaccaucaucaucgugaucaucgugauccugcugcugcugaucgccgugggccuguuccuguacugcaaggccagaagcacccccgugacccugagcaaggaccagcugagcggcaucaacaacaucgccuucagcaacugaggacuagucccuguucccagagcccacuuuuuuuucuuuuuuugaaauaaaauagccugucuuucagaucuaaaaaaaaaaaaaaaaaaaaaaaaaaaaaaaaaaaaaaaaaaaaaaaaaaaaaaaaaaaaaaaaugcaucccccccccccccccccccccccccccccccaaaggcucuuuucagagccaccagaauu

SEQ ID NO: 13970 - RNA, 1981 nt, Artificial Sequence
  mRNA product Design a-3 comprising derived and/or modified sequence from HRSV(Memphis-37)__AIY60640.1__F_DSCav1_mut1 (opt5)
gggagagggcgcuuggcuugcaaggacccugagcugcggcauugaagcacacccaacccaacucgacugaagucagccucacugaaccggaucugagaaucuucucucucugggcuugccagggcucuccgaaccuagcuagcauccucuucaauuccaacuagaaagcuuaccauggagcugcccauccucaagaccaacgccauuacaacgauccuggcugccgugacccuuugcuucgcgagcucccagaauauuacagaagaguuuuaccaaucuaccuguagcgcugucuccaaaggcuaucugggggcccucagaacaggaugguacaccucuguuaucacaauugaacugagcaacaucaaggagaauaaaugcaacggcaccgacgccaaggugaaacuuaucaagcaggaacuggauaaguauaaaaaugcugugacggagcuccagcugcugaugcaguccaccccugccgcugggucuggaagcgccauuuguuccggcaucgcggucugcaaggugcuccaccuggagggggaaguuaacaaaauuaagaaugcccuucugagcacaaacaaagcuguggucucucucuccaauggagugagcguucugaccuucaaggugcuugaccugaagaacuacaucgauaaacaacuccugccgauucugaauaagcagucuuguuccauccccaacauugagacagucaucgaauuucagcagaaaaauaaccggcuccuggagaucacccgcgaguucagcgugaaugccggcgugacgacaccugucucuaccuauaugcuuacaaacuccgaacugcucagccugauuaacgacaugcccaucaccaaugaucaaaagaaacuuauguccaacaauguucagauugugagacagcagucuuacagcaucaugugcauuaucaaggaggaagugcuggcuuaugucgugcaacucccucuguacggcguuaucgacacccccuguuggaaacugcauacauccccucucugcacgaccaacacaaaggaggggagcaauauuugucugacccggacagaucgcggaugguacugcgacaacgccggcucuguguccuuuuucccgcaggcggaaaccuguaagguccagagcaauagaguguuuugcgauacgaugaacucucuuacacugcccagcgagguuaaucucugcaacaucgacauuuucaauccuaaauaugauuguaagaucaugaccuccaaaaccgacgugucuagcuccgucauuacaagccugggggccaucgugucuugcuacggaaagaccaaauguacagcuuccaacaagaaucggggcaucauuaagacguuuagcaacgggugcgauuaugucucuaauaaaggaguggacaccguuuccgugggcaacacacuuuacugugucaacaagcaagagggccagagccuguaugugaaaggggaacccaucauuaauuucuacgacccucucguuuuucccuccgaugaguucgacgccucuaucagccaggugaacgaaaagauuaaucagucccuggcuuuuauccgcaaaucugaugagcugcuccacaacgucaaugugggaaagagcaccacaaacauuaugaucaccacgaucauuaucgugauuaucguuauucugcuucugcucaucgccgucggccuguuccuguauugcaaggccagauccaccccggugacacuuagcaaagaccaacucucugggaucaauaacauugcuuucuccaauugaggacuagucccuguucccagagcccacuuuuuuuucuuuuuuugaaauaaaauagccugucuuucagaucuaaaaaaaaaaaaaaaaaaaaaaaaaaaaaaaaaaaaaaaaaaaaaaaaaaaaaaaaaaaaaaaaugcaucccccccccccccccccccccccccccccccaaaggcucuuuucagagccaccagaauu

SEQ ID NO: 13971 - RNA, 1981 nt, Artificial Sequence
  mRNA product Design a-3 comprising derived and/or modified sequence from HRSV(Memphis-37)__AIY60640.1__F_DSCav1_mut1 (opt6)
gggagagggcgcuuggcuugcaaggacccugagcugcggcauugaagcacacccaacccaacucgacugaagucagccucacugaaccggaucugagaaucuucucucucugggcuugccagggcucuccgaaccuagcuagcauccucuucaauuccaacuagaaagcuuaccauggaacuuccaauucuaaaaaccaaugcuauaacaacaauauuagcagcaguuacauuaugcuucgccucaucacaaaauaucacagaagaauuuuaccaauccacaugcucagcaguaucuaaaggguaccuaggagcccuacgaacaggaugguacacaucaguaauaacaauagaacucucaaacaucaaagaaaacaaaugcaauggaacagacgcuaaaguaaaauuaauaaaacaagaacuagacaaauacaaaaacgccgucaccgaacuucaguuacucaugcaaagcacaccugcagcaggaucagguucagcaauaugcucaggaauagcaguuugcaaaguauuacaccuagaaggugaagucaacaaaauaaaaaacgcacuucuaaguacuaacaaagcuguaguaucauuaucaaacggaguauccguacuaaccuuuaaaguccuagaccuaaaaaacuacauagacaaacaacuacucccaauacucaauaaacaauccugcucaauucccaacaucgaaacaguaauagaauuucaacaaaaaaacaaucgccuucuagaaauaacaagagaauuuucagucaacgccggaguaacaacaccaguaucaacauauaugcuaacaaacagugaacuauuauccuuaauaaacgacaugccaauaacaaaugaccaaaaaaaacuaauguccaauaauguccaaauaguaagacaacaaagcuauucaauuauguguauaauaaaagaagaaguauuagcauacguaguucaacuaccacuauauggcguuauagacacaccaugcuggaaauuacacacaagcccacuaugcacaacaaauacaaaagaaggauccaacauuugcuuaacuagaacugacagaggaugguacugcgacaacgcuggaucagucucuuucuucccacaagcagaaaccuguaaaguacaaucaaauagagucuucugcgacacaaugaacucacuaacucucccaucugaaguaaacuuaugcaacaucgauauauuuaacccaaaauacgauuguaaaauaaugacauccaaaacagacguuucaucaagcguaaucaccucccucggagcaaucguaagcugcuacgguaaaacaaaaugcacagcauccaacaaaaacagaggcaucauaaaaacauucucaaacggaugugacuauguaucaaacaaaggaguagacacaguuucaguaggcaauaccuuauacugugucaauaaacaagaaggacaaucacuauauguaaaaggagaaccuauaauaaacuucuacgacccccucgucuucccuagcgaugaauuugacgcaucaauaucgcaaguaaacgaaaaaauaaaccaaucauuagccuuuauaagaaaaucagacgaauuauuacacaacguaaacguggggaaaagcacaacuaacaucaugauaacaacuaucauaauuguaaucaucgucauccuauuacuccuaaucgcaguaggacuauuccuauacugcaaagcuagaucaacaccagucacccuaucgaaagaucaauugucaggaauaaacaauauagccuuuucaaauuaaggacuagucccuguucccagagcccacuuuuuuuucuuuuuuugaaauaaaauagccugucuuucagaucuaaaaaaaaaaaaaaaaaaaaaaaaaaaaaaaaaaaaaaaaaaaaaaaaaaaaaaaaaaaaaaaaugcaucccccccccccccccccccccccccccccccaaaggcucuuuucagagccaccagaauu

SEQ ID NO: 13972 - RNA, 1981 nt, Artificial Sequence
  mRNA product Design a-3 comprising derived and/or modified sequence from HRSV(Memphis-37)__AIY60640.1__F_DSCav1_mut1 (opt11)
gggagagggcgcuuggcuugcaaggacccugagcugcggcauugaagcacacccaacccaacucgacugaagucagccucacugaaccggaucugagaaucuucucucucugggcuugccagggcucuccgaaccuagcuagcauccucuucaauuccaacuagaaagcuuaccauggaacuccccauccucaaaacgaacgccaucacaaccauccucgccgccgucacccucugcuucgcgucaucccaaaacauaacugaagaguucuaucaaucaaccugcuccgcagucucaaaaggcuaccucggcgcccuacggaccggcugguacacaagcgucaucacaauagaacuuuccaacaucaaagaaaacaaauguaacggcaccgacgcaaaagucaaacucauaaaacaagaacuagacaaauauaaaaacgccguaacugaacuacaacuccucaugcaaucaacuccugcagccgguagcggcuccgcaaucugcucaggcaucgcagucugcaaagucuuacaccuagaaggcgaagucaacaaaaucaagaacgcccuacuauccacaaacaaagcaguagucucucuauccaacggagucuccguccucacauucaaaguacucgaccuaaagaacuacaucgacaaacaacuacuaccaaucuuaaacaaacaauccugcucaaucccuaacauugaaaccgucauagaguuccaacagaaaaacaaccgccuccucgaaauaaccagagaguucucagucaacgccggcgucaccaccccggucucaaccuacaugcuaaccaacucugaacuucucagccuaaucaacgacaugcccauuaccaacgaccaaaagaaacucauguccaauaacguccaaaucguucgacaacaauccuacucaaucaugugcaucauaaaagaagaaguccuagcauacgucguccaacucccacuauacggcguaaucgacacccccugcuggaaacuccacaccuccccucucuguaccaccaacaccaaagaaggguccaacaucugccucacgcgcaccgaccgaggcugguauugcgacaaugcaggcucugucuccuucuucccccaagccgaaaccugcaaaguccaaucuaaccgcgucuucugcgacaccaugaacagucuuacccucccgucagaagucaaccucugcaacauagauaucuucaacccaaaauacgacugcaaaaucaugaccucaaaaaccgacguuuccucauccguuaucaccucccucggcgcaaucgucagcugcuacggcaagacaaagugcacggcuucaaacaaaaaccgcggaaucaucaagacauucagcaacggcugcgacuacguauccaacaaaggaguggacacagucuccguuggaaacacccucuacugcguaaacaaacaagaaggccaaucacucuacgucaaaggcgaacccaucaucaacuucuacgacccacucgucuuccccuccgacgaguucgacgccucaaucagccaagucaacgagaaaauuaaccagucacucgccuucauacgcaaauccgacgaacuucuacacaacguaaacgucggaaaaucaaccacaaacaucaugauuaccacaauuaucauagucaucauaguaauccuccugcuacucauagcagucggacucuuccuauacugcaaagcccgcuccaccccugucacccuauccaaagaccaacuuuccggcaucaacaacauagccuuuuccaacuaaggacuagucccuguucccagagcccacuuuuuuuucuuuuuuugaaauaaaauagccugucuuucagaucuaaaaaaaaaaaaaaaaaaaaaaaaaaaaaaaaaaaaaaaaaaaaaaaaaaaaaaaaaaaaaaaaugcaucccccccccccccccccccccccccccccccaaaggcucuuuucagagccaccagaauu

SEQ ID NO: 13973 - RNA, 1930 nt, Artificial Sequence
  mRNA product Design a-4 comprising derived and/or modified sequence from HRSV(Memphis-37)__AIY60640.1__F_DSCav1_mut1 (opt1)
gggagacuccugucgggcggaaguaggaggaguagaguuuaaaaacaguacucuuuuuccgguucgggacguaguugaagcaacgacaagccggauaaccgcucuugagacaggaagcuuaccauggagcugcccauccucaagaccaacgccaucaccacgauccuggccgcggugacccugugcuucgccagcucccagaacaucaccgaggaguucuaccagagcacgugcuccgccgucagcaagggcuaccucggcgcccugcgcaccgggugguacaccagcgugaucaccaucgagcuguccaacaucaaggagaacaagugcaacggcaccgacgccaaggugaagcucaucaagcaggagcuggacaaguacaagaacgcggucacggagcugcagcuccugaugcagagcaccccggccgccggcuccgggagcgcgaucugcuccggcaucgccgucugcaaggugcugcaccucgagggcgaggugaacaagaucaagaacgcccugcuguccaccaacaaggccgucgugagccucuccaacggggugagcguccugaccuucaaggugcuggaccucaagaacuacaucgacaagcagcugcugcccauccugaacaagcagagcugcuccauccccaacaucgagaccgucaucgaguuccagcagaagaacaaccgccuccuggagaucacgcgggaguucagcgugaacgcgggcgugaccacccccgucuccaccuacaugcugacgaacagcgagcuccugucccugaucaacgacaugccgaucaccaacgaccagaagaagcucaugagcaacaacgugcagaucgugcgccagcaguccuacagcaucaugugcaucaucaaggaggagguccuggccuacguggugcagcugccccucuacggggucaucgacacccccugcuggaagcugcacaccagcccccugugcacgaccaacaccaaggagggcuccaacaucugccucacccggacggaccgcgggugguacugcgacaacgccggcagcguguccuucuucccgcaggccgagaccugcaagguccagagcaaccggguguucugcgacaccaugaacucccugacccugcccagcgaggugaaccucugcaacaucgacaucuucaaccccaaguacgacugcaagaucaugacguccaagaccgacgucagcuccagcgugaucaccucccugggcgccaucgugagcugcuacgggaagaccaagugcacggcgagcaacaagaaccgcggcaucaucaagaccuucuccaacgggugcgacuacgucagcaacaagggcguggacaccguguccgucggcaacacccuguacugcgugaacaagcaggagggccagagccucuacgugaagggggagcccaucaucaacuucuacgacccgcuggucuuccccuccgacgaguucgacgccagcaucucccaggugaacgagaagaucaaccagagccuggccuucauccggaaguccgacgagcuccugcacaacgugaacgucggcaagagcaccacgaacaucaugaucaccaccaucaucaucgugaucaucgugauccugcugcuccugaucgccgucgggcuguuccucuacugcaaggcccgcuccacccccgugacgcugagcaaggaccagcuguccgggaucaacaacaucgcguucagcaacugaggacuagucccuguucccagagcccacuuuuuuuucuuuuuuugaaauaaaauagccugucuuucagaucuaaaaaaaaaaaaaaaaaaaaaaaaaaaaaaaaaaaaaaaaaaaaaaaaaaaaaaaaaaaaaaaaugcaucccccccccccccccccccccccccccccccaaaggcucuuuucagagccaccagaauu

SEQ ID NO: 13974 - RNA, 1930 nt, Artificial Sequence
  mRNA product Design a-4 comprising derived and/or modified sequence from HRSV(Memphis-37)__AIY60640.1__F_DSCav1_mut1 (opt1)
gggagacuccugucgggcggaaguaggaggaguagaguuuaaaaacaguacucuuuuuccgguucgggacguaguugaagcaacgacaagccggauaaccgcucuugagacaggaagcuuaccauggagcugcccauccucaagaccaacgccaucaccacgauccuggccgcggugacccugugcuucgccagcucccagaacaucaccgaggaguucuaccagagcacgugcuccgccgucagcaagggcuaccucggggcccugcgcaccggcugguacaccuccgugaucaccaucgagcugagcaacaucaaggagaacaagugcaacgggaccgacgccaaggugaagcucaucaagcaggagcuggacaaguacaagaacgcggucacggagcugcagcuccugaugcaguccaccccggccgccggcagcggguccgccaucugcagcggcaucgcggugugcaaggugcugcaccucgagggcgaggucaacaagaucaagaacgcccugcuguccaccaacaaggccguggugagccucuccaacggggucagcgugcugaccuucaaggugcuggaccucaagaacuacaucgacaagcagcugcugcccauccucaacaagcaguccugcagcauccccaacaucgagacggucaucgaguuccagcagaagaacaaccggcugcuggagaucacccgcgaguucuccgugaacgccggcgugaccacccccgucagcacguacaugcucaccaacuccgagcugcugagccucaucaacgacaugccgaucaccaacgaccagaagaagcugaugagcaacaacgugcagaucgugcggcagcaguccuacagcaucaugugcaucaucaaggaggagguccuggccuacguggugcagcucccccuguacggggucaucgacacccccugcuggaagcugcacacgagcccccucugcaccaccaacaccaaggagggcuccaacaucugccugacgcgcaccgaccgggggugguacugcgacaacgcgggcuccgugagcuucuucccgcaggccgagaccugcaaggugcaguccaaccgcgucuucugcgacaccaugaacagccugacgcuccccuccgaggugaaccugugcaacaucgacaucuucaaccccaaguacgacugcaagaucaugaccagcaagaccgacgucuccagcuccgugaucaccagccugggcgccaucguguccugcuacgggaagacgaagugcaccgccagcaacaagaaccggggcaucaucaagaccuucuccaacgggugcgacuacgucagcaacaagggcguggacaccguguccgucggcaacacgcucuacugcgugaacaagcaggaggggcagagccuguacgugaagggcgagcccaucaucaacuucuacgacccgcuggucuuccccagcgacgaguucgacgccuccaucagccaggugaacgagaagaucaaccagucccucgcguucauccgcaagagcgacgagcugcugcacaacgugaacgucgggaaguccaccaccaacaucaugaucaccaccaucaucaucgugaucaucgugauccuccugcugcucaucgccgucggccuguuccuguacugcaaggcccggagcacgcccgugacccuguccaaggaccagcucagcgggaucaacaacaucgccuucuccaacugaggacuagucccuguucccagagcccacuuuuuuuucuuuuuuugaaauaaaauagccugucuuucagaucuaaaaaaaaaaaaaaaaaaaaaaaaaaaaaaaaaaaaaaaaaaaaaaaaaaaaaaaaaaaaaaaaugcaucccccccccccccccccccccccccccccccaaaggcucuuuucagagccaccagaauu

SEQ ID NO: 13975 - RNA, 1930 nt, Artificial Sequence
  mRNA product Design a-4 comprising derived and/or modified sequence from HRSV(Memphis-37)__AIY60640.1__F_DSCav1_mut1 (opt2)
gggagacuccugucgggcggaaguaggaggaguagaguuuaaaaacaguacucuuuuuccgguucgggacguaguugaagcaacgacaagccggauaaccgcucuugagacaggaagcuuaccauggagcuccccauccucaagaccaacgccaucaccaccauccucgccgccgucacccucugcuucgccuccucccagaacaucaccgaggaguucuaccaguccaccugcuccgccgucuccaagggcuaccucggcgcccuccgcaccggcugguacaccuccgucaucaccaucgagcucuccaacaucaaggagaacaagugcaacggcaccgacgccaaggucaagcucaucaagcaggagcucgacaaguacaagaacgccgucaccgagcuccagcuccucaugcaguccacccccgccgccggcuccggcuccgccaucugcuccggcaucgccgucugcaagguccuccaccucgagggcgaggucaacaagaucaagaacgcccuccucuccaccaacaaggccgucgucucccucuccaacggcgucuccguccucaccuucaagguccucgaccucaagaacuacaucgacaagcagcuccuccccauccucaacaagcaguccugcuccauccccaacaucgagaccgucaucgaguuccagcagaagaacaaccgccuccucgagaucacccgcgaguucuccgucaacgccggcgucaccacccccgucuccaccuacaugcucaccaacuccgagcuccucucccucaucaacgacaugcccaucaccaacgaccagaagaagcucauguccaacaacguccagaucguccgccagcaguccuacuccaucaugugcaucaucaaggaggagguccucgccuacgucguccagcucccccucuacggcgucaucgacacccccugcuggaagcuccacaccuccccccucugcaccaccaacaccaaggagggcuccaacaucugccucacccgcaccgaccgcggcugguacugcgacaacgccggcuccgucuccuucuucccccaggccgagaccugcaagguccaguccaaccgcgucuucugcgacaccaugaacucccucacccuccccuccgaggucaaccucugcaacaucgacaucuucaaccccaaguacgacugcaagaucaugaccuccaagaccgacgucuccuccuccgucaucaccucccucggcgccaucgucuccugcuacggcaagaccaagugcaccgccuccaacaagaaccgcggcaucaucaagaccuucuccaacggcugcgacuacgucuccaacaagggcgucgacaccgucuccgucggcaacacccucuacugcgucaacaagcaggagggccagucccucuacgucaagggcgagcccaucaucaacuucuacgacccccucgucuuccccuccgacgaguucgacgccuccaucucccaggucaacgagaagaucaaccagucccucgccuucauccgcaaguccgacgagcuccuccacaacgucaacgucggcaaguccaccaccaacaucaugaucaccaccaucaucaucgucaucaucgucauccuccuccuccucaucgccgucggccucuuccucuacugcaaggcccgcuccacccccgucacccucuccaaggaccagcucuccggcaucaacaacaucgccuucuccaacugaggacuagucccuguucccagagcccacuuuuuuuucuuuuuuugaaauaaaauagccugucuuucagaucuaaaaaaaaaaaaaaaaaaaaaaaaaaaaaaaaaaaaaaaaaaaaaaaaaaaaaaaaaaaaaaaaugcaucccccccccccccccccccccccccccccccaaaggcucuuuucagagccaccagaauu

SEQ ID NO: 13976 - RNA, 1930 nt, Artificial Sequence
  mRNA product Design a-4 comprising derived and/or modified sequence from HRSV(Memphis-37)__AIY60640.1__F_DSCav1_mut1 (opt3)
gggagacuccugucgggcggaaguaggaggaguagaguuuaaaaacaguacucuuuuuccgguucgggacguaguugaagcaacgacaagccggauaaccgcucuugagacaggaagcuuaccauggagcugcccauccucaagaccaacgccauuacaacuauacuugcugcagugacgcugugcuucgccagcucccagaauaucaccgaagaguuuuaccaaucuacauguucagcggucaguaaaggcuauuugggggcuuuaagaacuggaugguacaccagcguuauuacaaucgaacuguccaacauuaaggagaauaaaugcaacgguaccgacgccaaggugaaacuaaucaagcaggaacucgauaaguauaaaaaugcaguaacugagcugcagcuucugaugcagucuacuccugccgcuggcucggggucagcaauauguagcggaaucgccgugugcaaggucuugcaccucgagggcgaagugaacaaaauuaagaaugcucugcugaguaccaacaaagccguugugucccucucuaauggugucagcguguuaacguucaagguacuggaccuuaagaacuacaucgauaaacaauugcugccaauucuaaauaagcaguccuguucaaucccgaacauagagacuguuauugaauuucagcagaaaaauaacaggcuccuggagaucacccgggaguucagugugaaugcgggggucacaacucccgugagcaccuauaugcuuacaaacucugaacuguugucccucauuaacgacaugccuaucaccaaugaucaaaagaaacugaugucaaacaaugugcagaucguccgccagcagagcuacaguauuaugugcauaaucaaggaggaaguuuuagcauaugugguacaacugccacucuacggagugauugacacgcccuguuggaaacuucauacuucuccucugugcacaaccaacacuaaggagggcuccaauaucuguuugacacgaaccgaucguggcugguacugcgacaacgccgggagcgucucguuuuucccacaggcugaaacguguaaggugcagucuaauagaguguuuugcgauaccaugaacucccuaacacugcccucagagguuaaucucugcaacauagacauuuucaauccuaaauaugauuguaagaucaugacaaguaaaaccgacgucagcuccucugugaucacaagccugggagccauuguaucaugcuacgguaagacuaaauguaccgcaaguaacaagaauaggggcaucauuaagacauuuuccaacgggugcgauuauguuagcaauaaaggaguggacaccgucucugugggcaacacucuuuacugugucaacaagcaagagggucagucacuguaugugaaaggggaaccaauaaucaauuucuacgacccguugguuuuucccagugaugaguucgacgcuagcauuucccaggugaacgaaaagaucaaucagucucucgccuuuauccggaaaucggaugagcuguuacacaacguaaaugucggaaagagcacgacaaacauuaugauaaccacuaucauuaucgugauuaucguuauacugcuacuccugaucgcggugggccuuuucuuguauugcaaggcccgcuccaccccugucacacugucaaaagaccaacucaguggcauuaauaacaucgcauucucuaauugaggacuagucccuguucccagagcccacuuuuuuuucuuuuuuugaaauaaaauagccugucuuucagaucuaaaaaaaaaaaaaaaaaaaaaaaaaaaaaaaaaaaaaaaaaaaaaaaaaaaaaaaaaaaaaaaaugcaucccccccccccccccccccccccccccccccaaaggcucuuuucagagccaccagaauu

SEQ ID NO: 13977 - RNA, 1930 nt, Artificial Sequence
  mRNA product Design a-4 comprising derived and/or modified sequence from HRSV(Memphis-37)__AIY60640.1__F_DSCav1_mut1 (opt4)
gggagacuccugucgggcggaaguaggaggaguagaguuuaaaaacaguacucuuuuuccgguucgggacguaguugaagcaacgacaagccggauaaccgcucuugagacaggaagcuuaccauggagcugcccauccugaagaccaacgccaucaccaccauccuggccgccgugacccugugcuucgccagcagccagaacaucaccgaggaguucuaccagagcaccugcagcgccgugagcaagggcuaccugggcgcccugagaaccggcugguacaccagcgugaucaccaucgagcugagcaacaucaaggagaacaagugcaacggcaccgacgccaaggugaagcugaucaagcaggagcuggacaaguacaagaacgccgugaccgagcugcagcugcugaugcagagcacccccgccgccggcagcggcagcgccaucugcagcggcaucgccgugugcaaggugcugcaccuggagggcgaggugaacaagaucaagaacgcccugcugagcaccaacaaggccguggugagccugagcaacggcgugagcgugcugaccuucaaggugcuggaccugaagaacuacaucgacaagcagcugcugcccauccugaacaagcagagcugcagcauccccaacaucgagaccgugaucgaguuccagcagaagaacaacagacugcuggagaucaccagagaguucagcgugaacgccggcgugaccacccccgugagcaccuacaugcugaccaacagcgagcugcugagccugaucaacgacaugcccaucaccaacgaccagaagaagcugaugagcaacaacgugcagaucgugagacagcagagcuacagcaucaugugcaucaucaaggaggaggugcuggccuacguggugcagcugccccuguacggcgugaucgacacccccugcuggaagcugcacaccagcccccugugcaccaccaacaccaaggagggcagcaacaucugccugaccagaaccgacagaggcugguacugcgacaacgccggcagcgugagcuucuucccccaggccgagaccugcaaggugcagagcaacagaguguucugcgacaccaugaacagccugacccugcccagcgaggugaaccugugcaacaucgacaucuucaaccccaaguacgacugcaagaucaugaccagcaagaccgacgugagcagcagcgugaucaccagccugggcgccaucgugagcugcuacggcaagaccaagugcaccgccagcaacaagaacagaggcaucaucaagaccuucagcaacggcugcgacuacgugagcaacaagggcguggacaccgugagcgugggcaacacccuguacugcgugaacaagcaggagggccagagccuguacgugaagggcgagcccaucaucaacuucuacgacccccugguguuccccagcgacgaguucgacgccagcaucagccaggugaacgagaagaucaaccagagccuggccuucaucagaaagagcgacgagcugcugcacaacgugaacgugggcaagagcaccaccaacaucaugaucaccaccaucaucaucgugaucaucgugauccugcugcugcugaucgccgugggccuguuccuguacugcaaggccagaagcacccccgugacccugagcaaggaccagcugagcggcaucaacaacaucgccuucagcaacugaggacuagucccuguucccagagcccacuuuuuuuucuuuuuuugaaauaaaauagccugucuuucagaucuaaaaaaaaaaaaaaaaaaaaaaaaaaaaaaaaaaaaaaaaaaaaaaaaaaaaaaaaaaaaaaaaugcaucccccccccccccccccccccccccccccccaaaggcucuuuucagagccaccagaauu

SEQ ID NO: 13978 - RNA, 1930 nt, Artificial Sequence
  mRNA product Design a-4 comprising derived and/or modified sequence from HRSV(Memphis-37)__AIY60640.1__F_DSCav1_mut1 (opt5)
gggagacuccugucgggcggaaguaggaggaguagaguuuaaaaacaguacucuuuuuccgguucgggacguaguugaagcaacgacaagccggauaaccgcucuugagacaggaagcuuaccauggagcugcccauccucaagaccaacgccauuacaacgauccuggcugccgugacccuuugcuucgcgagcucccagaauauuacagaagaguuuuaccaaucuaccuguagcgcugucuccaaaggcuaucugggggcccucagaacaggaugguacaccucuguuaucacaauugaacugagcaacaucaaggagaauaaaugcaacggcaccgacgccaaggugaaacuuaucaagcaggaacuggauaaguauaaaaaugcugugacggagcuccagcugcugaugcaguccaccccugccgcugggucuggaagcgccauuuguuccggcaucgcggucugcaaggugcuccaccuggagggggaaguuaacaaaauuaagaaugcccuucugagcacaaacaaagcuguggucucucucuccaauggagugagcguucugaccuucaaggugcuugaccugaagaacuacaucgauaaacaacuccugccgauucugaauaagcagucuuguuccauccccaacauugagacagucaucgaauuucagcagaaaaauaaccggcuccuggagaucacccgcgaguucagcgugaaugccggcgugacgacaccugucucuaccuauaugcuuacaaacuccgaacugcucagccugauuaacgacaugcccaucaccaaugaucaaaagaaacuuauguccaacaauguucagauugugagacagcagucuuacagcaucaugugcauuaucaaggaggaagugcuggcuuaugucgugcaacucccucuguacggcguuaucgacacccccuguuggaaacugcauacauccccucucugcacgaccaacacaaaggaggggagcaauauuugucugacccggacagaucgcggaugguacugcgacaacgccggcucuguguccuuuuucccgcaggcggaaaccuguaagguccagagcaauagaguguuuugcgauacgaugaacucucuuacacugcccagcgagguuaaucucugcaacaucgacauuuucaauccuaaauaugauuguaagaucaugaccuccaaaaccgacgugucuagcuccgucauuacaagccugggggccaucgugucuugcuacggaaagaccaaauguacagcuuccaacaagaaucggggcaucauuaagacguuuagcaacgggugcgauuaugucucuaauaaaggaguggacaccguuuccgugggcaacacacuuuacugugucaacaagcaagagggccagagccuguaugugaaaggggaacccaucauuaauuucuacgacccucucguuuuucccuccgaugaguucgacgccucuaucagccaggugaacgaaaagauuaaucagucccuggcuuuuauccgcaaaucugaugagcugcuccacaacgucaaugugggaaagagcaccacaaacauuaugaucaccacgaucauuaucgugauuaucguuauucugcuucugcucaucgccgucggccuguuccuguauugcaaggccagauccaccccggugacacuuagcaaagaccaacucucugggaucaauaacauugcuuucuccaauugaggacuagucccuguucccagagcccacuuuuuuuucuuuuuuugaaauaaaauagccugucuuucagaucuaaaaaaaaaaaaaaaaaaaaaaaaaaaaaaaaaaaaaaaaaaaaaaaaaaaaaaaaaaaaaaaaugcaucccccccccccccccccccccccccccccccaaaggcucuuuucagagccaccagaauu

SEQ ID NO: 13979 - RNA, 1930 nt, Artificial Sequence
  mRNA product Design a-4 comprising derived and/or modified sequence from HRSV(Memphis-37)__AIY60640.1__F_DSCav1_mut1 (opt6)
gggagacuccugucgggcggaaguaggaggaguagaguuuaaaaacaguacucuuuuuccgguucgggacguaguugaagcaacgacaagccggauaaccgcucuugagacaggaagcuuaccauggaacuuccaauucuaaaaaccaaugcuauaacaacaauauuagcagcaguuacauuaugcuucgccucaucacaaaauaucacagaagaauuuuaccaauccacaugcucagcaguaucuaaaggguaccuaggagcccuacgaacaggaugguacacaucaguaauaacaauagaacucucaaacaucaaagaaaacaaaugcaauggaacagacgcuaaaguaaaauuaauaaaacaagaacuagacaaauacaaaaacgccgucaccgaacuucaguuacucaugcaaagcacaccugcagcaggaucagguucagcaauaugcucaggaauagcaguuugcaaaguauuacaccuagaaggugaagucaacaaaauaaaaaacgcacuucuaaguacuaacaaagcuguaguaucauuaucaaacggaguauccguacuaaccuuuaaaguccuagaccuaaaaaacuacauagacaaacaacuacucccaauacucaauaaacaauccugcucaauucccaacaucgaaacaguaauagaauuucaacaaaaaaacaaucgccuucuagaaauaacaagagaauuuucagucaacgccggaguaacaacaccaguaucaacauauaugcuaacaaacagugaacuauuauccuuaauaaacgacaugccaauaacaaaugaccaaaaaaaacuaauguccaauaauguccaaauaguaagacaacaaagcuauucaauuauguguauaauaaaagaagaaguauuagcauacguaguucaacuaccacuauauggcguuauagacacaccaugcuggaaauuacacacaagcccacuaugcacaacaaauacaaaagaaggauccaacauuugcuuaacuagaacugacagaggaugguacugcgacaacgcuggaucagucucuuucuucccacaagcagaaaccuguaaaguacaaucaaauagagucuucugcgacacaaugaacucacuaacucucccaucugaaguaaacuuaugcaacaucgauauauuuaacccaaaauacgauuguaaaauaaugacauccaaaacagacguuucaucaagcguaaucaccucccucggagcaaucguaagcugcuacgguaaaacaaaaugcacagcauccaacaaaaacagaggcaucauaaaaacauucucaaacggaugugacuauguaucaaacaaaggaguagacacaguuucaguaggcaauaccuuauacugugucaauaaacaagaaggacaaucacuauauguaaaaggagaaccuauaauaaacuucuacgacccccucgucuucccuagcgaugaauuugacgcaucaauaucgcaaguaaacgaaaaaauaaaccaaucauuagccuuuauaagaaaaucagacgaauuauuacacaacguaaacguggggaaaagcacaacuaacaucaugauaacaacuaucauaauuguaaucaucgucauccuauuacuccuaaucgcaguaggacuauuccuauacugcaaagcuagaucaacaccagucacccuaucgaaagaucaauugucaggaauaaacaauauagccuuuucaaauuaaggacuagucccuguucccagagcccacuuuuuuuucuuuuuuugaaauaaaauagccugucuuucagaucuaaaaaaaaaaaaaaaaaaaaaaaaaaaaaaaaaaaaaaaaaaaaaaaaaaaaaaaaaaaaaaaaugcaucccccccccccccccccccccccccccccccaaaggcucuuuucagagccaccagaauu

SEQ ID NO: 13980 - RNA, 1930 nt, Artificial Sequence
  mRNA product Design a-4 comprising derived and/or modified sequence from HRSV(Memphis-37)__AIY60640.1__F_DSCav1_mut1 (opt11)
gggagacuccugucgggcggaaguaggaggaguagaguuuaaaaacaguacucuuuuuccgguucgggacguaguugaagcaacgacaagccggauaaccgcucuugagacaggaagcuuaccauggaacuccccauccucaaaacgaacgccaucacaaccauccucgccgccgucacccucugcuucgcgucaucccaaaacauaacugaagaguucuaucaaucaaccugcuccgcagucucaaaaggcuaccucggcgcccuacggaccggcugguacacaagcgucaucacaauagaacuuuccaacaucaaagaaaacaaauguaacggcaccgacgcaaaagucaaacucauaaaacaagaacuagacaaauauaaaaacgccguaacugaacuacaacuccucaugcaaucaacuccugcagccgguagcggcuccgcaaucugcucaggcaucgcagucugcaaagucuuacaccuagaaggcgaagucaacaaaaucaagaacgcccuacuauccacaaacaaagcaguagucucucuauccaacggagucuccguccucacauucaaaguacucgaccuaaagaacuacaucgacaaacaacuacuaccaaucuuaaacaaacaauccugcucaaucccuaacauugaaaccgucauagaguuccaacagaaaaacaaccgccuccucgaaauaaccagagaguucucagucaacgccggcgucaccaccccggucucaaccuacaugcuaaccaacucugaacuucucagccuaaucaacgacaugcccauuaccaacgaccaaaagaaacucauguccaauaacguccaaaucguucgacaacaauccuacucaaucaugugcaucauaaaagaagaaguccuagcauacgucguccaacucccacuauacggcguaaucgacacccccugcuggaaacuccacaccuccccucucuguaccaccaacaccaaagaaggguccaacaucugccucacgcgcaccgaccgaggcugguauugcgacaaugcaggcucugucuccuucuucccccaagccgaaaccugcaaaguccaaucuaaccgcgucuucugcgacaccaugaacagucuuacccucccgucagaagucaaccucugcaacauagauaucuucaacccaaaauacgacugcaaaaucaugaccucaaaaaccgacguuuccucauccguuaucaccucccucggcgcaaucgucagcugcuacggcaagacaaagugcacggcuucaaacaaaaaccgcggaaucaucaagacauucagcaacggcugcgacuacguauccaacaaaggaguggacacagucuccguuggaaacacccucuacugcguaaacaaacaagaaggccaaucacucuacgucaaaggcgaacccaucaucaacuucuacgacccacucgucuuccccuccgacgaguucgacgccucaaucagccaagucaacgagaaaauuaaccagucacucgccuucauacgcaaauccgacgaacuucuacacaacguaaacgucggaaaaucaaccacaaacaucaugauuaccacaauuaucauagucaucauaguaauccuccugcuacucauagcagucggacucuuccuauacugcaaagcccgcuccaccccugucacccuauccaaagaccaacuuuccggcaucaacaacauagccuuuuccaacuaaggacuagucccuguucccagagcccacuuuuuuuucuuuuuuugaaauaaaauagccugucuuucagaucuaaaaaaaaaaaaaaaaaaaaaaaaaaaaaaaaaaaaaaaaaaaaaaaaaaaaaaaaaaaaaaaaugcaucccccccccccccccccccccccccccccccaaaggcucuuuucagagccaccagaauu

SEQ ID NO: 13981 - RNA, 1876 nt, Artificial Sequence
  mRNA product Design a-5 comprising derived and/or modified sequence from HRSV(Memphis-37)__AIY60640.1__F_DSCav1_mut1 (opt1)
gggagacuuucccauucuguagcagaauuugguguugccuguggucuuggucccgcggagaagcuuaccauggagcugcccauccucaagaccaacgccaucaccacgauccuggccgcggugacccugugcuucgccagcucccagaacaucaccgaggaguucuaccagagcacgugcuccgccgucagcaagggcuaccucggcgcccugcgcaccgggugguacaccagcgugaucaccaucgagcuguccaacaucaaggagaacaagugcaacggcaccgacgccaaggugaagcucaucaagcaggagcuggacaaguacaagaacgcggucacggagcugcagcuccugaugcagagcaccccggccgccggcuccgggagcgcgaucugcuccggcaucgccgucugcaaggugcugcaccucgagggcgaggugaacaagaucaagaacgcccugcuguccaccaacaaggccgucgugagccucuccaacggggugagcguccugaccuucaaggugcuggaccucaagaacuacaucgacaagcagcugcugcccauccugaacaagcagagcugcuccauccccaacaucgagaccgucaucgaguuccagcagaagaacaaccgccuccuggagaucacgcgggaguucagcgugaacgcgggcgugaccacccccgucuccaccuacaugcugacgaacagcgagcuccugucccugaucaacgacaugccgaucaccaacgaccagaagaagcucaugagcaacaacgugcagaucgugcgccagcaguccuacagcaucaugugcaucaucaaggaggagguccuggccuacguggugcagcugccccucuacggggucaucgacacccccugcuggaagcugcacaccagcccccugugcacgaccaacaccaaggagggcuccaacaucugccucacccggacggaccgcgggugguacugcgacaacgccggcagcguguccuucuucccgcaggccgagaccugcaagguccagagcaaccggguguucugcgacaccaugaacucccugacccugcccagcgaggugaaccucugcaacaucgacaucuucaaccccaaguacgacugcaagaucaugacguccaagaccgacgucagcuccagcgugaucaccucccugggcgccaucgugagcugcuacgggaagaccaagugcacggcgagcaacaagaaccgcggcaucaucaagaccuucuccaacgggugcgacuacgucagcaacaagggcguggacaccguguccgucggcaacacccuguacugcgugaacaagcaggagggccagagccucuacgugaagggggagcccaucaucaacuucuacgacccgcuggucuuccccuccgacgaguucgacgccagcaucucccaggugaacgagaagaucaaccagagccuggccuucauccggaaguccgacgagcuccugcacaacgugaacgucggcaagagcaccacgaacaucaugaucaccaccaucaucaucgugaucaucgugauccugcugcuccugaucgccgucgggcuguuccucuacugcaaggcccgcuccacccccgugacgcugagcaaggaccagcuguccgggaucaacaacaucgcguucagcaacugaggacuagucccuguucccagagcccacuuuuuuuucuuuuuuugaaauaaaauagccugucuuucagaucuaaaaaaaaaaaaaaaaaaaaaaaaaaaaaaaaaaaaaaaaaaaaaaaaaaaaaaaaaaaaaaaaugcaucccccccccccccccccccccccccccccccaaaggcucuuuucagagccaccagaauu

SEQ ID NO: 13982 - RNA, 1876 nt, Artificial Sequence
  mRNA product Design a-5 comprising derived and/or modified sequence from HRSV(Memphis-37)__AIY60640.1__F_DSCav1_mut1 (opt1)
gggagacuuucccauucuguagcagaauuugguguugccuguggucuuggucccgcggagaagcuuaccauggagcugcccauccucaagaccaacgccaucaccacgauccuggccgcggugacccugugcuucgccagcucccagaacaucaccgaggaguucuaccagagcacgugcuccgccgucagcaagggcuaccucggggcccugcgcaccggcugguacaccuccgugaucaccaucgagcugagcaacaucaaggagaacaagugcaacgggaccgacgccaaggugaagcucaucaagcaggagcuggacaaguacaagaacgcggucacggagcugcagcuccugaugcaguccaccccggccgccggcagcggguccgccaucugcagcggcaucgcggugugcaaggugcugcaccucgagggcgaggucaacaagaucaagaacgcccugcuguccaccaacaaggccguggugagccucuccaacggggucagcgugcugaccuucaaggugcuggaccucaagaacuacaucgacaagcagcugcugcccauccucaacaagcaguccugcagcauccccaacaucgagacggucaucgaguuccagcagaagaacaaccggcugcuggagaucacccgcgaguucuccgugaacgccggcgugaccacccccgucagcacguacaugcucaccaacuccgagcugcugagccucaucaacgacaugccgaucaccaacgaccagaagaagcugaugagcaacaacgugcagaucgugcggcagcaguccuacagcaucaugugcaucaucaaggaggagguccuggccuacguggugcagcucccccuguacggggucaucgacacccccugcuggaagcugcacacgagcccccucugcaccaccaacaccaaggagggcuccaacaucugccugacgcgcaccgaccgggggugguacugcgacaacgcgggcuccgugagcuucuucccgcaggccgagaccugcaaggugcaguccaaccgcgucuucugcgacaccaugaacagccugacgcuccccuccgaggugaaccugugcaacaucgacaucuucaaccccaaguacgacugcaagaucaugaccagcaagaccgacgucuccagcuccgugaucaccagccugggcgccaucguguccugcuacgggaagacgaagugcaccgccagcaacaagaaccggggcaucaucaagaccuucuccaacgggugcgacuacgucagcaacaagggcguggacaccguguccgucggcaacacgcucuacugcgugaacaagcaggaggggcagagccuguacgugaagggcgagcccaucaucaacuucuacgacccgcuggucuuccccagcgacgaguucgacgccuccaucagccaggugaacgagaagaucaaccagucccucgcguucauccgcaagagcgacgagcugcugcacaacgugaacgucgggaaguccaccaccaacaucaugaucaccaccaucaucaucgugaucaucgugauccuccugcugcucaucgccgucggccuguuccuguacugcaaggcccggagcacgcccgugacccuguccaaggaccagcucagcgggaucaacaacaucgccuucuccaacugaggacuagucccuguucccagagcccacuuuuuuuucuuuuuuugaaauaaaauagccugucuuucagaucuaaaaaaaaaaaaaaaaaaaaaaaaaaaaaaaaaaaaaaaaaaaaaaaaaaaaaaaaaaaaaaaaugcaucccccccccccccccccccccccccccccccaaaggcucuuuucagagccaccagaauu

SEQ ID NO: 13983 - RNA, 1876 nt, Artificial Sequence
  mRNA product Design a-5 comprising derived and/or modified sequence from HRSV(Memphis-37)__AIY60640.1__F_DSCav1_mut1 (opt2)
gggagacuuucccauucuguagcagaauuugguguugccuguggucuuggucccgcggagaagcuuaccauggagcuccccauccucaagaccaacgccaucaccaccauccucgccgccgucacccucugcuucgccuccucccagaacaucaccgaggaguucuaccaguccaccugcuccgccgucuccaagggcuaccucggcgcccuccgcaccggcugguacaccuccgucaucaccaucgagcucuccaacaucaaggagaacaagugcaacggcaccgacgccaaggucaagcucaucaagcaggagcucgacaaguacaagaacgccgucaccgagcuccagcuccucaugcaguccacccccgccgccggcuccggcuccgccaucugcuccggcaucgccgucugcaagguccuccaccucgagggcgaggucaacaagaucaagaacgcccuccucuccaccaacaaggccgucgucucccucuccaacggcgucuccguccucaccuucaagguccucgaccucaagaacuacaucgacaagcagcuccuccccauccucaacaagcaguccugcuccauccccaacaucgagaccgucaucgaguuccagcagaagaacaaccgccuccucgagaucacccgcgaguucuccgucaacgccggcgucaccacccccgucuccaccuacaugcucaccaacuccgagcuccucucccucaucaacgacaugcccaucaccaacgaccagaagaagcucauguccaacaacguccagaucguccgccagcaguccuacuccaucaugugcaucaucaaggaggagguccucgccuacgucguccagcucccccucuacggcgucaucgacacccccugcuggaagcuccacaccuccccccucugcaccaccaacaccaaggagggcuccaacaucugccucacccgcaccgaccgcggcugguacugcgacaacgccggcuccgucuccuucuucccccaggccgagaccugcaagguccaguccaaccgcgucuucugcgacaccaugaacucccucacccuccccuccgaggucaaccucugcaacaucgacaucuucaaccccaaguacgacugcaagaucaugaccuccaagaccgacgucuccuccuccgucaucaccucccucggcgccaucgucuccugcuacggcaagaccaagugcaccgccuccaacaagaaccgcggcaucaucaagaccuucuccaacggcugcgacuacgucuccaacaagggcgucgacaccgucuccgucggcaacacccucuacugcgucaacaagcaggagggccagucccucuacgucaagggcgagcccaucaucaacuucuacgacccccucgucuuccccuccgacgaguucgacgccuccaucucccaggucaacgagaagaucaaccagucccucgccuucauccgcaaguccgacgagcuccuccacaacgucaacgucggcaaguccaccaccaacaucaugaucaccaccaucaucaucgucaucaucgucauccuccuccuccucaucgccgucggccucuuccucuacugcaaggcccgcuccacccccgucacccucuccaaggaccagcucuccggcaucaacaacaucgccuucuccaacugaggacuagucccuguucccagagcccacuuuuuuuucuuuuuuugaaauaaaauagccugucuuucagaucuaaaaaaaaaaaaaaaaaaaaaaaaaaaaaaaaaaaaaaaaaaaaaaaaaaaaaaaaaaaaaaaaugcaucccccccccccccccccccccccccccccccaaaggcucuuuucagagccaccagaauu

SEQ ID NO: 13984 - RNA, 1876 nt, Artificial Sequence
  mRNA product Design a-5 comprising derived and/or modified sequence from HRSV(Memphis-37)__AIY60640.1__F_DSCav1_mut1 (opt3)
gggagacuuucccauucuguagcagaauuugguguugccuguggucuuggucccgcggagaagcuuaccauggagcugcccauccucaagaccaacgccauuacaacuauacuugcugcagugacgcugugcuucgccagcucccagaauaucaccgaagaguuuuaccaaucuacauguucagcggucaguaaaggcuauuugggggcuuuaagaacuggaugguacaccagcguuauuacaaucgaacuguccaacauuaaggagaauaaaugcaacgguaccgacgccaaggugaaacuaaucaagcaggaacucgauaaguauaaaaaugcaguaacugagcugcagcuucugaugcagucuacuccugccgcuggcucggggucagcaauauguagcggaaucgccgugugcaaggucuugcaccucgagggcgaagugaacaaaauuaagaaugcucugcugaguaccaacaaagccguugugucccucucuaauggugucagcguguuaacguucaagguacuggaccuuaagaacuacaucgauaaacaauugcugccaauucuaaauaagcaguccuguucaaucccgaacauagagacuguuauugaauuucagcagaaaaauaacaggcuccuggagaucacccgggaguucagugugaaugcgggggucacaacucccgugagcaccuauaugcuuacaaacucugaacuguugucccucauuaacgacaugccuaucaccaaugaucaaaagaaacugaugucaaacaaugugcagaucguccgccagcagagcuacaguauuaugugcauaaucaaggaggaaguuuuagcauaugugguacaacugccacucuacggagugauugacacgcccuguuggaaacuucauacuucuccucugugcacaaccaacacuaaggagggcuccaauaucuguuugacacgaaccgaucguggcugguacugcgacaacgccgggagcgucucguuuuucccacaggcugaaacguguaaggugcagucuaauagaguguuuugcgauaccaugaacucccuaacacugcccucagagguuaaucucugcaacauagacauuuucaauccuaaauaugauuguaagaucaugacaaguaaaaccgacgucagcuccucugugaucacaagccugggagccauuguaucaugcuacgguaagacuaaauguaccgcaaguaacaagaauaggggcaucauuaagacauuuuccaacgggugcgauuauguuagcaauaaaggaguggacaccgucucugugggcaacacucuuuacugugucaacaagcaagagggucagucacuguaugugaaaggggaaccaauaaucaauuucuacgacccguugguuuuucccagugaugaguucgacgcuagcauuucccaggugaacgaaaagaucaaucagucucucgccuuuauccggaaaucggaugagcuguuacacaacguaaaugucggaaagagcacgacaaacauuaugauaaccacuaucauuaucgugauuaucguuauacugcuacuccugaucgcggugggccuuuucuuguauugcaaggcccgcuccaccccugucacacugucaaaagaccaacucaguggcauuaauaacaucgcauucucuaauugaggacuagucccuguucccagagcccacuuuuuuuucuuuuuuugaaauaaaauagccugucuuucagaucuaaaaaaaaaaaaaaaaaaaaaaaaaaaaaaaaaaaaaaaaaaaaaaaaaaaaaaaaaaaaaaaaugcaucccccccccccccccccccccccccccccccaaaggcucuuuucagagccaccagaauu

SEQ ID NO: 13985 - RNA, 1876 nt, Artificial Sequence
  mRNA product Design a-5 comprising derived and/or modified sequence from HRSV(Memphis-37)__AIY60640.1__F_DSCav1_mut1 (opt4)
gggagacuuucccauucuguagcagaauuugguguugccuguggucuuggucccgcggagaagcuuaccauggagcugcccauccugaagaccaacgccaucaccaccauccuggccgccgugacccugugcuucgccagcagccagaacaucaccgaggaguucuaccagagcaccugcagcgccgugagcaagggcuaccugggcgcccugagaaccggcugguacaccagcgugaucaccaucgagcugagcaacaucaaggagaacaagugcaacggcaccgacgccaaggugaagcugaucaagcaggagcuggacaaguacaagaacgccgugaccgagcugcagcugcugaugcagagcacccccgccgccggcagcggcagcgccaucugcagcggcaucgccgugugcaaggugcugcaccuggagggcgaggugaacaagaucaagaacgcccugcugagcaccaacaaggccguggugagccugagcaacggcgugagcgugcugaccuucaaggugcuggaccugaagaacuacaucgacaagcagcugcugcccauccugaacaagcagagcugcagcauccccaacaucgagaccgugaucgaguuccagcagaagaacaacagacugcuggagaucaccagagaguucagcgugaacgccggcgugaccacccccgugagcaccuacaugcugaccaacagcgagcugcugagccugaucaacgacaugcccaucaccaacgaccagaagaagcugaugagcaacaacgugcagaucgugagacagcagagcuacagcaucaugugcaucaucaaggaggaggugcuggccuacguggugcagcugccccuguacggcgugaucgacacccccugcuggaagcugcacaccagcccccugugcaccaccaacaccaaggagggcagcaacaucugccugaccagaaccgacagaggcugguacugcgacaacgccggcagcgugagcuucuucccccaggccgagaccugcaaggugcagagcaacagaguguucugcgacaccaugaacagccugacccugcccagcgaggugaaccugugcaacaucgacaucuucaaccccaaguacgacugcaagaucaugaccagcaagaccgacgugagcagcagcgugaucaccagccugggcgccaucgugagcugcuacggcaagaccaagugcaccgccagcaacaagaacagaggcaucaucaagaccuucagcaacggcugcgacuacgugagcaacaagggcguggacaccgugagcgugggcaacacccuguacugcgugaacaagcaggagggccagagccuguacgugaagggcgagcccaucaucaacuucuacgacccccugguguuccccagcgacgaguucgacgccagcaucagccaggugaacgagaagaucaaccagagccuggccuucaucagaaagagcgacgagcugcugcacaacgugaacgugggcaagagcaccaccaacaucaugaucaccaccaucaucaucgugaucaucgugauccugcugcugcugaucgccgugggccuguuccuguacugcaaggccagaagcacccccgugacccugagcaaggaccagcugagcggcaucaacaacaucgccuucagcaacugaggacuagucccuguucccagagcccacuuuuuuuucuuuuuuugaaauaaaauagccugucuuucagaucuaaaaaaaaaaaaaaaaaaaaaaaaaaaaaaaaaaaaaaaaaaaaaaaaaaaaaaaaaaaaaaaaugcaucccccccccccccccccccccccccccccccaaaggcucuuuucagagccaccagaauu

SEQ ID NO: 13986 - RNA, 1876 nt, Artificial Sequence
  mRNA product Design a-5 comprising derived and/or modified sequence from HRSV(Memphis-37)__AIY60640.1__F_DSCav1_mut1 (opt5)
gggagacuuucccauucuguagcagaauuugguguugccuguggucuuggucccgcggagaagcuuaccauggagcugcccauccucaagaccaacgccauuacaacgauccuggcugccgugacccuuugcuucgcgagcucccagaauauuacagaagaguuuuaccaaucuaccuguagcgcugucuccaaaggcuaucugggggcccucagaacaggaugguacaccucuguuaucacaauugaacugagcaacaucaaggagaauaaaugcaacggcaccgacgccaaggugaaacuuaucaagcaggaacuggauaaguauaaaaaugcugugacggagcuccagcugcugaugcaguccaccccugccgcugggucuggaagcgccauuuguuccggcaucgcggucugcaaggugcuccaccuggagggggaaguuaacaaaauuaagaaugcccuucugagcacaaacaaagcuguggucucucucuccaauggagugagcguucugaccuucaaggugcuugaccugaagaacuacaucgauaaacaacuccugccgauucugaauaagcagucuuguuccauccccaacauugagacagucaucgaauuucagcagaaaaauaaccggcuccuggagaucacccgcgaguucagcgugaaugccggcgugacgacaccugucucuaccuauaugcuuacaaacuccgaacugcucagccugauuaacgacaugcccaucaccaaugaucaaaagaaacuuauguccaacaauguucagauugugagacagcagucuuacagcaucaugugcauuaucaaggaggaagugcuggcuuaugucgugcaacucccucuguacggcguuaucgacacccccuguuggaaacugcauacauccccucucugcacgaccaacacaaaggaggggagcaauauuugucugacccggacagaucgcggaugguacugcgacaacgccggcucuguguccuuuuucccgcaggcggaaaccuguaagguccagagcaauagaguguuuugcgauacgaugaacucucuuacacugcccagcgagguuaaucucugcaacaucgacauuuucaauccuaaauaugauuguaagaucaugaccuccaaaaccgacgugucuagcuccgucauuacaagccugggggccaucgugucuugcuacggaaagaccaaauguacagcuuccaacaagaaucggggcaucauuaagacguuuagcaacgggugcgauuaugucucuaauaaaggaguggacaccguuuccgugggcaacacacuuuacugugucaacaagcaagagggccagagccuguaugugaaaggggaacccaucauuaauuucuacgacccucucguuuuucccuccgaugaguucgacgccucuaucagccaggugaacgaaaagauuaaucagucccuggcuuuuauccgcaaaucugaugagcugcuccacaacgucaaugugggaaagagcaccacaaacauuaugaucaccacgaucauuaucgugauuaucguuauucugcuucugcucaucgccgucggccuguuccuguauugcaaggccagauccaccccggugacacuuagcaaagaccaacucucugggaucaauaacauugcuuucuccaauugaggacuagucccuguucccagagcccacuuuuuuuucuuuuuuugaaauaaaauagccugucuuucagaucuaaaaaaaaaaaaaaaaaaaaaaaaaaaaaaaaaaaaaaaaaaaaaaaaaaaaaaaaaaaaaaaaugcaucccccccccccccccccccccccccccccccaaaggcucuuuucagagccaccagaauu

SEQ ID NO: 13987 - RNA, 1876 nt, Artificial Sequence
  mRNA product Design a-5 comprising derived and/or modified sequence from HRSV(Memphis-37)__AIY60640.1__F_DSCav1_mut1 (opt6)
gggagacuuucccauucuguagcagaauuugguguugccuguggucuuggucccgcggagaagcuuaccauggaacuuccaauucuaaaaaccaaugcuauaacaacaauauuagcagcaguuacauuaugcuucgccucaucacaaaauaucacagaagaauuuuaccaauccacaugcucagcaguaucuaaaggguaccuaggagcccuacgaacaggaugguacacaucaguaauaacaauagaacucucaaacaucaaagaaaacaaaugcaauggaacagacgcuaaaguaaaauuaauaaaacaagaacuagacaaauacaaaaacgccgucaccgaacuucaguuacucaugcaaagcacaccugcagcaggaucagguucagcaauaugcucaggaauagcaguuugcaaaguauuacaccuagaaggugaagucaacaaaauaaaaaacgcacuucuaaguacuaacaaagcuguaguaucauuaucaaacggaguauccguacuaaccuuuaaaguccuagaccuaaaaaacuacauagacaaacaacuacucccaauacucaauaaacaauccugcucaauucccaacaucgaaacaguaauagaauuucaacaaaaaaacaaucgccuucuagaaauaacaagagaauuuucagucaacgccggaguaacaacaccaguaucaacauauaugcuaacaaacagugaacuauuauccuuaauaaacgacaugccaauaacaaaugaccaaaaaaaacuaauguccaauaauguccaaauaguaagacaacaaagcuauucaauuauguguauaauaaaagaagaaguauuagcauacguaguucaacuaccacuauauggcguuauagacacaccaugcuggaaauuacacacaagcccacuaugcacaacaaauacaaaagaaggauccaacauuugcuuaacuagaacugacagaggaugguacugcgacaacgcuggaucagucucuuucuucccacaagcagaaaccuguaaaguacaaucaaauagagucuucugcgacacaaugaacucacuaacucucccaucugaaguaaacuuaugcaacaucgauauauuuaacccaaaauacgauuguaaaauaaugacauccaaaacagacguuucaucaagcguaaucaccucccucggagcaaucguaagcugcuacgguaaaacaaaaugcacagcauccaacaaaaacagaggcaucauaaaaacauucucaaacggaugugacuauguaucaaacaaaggaguagacacaguuucaguaggcaauaccuuauacugugucaauaaacaagaaggacaaucacuauauguaaaaggagaaccuauaauaaacuucuacgacccccucgucuucccuagcgaugaauuugacgcaucaauaucgcaaguaaacgaaaaaauaaaccaaucauuagccuuuauaagaaaaucagacgaauuauuacacaacguaaacguggggaaaagcacaacuaacaucaugauaacaacuaucauaauuguaaucaucgucauccuauuacuccuaaucgcaguaggacuauuccuauacugcaaagcuagaucaacaccagucacccuaucgaaagaucaauugucaggaauaaacaauauagccuuuucaaauuaaggacuagucccuguucccagagcccacuuuuuuuucuuuuuuugaaauaaaauagccugucuuucagaucuaaaaaaaaaaaaaaaaaaaaaaaaaaaaaaaaaaaaaaaaaaaaaaaaaaaaaaaaaaaaaaaaugcaucccccccccccccccccccccccccccccccaaaggcucuuuucagagccaccagaauu

SEQ ID NO: 13988 - RNA, 1876 nt, Artificial Sequence
  mRNA product Design a-5 comprising derived and/or modified sequence from HRSV(Memphis-37)__AIY60640.1__F_DSCav1_mut1 (opt11)
gggagacuuucccauucuguagcagaauuugguguugccuguggucuuggucccgcggagaagcuuaccauggaacuccccauccucaaaacgaacgccaucacaaccauccucgccgccgucacccucugcuucgcgucaucccaaaacauaacugaagaguucuaucaaucaaccugcuccgcagucucaaaaggcuaccucggcgcccuacggaccggcugguacacaagcgucaucacaauagaacuuuccaacaucaaagaaaacaaauguaacggcaccgacgcaaaagucaaacucauaaaacaagaacuagacaaauauaaaaacgccguaacugaacuacaacuccucaugcaaucaacuccugcagccgguagcggcuccgcaaucugcucaggcaucgcagucugcaaagucuuacaccuagaaggcgaagucaacaaaaucaagaacgcccuacuauccacaaacaaagcaguagucucucuauccaacggagucuccguccucacauucaaaguacucgaccuaaagaacuacaucgacaaacaacuacuaccaaucuuaaacaaacaauccugcucaaucccuaacauugaaaccgucauagaguuccaacagaaaaacaaccgccuccucgaaauaaccagagaguucucagucaacgccggcgucaccaccccggucucaaccuacaugcuaaccaacucugaacuucucagccuaaucaacgacaugcccauuaccaacgaccaaaagaaacucauguccaauaacguccaaaucguucgacaacaauccuacucaaucaugugcaucauaaaagaagaaguccuagcauacgucguccaacucccacuauacggcguaaucgacacccccugcuggaaacuccacaccuccccucucuguaccaccaacaccaaagaaggguccaacaucugccucacgcgcaccgaccgaggcugguauugcgacaaugcaggcucugucuccuucuucccccaagccgaaaccugcaaaguccaaucuaaccgcgucuucugcgacaccaugaacagucuuacccucccgucagaagucaaccucugcaacauagauaucuucaacccaaaauacgacugcaaaaucaugaccucaaaaaccgacguuuccucauccguuaucaccucccucggcgcaaucgucagcugcuacggcaagacaaagugcacggcuucaaacaaaaaccgcggaaucaucaagacauucagcaacggcugcgacuacguauccaacaaaggaguggacacagucuccguuggaaacacccucuacugcguaaacaaacaagaaggccaaucacucuacgucaaaggcgaacccaucaucaacuucuacgacccacucgucuuccccuccgacgaguucgacgccucaaucagccaagucaacgagaaaauuaaccagucacucgccuucauacgcaaauccgacgaacuucuacacaacguaaacgucggaaaaucaaccacaaacaucaugauuaccacaauuaucauagucaucauaguaauccuccugcuacucauagcagucggacucuuccuauacugcaaagcccgcuccaccccugucacccuauccaaagaccaacuuuccggcaucaacaacauagccuuuuccaacuaaggacuagucccuguucccagagcccacuuuuuuuucuuuuuuugaaauaaaauagccugucuuucagaucuaaaaaaaaaaaaaaaaaaaaaaaaaaaaaaaaaaaaaaaaaaaaaaaaaaaaaaaaaaaaaaaaugcaucccccccccccccccccccccccccccccccaaaggcucuuuucagagccaccagaauu

SEQ ID NO: 13989 - RNA, 2057 nt, Artificial Sequence
  mRNA product Design b-1 comprising derived and/or modified sequence from HRSV(Memphis-37)__AIY60640.1__F_DSCav1_mut1 (opt1)
gggagacggagacggccugcaggaccugcucucucagcccucagccgaggccuacgccgagccgagugcgcagccgacgaccgggaggagccgcagccuucaacucugagguacugugauccgcgcugcccgccgggccgccccaguccgcugcugcggcaccuccuucccucgcgcccucuucgcucgccagcgccuucccugugagccugcgucaccgcggccgccaagcuuaccauggagcugcccauccucaagaccaacgccaucaccacgauccuggccgcggugacccugugcuucgccagcucccagaacaucaccgaggaguucuaccagagcacgugcuccgccgucagcaagggcuaccucggcgcccugcgcaccgggugguacaccagcgugaucaccaucgagcuguccaacaucaaggagaacaagugcaacggcaccgacgccaaggugaagcucaucaagcaggagcuggacaaguacaagaacgcggucacggagcugcagcuccugaugcagagcaccccggccgccggcuccgggagcgcgaucugcuccggcaucgccgucugcaaggugcugcaccucgagggcgaggugaacaagaucaagaacgcccugcuguccaccaacaaggccgucgugagccucuccaacggggugagcguccugaccuucaaggugcuggaccucaagaacuacaucgacaagcagcugcugcccauccugaacaagcagagcugcuccauccccaacaucgagaccgucaucgaguuccagcagaagaacaaccgccuccuggagaucacgcgggaguucagcgugaacgcgggcgugaccacccccgucuccaccuacaugcugacgaacagcgagcuccugucccugaucaacgacaugccgaucaccaacgaccagaagaagcucaugagcaacaacgugcagaucgugcgccagcaguccuacagcaucaugugcaucaucaaggaggagguccuggccuacguggugcagcugccccucuacggggucaucgacacccccugcuggaagcugcacaccagcccccugugcacgaccaacaccaaggagggcuccaacaucugccucacccggacggaccgcgggugguacugcgacaacgccggcagcguguccuucuucccgcaggccgagaccugcaagguccagagcaaccggguguucugcgacaccaugaacucccugacccugcccagcgaggugaaccucugcaacaucgacaucuucaaccccaaguacgacugcaagaucaugacguccaagaccgacgucagcuccagcgugaucaccucccugggcgccaucgugagcugcuacgggaagaccaagugcacggcgagcaacaagaaccgcggcaucaucaagaccuucuccaacgggugcgacuacgucagcaacaagggcguggacaccguguccgucggcaacacccuguacugcgugaacaagcaggagggccagagccucuacgugaagggggagcccaucaucaacuucuacgacccgcuggucuuccccuccgacgaguucgacgccagcaucucccaggugaacgagaagaucaaccagagccuggccuucauccggaaguccgacgagcuccugcacaacgugaacgucggcaagagcaccacgaacaucaugaucaccaccaucaucaucgugaucaucgugauccugcugcuccugaucgccgucgggcuguuccucuacugcaaggcccgcuccacccccgugacgcugagcaaggaccagcuguccgggaucaacaacaucgcguucagcaacugaggacuaguguccaccugucccuccugggcugcuggauugucucguuuuccugccaaauaaacaggaucagcgcuuuacagaucuaaaaaaaaaaaaaaaaaaaaaaaaaaaaaaaaaaaaaaaaaaaaaaaaaaaaaaaaaaaaaaaaugcaucccccccccccccccccccccccccccccccaaaggcucuuuucagagccaccagaauu

SEQ ID NO: 13990 - RNA, 2057 nt, Artificial Sequence
  mRNA product Design b-1 comprising derived and/or modified sequence from HRSV(Memphis-37)__AIY60640.1__F_DSCav1_mut1 (opt1)
gggagacggagacggccugcaggaccugcucucucagcccucagccgaggccuacgccgagccgagugcgcagccgacgaccgggaggagccgcagccuucaacucugagguacugugauccgcgcugcccgccgggccgccccaguccgcugcugcggcaccuccuucccucgcgcccucuucgcucgccagcgccuucccugugagccugcgucaccgcggccgccaagcuuaccauggagcugcccauccucaagaccaacgccaucaccacgauccuggccgcggugacccugugcuucgccagcucccagaacaucaccgaggaguucuaccagagcacgugcuccgccgucagcaagggcuaccucggggcccugcgcaccggcugguacaccuccgugaucaccaucgagcugagcaacaucaaggagaacaagugcaacgggaccgacgccaaggugaagcucaucaagcaggagcuggacaaguacaagaacgcggucacggagcugcagcuccugaugcaguccaccccggccgccggcagcggguccgccaucugcagcggcaucgcggugugcaaggugcugcaccucgagggcgaggucaacaagaucaagaacgcccugcuguccaccaacaaggccguggugagccucuccaacggggucagcgugcugaccuucaaggugcuggaccucaagaacuacaucgacaagcagcugcugcccauccucaacaagcaguccugcagcauccccaacaucgagacggucaucgaguuccagcagaagaacaaccggcugcuggagaucacccgcgaguucuccgugaacgccggcgugaccacccccgucagcacguacaugcucaccaacuccgagcugcugagccucaucaacgacaugccgaucaccaacgaccagaagaagcugaugagcaacaacgugcagaucgugcggcagcaguccuacagcaucaugugcaucaucaaggaggagguccuggccuacguggugcagcucccccuguacggggucaucgacacccccugcuggaagcugcacacgagcccccucugcaccaccaacaccaaggagggcuccaacaucugccugacgcgcaccgaccgggggugguacugcgacaacgcgggcuccgugagcuucuucccgcaggccgagaccugcaaggugcaguccaaccgcgucuucugcgacaccaugaacagccugacgcuccccuccgaggugaaccugugcaacaucgacaucuucaaccccaaguacgacugcaagaucaugaccagcaagaccgacgucuccagcuccgugaucaccagccugggcgccaucguguccugcuacgggaagacgaagugcaccgccagcaacaagaaccggggcaucaucaagaccuucuccaacgggugcgacuacgucagcaacaagggcguggacaccguguccgucggcaacacgcucuacugcgugaacaagcaggaggggcagagccuguacgugaagggcgagcccaucaucaacuucuacgacccgcuggucuuccccagcgacgaguucgacgccuccaucagccaggugaacgagaagaucaaccagucccucgcguucauccgcaagagcgacgagcugcugcacaacgugaacgucgggaaguccaccaccaacaucaugaucaccaccaucaucaucgugaucaucgugauccuccugcugcucaucgccgucggccuguuccuguacugcaaggcccggagcacgcccgugacccuguccaaggaccagcucagcgggaucaacaacaucgccuucuccaacugaggacuaguguccaccugucccuccugggcugcuggauugucucguuuuccugccaaauaaacaggaucagcgcuuuacagaucuaaaaaaaaaaaaaaaaaaaaaaaaaaaaaaaaaaaaaaaaaaaaaaaaaaaaaaaaaaaaaaaaugcaucccccccccccccccccccccccccccccccaaaggcucuuuucagagccaccagaauu

SEQ ID NO: 13991 - RNA, 2057 nt, Artificial Sequence
  mRNA product Design b-1 comprising derived and/or modified sequence from HRSV(Memphis-37)__AIY60640.1__F_DSCav1_mut1 (opt2)
gggagacggagacggccugcaggaccugcucucucagcccucagccgaggccuacgccgagccgagugcgcagccgacgaccgggaggagccgcagccuucaacucugagguacugugauccgcgcugcccgccgggccgccccaguccgcugcugcggcaccuccuucccucgcgcccucuucgcucgccagcgccuucccugugagccugcgucaccgcggccgccaagcuuaccauggagcuccccauccucaagaccaacgccaucaccaccauccucgccgccgucacccucugcuucgccuccucccagaacaucaccgaggaguucuaccaguccaccugcuccgccgucuccaagggcuaccucggcgcccuccgcaccggcugguacaccuccgucaucaccaucgagcucuccaacaucaaggagaacaagugcaacggcaccgacgccaaggucaagcucaucaagcaggagcucgacaaguacaagaacgccgucaccgagcuccagcuccucaugcaguccacccccgccgccggcuccggcuccgccaucugcuccggcaucgccgucugcaagguccuccaccucgagggcgaggucaacaagaucaagaacgcccuccucuccaccaacaaggccgucgucucccucuccaacggcgucuccguccucaccuucaagguccucgaccucaagaacuacaucgacaagcagcuccuccccauccucaacaagcaguccugcuccauccccaacaucgagaccgucaucgaguuccagcagaagaacaaccgccuccucgagaucacccgcgaguucuccgucaacgccggcgucaccacccccgucuccaccuacaugcucaccaacuccgagcuccucucccucaucaacgacaugcccaucaccaacgaccagaagaagcucauguccaacaacguccagaucguccgccagcaguccuacuccaucaugugcaucaucaaggaggagguccucgccuacgucguccagcucccccucuacggcgucaucgacacccccugcuggaagcuccacaccuccccccucugcaccaccaacaccaaggagggcuccaacaucugccucacccgcaccgaccgcggcugguacugcgacaacgccggcuccgucuccuucuucccccaggccgagaccugcaagguccaguccaaccgcgucuucugcgacaccaugaacucccucacccuccccuccgaggucaaccucugcaacaucgacaucuucaaccccaaguacgacugcaagaucaugaccuccaagaccgacgucuccuccuccgucaucaccucccucggcgccaucgucuccugcuacggcaagaccaagugcaccgccuccaacaagaaccgcggcaucaucaagaccuucuccaacggcugcgacuacgucuccaacaagggcgucgacaccgucuccgucggcaacacccucuacugcgucaacaagcaggagggccagucccucuacgucaagggcgagcccaucaucaacuucuacgacccccucgucuuccccuccgacgaguucgacgccuccaucucccaggucaacgagaagaucaaccagucccucgccuucauccgcaaguccgacgagcuccuccacaacgucaacgucggcaaguccaccaccaacaucaugaucaccaccaucaucaucgucaucaucgucauccuccuccuccucaucgccgucggccucuuccucuacugcaaggcccgcuccacccccgucacccucuccaaggaccagcucuccggcaucaacaacaucgccuucuccaacugaggacuaguguccaccugucccuccugggcugcuggauugucucguuuuccugccaaauaaacaggaucagcgcuuuacagaucuaaaaaaaaaaaaaaaaaaaaaaaaaaaaaaaaaaaaaaaaaaaaaaaaaaaaaaaaaaaaaaaaugcaucccccccccccccccccccccccccccccccaaaggcucuuuucagagccaccagaauu

SEQ ID NO: 13992 - RNA, 2057 nt, Artificial Sequence
  mRNA product Design b-1 comprising derived and/or modified sequence from HRSV(Memphis-37)__AIY60640.1__F_DSCav1_mut1 (opt3)
gggagacggagacggccugcaggaccugcucucucagcccucagccgaggccuacgccgagccgagugcgcagccgacgaccgggaggagccgcagccuucaacucugagguacugugauccgcgcugcccgccgggccgccccaguccgcugcugcggcaccuccuucccucgcgcccucuucgcucgccagcgccuucccugugagccugcgucaccgcggccgccaagcuuaccauggagcugcccauccucaagaccaacgccauuacaacuauacuugcugcagugacgcugugcuucgccagcucccagaauaucaccgaagaguuuuaccaaucuacauguucagcggucaguaaaggcuauuugggggcuuuaagaacuggaugguacaccagcguuauuacaaucgaacuguccaacauuaaggagaauaaaugcaacgguaccgacgccaaggugaaacuaaucaagcaggaacucgauaaguauaaaaaugcaguaacugagcugcagcuucugaugcagucuacuccugccgcuggcucggggucagcaauauguagcggaaucgccgugugcaaggucuugcaccucgagggcgaagugaacaaaauuaagaaugcucugcugaguaccaacaaagccguugugucccucucuaauggugucagcguguuaacguucaagguacuggaccuuaagaacuacaucgauaaacaauugcugccaauucuaaauaagcaguccuguucaaucccgaacauagagacuguuauugaauuucagcagaaaaauaacaggcuccuggagaucacccgggaguucagugugaaugcgggggucacaacucccgugagcaccuauaugcuuacaaacucugaacuguugucccucauuaacgacaugccuaucaccaaugaucaaaagaaacugaugucaaacaaugugcagaucguccgccagcagagcuacaguauuaugugcauaaucaaggaggaaguuuuagcauaugugguacaacugccacucuacggagugauugacacgcccuguuggaaacuucauacuucuccucugugcacaaccaacacuaaggagggcuccaauaucuguuugacacgaaccgaucguggcugguacugcgacaacgccgggagcgucucguuuuucccacaggcugaaacguguaaggugcagucuaauagaguguuuugcgauaccaugaacucccuaacacugcccucagagguuaaucucugcaacauagacauuuucaauccuaaauaugauuguaagaucaugacaaguaaaaccgacgucagcuccucugugaucacaagccugggagccauuguaucaugcuacgguaagacuaaauguaccgcaaguaacaagaauaggggcaucauuaagacauuuuccaacgggugcgauuauguuagcaauaaaggaguggacaccgucucugugggcaacacucuuuacugugucaacaagcaagagggucagucacuguaugugaaaggggaaccaauaaucaauuucuacgacccguugguuuuucccagugaugaguucgacgcuagcauuucccaggugaacgaaaagaucaaucagucucucgccuuuauccggaaaucggaugagcuguuacacaacguaaaugucggaaagagcacgacaaacauuaugauaaccacuaucauuaucgugauuaucguuauacugcuacuccugaucgcggugggccuuuucuuguauugcaaggcccgcuccaccccugucacacugucaaaagaccaacucaguggcauuaauaacaucgcauucucuaauugaggacuaguguccaccugucccuccugggcugcuggauugucucguuuuccugccaaauaaacaggaucagcgcuuuacagaucuaaaaaaaaaaaaaaaaaaaaaaaaaaaaaaaaaaaaaaaaaaaaaaaaaaaaaaaaaaaaaaaaugcaucccccccccccccccccccccccccccccccaaaggcucuuuucagagccaccagaauu

SEQ ID NO: 13993 - RNA, 2057 nt, Artificial Sequence
  mRNA product Design b-1 comprising derived and/or modified sequence from HRSV(Memphis-37)__AIY60640.1__F_DSCav1_mut1 (opt4)
gggagacggagacggccugcaggaccugcucucucagcccucagccgaggccuacgccgagccgagugcgcagccgacgaccgggaggagccgcagccuucaacucugagguacugugauccgcgcugcccgccgggccgccccaguccgcugcugcggcaccuccuucccucgcgcccucuucgcucgccagcgccuucccugugagccugcgucaccgcggccgccaagcuuaccauggagcugcccauccugaagaccaacgccaucaccaccauccuggccgccgugacccugugcuucgccagcagccagaacaucaccgaggaguucuaccagagcaccugcagcgccgugagcaagggcuaccugggcgcccugagaaccggcugguacaccagcgugaucaccaucgagcugagcaacaucaaggagaacaagugcaacggcaccgacgccaaggugaagcugaucaagcaggagcuggacaaguacaagaacgccgugaccgagcugcagcugcugaugcagagcacccccgccgccggcagcggcagcgccaucugcagcggcaucgccgugugcaaggugcugcaccuggagggcgaggugaacaagaucaagaacgcccugcugagcaccaacaaggccguggugagccugagcaacggcgugagcgugcugaccuucaaggugcuggaccugaagaacuacaucgacaagcagcugcugcccauccugaacaagcagagcugcagcauccccaacaucgagaccgugaucgaguuccagcagaagaacaacagacugcuggagaucaccagagaguucagcgugaacgccggcgugaccacccccgugagcaccuacaugcugaccaacagcgagcugcugagccugaucaacgacaugcccaucaccaacgaccagaagaagcugaugagcaacaacgugcagaucgugagacagcagagcuacagcaucaugugcaucaucaaggaggaggugcuggccuacguggugcagcugccccuguacggcgugaucgacacccccugcuggaagcugcacaccagcccccugugcaccaccaacaccaaggagggcagcaacaucugccugaccagaaccgacagaggcugguacugcgacaacgccggcagcgugagcuucuucccccaggccgagaccugcaaggugcagagcaacagaguguucugcgacaccaugaacagccugacccugcccagcgaggugaaccugugcaacaucgacaucuucaaccccaaguacgacugcaagaucaugaccagcaagaccgacgugagcagcagcgugaucaccagccugggcgccaucgugagcugcuacggcaagaccaagugcaccgccagcaacaagaacagaggcaucaucaagaccuucagcaacggcugcgacuacgugagcaacaagggcguggacaccgugagcgugggcaacacccuguacugcgugaacaagcaggagggccagagccuguacgugaagggcgagcccaucaucaacuucuacgacccccugguguuccccagcgacgaguucgacgccagcaucagccaggugaacgagaagaucaaccagagccuggccuucaucagaaagagcgacgagcugcugcacaacgugaacgugggcaagagcaccaccaacaucaugaucaccaccaucaucaucgugaucaucgugauccugcugcugcugaucgccgugggccuguuccuguacugcaaggccagaagcacccccgugacccugagcaaggaccagcugagcggcaucaacaacaucgccuucagcaacugaggacuaguguccaccugucccuccugggcugcuggauugucucguuuuccugccaaauaaacaggaucagcgcuuuacagaucuaaaaaaaaaaaaaaaaaaaaaaaaaaaaaaaaaaaaaaaaaaaaaaaaaaaaaaaaaaaaaaaaugcaucccccccccccccccccccccccccccccccaaaggcucuuuucagagccaccagaauu

SEQ ID NO: 13994 - RNA, 2057 nt, Artificial Sequence
  mRNA product Design b-1 comprising derived and/or modified sequence from HRSV(Memphis-37)__AIY60640.1__F_DSCav1_mut1 (opt5)
gggagacggagacggccugcaggaccugcucucucagcccucagccgaggccuacgccgagccgagugcgcagccgacgaccgggaggagccgcagccuucaacucugagguacugugauccgcgcugcccgccgggccgccccaguccgcugcugcggcaccuccuucccucgcgcccucuucgcucgccagcgccuucccugugagccugcgucaccgcggccgccaagcuuaccauggagcugcccauccucaagaccaacgccauuacaacgauccuggcugccgugacccuuugcuucgcgagcucccagaauauuacagaagaguuuuaccaaucuaccuguagcgcugucuccaaaggcuaucugggggcccucagaacaggaugguacaccucuguuaucacaauugaacugagcaacaucaaggagaauaaaugcaacggcaccgacgccaaggugaaacuuaucaagcaggaacuggauaaguauaaaaaugcugugacggagcuccagcugcugaugcaguccaccccugccgcugggucuggaagcgccauuuguuccggcaucgcggucugcaaggugcuccaccuggagggggaaguuaacaaaauuaagaaugcccuucugagcacaaacaaagcuguggucucucucuccaauggagugagcguucugaccuucaaggugcuugaccugaagaacuacaucgauaaacaacuccugccgauucugaauaagcagucuuguuccauccccaacauugagacagucaucgaauuucagcagaaaaauaaccggcuccuggagaucacccgcgaguucagcgugaaugccggcgugacgacaccugucucuaccuauaugcuuacaaacuccgaacugcucagccugauuaacgacaugcccaucaccaaugaucaaaagaaacuuauguccaacaauguucagauugugagacagcagucuuacagcaucaugugcauuaucaaggaggaagugcuggcuuaugucgugcaacucccucuguacggcguuaucgacacccccuguuggaaacugcauacauccccucucugcacgaccaacacaaaggaggggagcaauauuugucugacccggacagaucgcggaugguacugcgacaacgccggcucuguguccuuuuucccgcaggcggaaaccuguaagguccagagcaauagaguguuuugcgauacgaugaacucucuuacacugcccagcgagguuaaucucugcaacaucgacauuuucaauccuaaauaugauuguaagaucaugaccuccaaaaccgacgugucuagcuccgucauuacaagccugggggccaucgugucuugcuacggaaagaccaaauguacagcuuccaacaagaaucggggcaucauuaagacguuuagcaacgggugcgauuaugucucuaauaaaggaguggacaccguuuccgugggcaacacacuuuacugugucaacaagcaagagggccagagccuguaugugaaaggggaacccaucauuaauuucuacgacccucucguuuuucccuccgaugaguucgacgccucuaucagccaggugaacgaaaagauuaaucagucccuggcuuuuauccgcaaaucugaugagcugcuccacaacgucaaugugggaaagagcaccacaaacauuaugaucaccacgaucauuaucgugauuaucguuauucugcuucugcucaucgccgucggccuguuccuguauugcaaggccagauccaccccggugacacuuagcaaagaccaacucucugggaucaauaacauugcuuucuccaauugaggacuaguguccaccugucccuccugggcugcuggauugucucguuuuccugccaaauaaacaggaucagcgcuuuacagaucuaaaaaaaaaaaaaaaaaaaaaaaaaaaaaaaaaaaaaaaaaaaaaaaaaaaaaaaaaaaaaaaaugcaucccccccccccccccccccccccccccccccaaaggcucuuuucagagccaccagaauu

SEQ ID NO: 13995 - RNA, 2057 nt, Artificial Sequence
  mRNA product Design b-1 comprising derived and/or modified sequence from HRSV(Memphis-37)__AIY60640.1__F_DSCav1_mut1 (opt6)
gggagacggagacggccugcaggaccugcucucucagcccucagccgaggccuacgccgagccgagugcgcagccgacgaccgggaggagccgcagccuucaacucugagguacugugauccgcgcugcccgccgggccgccccaguccgcugcugcggcaccuccuucccucgcgcccucuucgcucgccagcgccuucccugugagccugcgucaccgcggccgccaagcuuaccauggaacuuccaauucuaaaaaccaaugcuauaacaacaauauuagcagcaguuacauuaugcuucgccucaucacaaaauaucacagaagaauuuuaccaauccacaugcucagcaguaucuaaaggguaccuaggagcccuacgaacaggaugguacacaucaguaauaacaauagaacucucaaacaucaaagaaaacaaaugcaauggaacagacgcuaaaguaaaauuaauaaaacaagaacuagacaaauacaaaaacgccgucaccgaacuucaguuacucaugcaaagcacaccugcagcaggaucagguucagcaauaugcucaggaauagcaguuugcaaaguauuacaccuagaaggugaagucaacaaaauaaaaaacgcacuucuaaguacuaacaaagcuguaguaucauuaucaaacggaguauccguacuaaccuuuaaaguccuagaccuaaaaaacuacauagacaaacaacuacucccaauacucaauaaacaauccugcucaauucccaacaucgaaacaguaauagaauuucaacaaaaaaacaaucgccuucuagaaauaacaagagaauuuucagucaacgccggaguaacaacaccaguaucaacauauaugcuaacaaacagugaacuauuauccuuaauaaacgacaugccaauaacaaaugaccaaaaaaaacuaauguccaauaauguccaaauaguaagacaacaaagcuauucaauuauguguauaauaaaagaagaaguauuagcauacguaguucaacuaccacuauauggcguuauagacacaccaugcuggaaauuacacacaagcccacuaugcacaacaaauacaaaagaaggauccaacauuugcuuaacuagaacugacagaggaugguacugcgacaacgcuggaucagucucuuucuucccacaagcagaaaccuguaaaguacaaucaaauagagucuucugcgacacaaugaacucacuaacucucccaucugaaguaaacuuaugcaacaucgauauauuuaacccaaaauacgauuguaaaauaaugacauccaaaacagacguuucaucaagcguaaucaccucccucggagcaaucguaagcugcuacgguaaaacaaaaugcacagcauccaacaaaaacagaggcaucauaaaaacauucucaaacggaugugacuauguaucaaacaaaggaguagacacaguuucaguaggcaauaccuuauacugugucaauaaacaagaaggacaaucacuauauguaaaaggagaaccuauaauaaacuucuacgacccccucgucuucccuagcgaugaauuugacgcaucaauaucgcaaguaaacgaaaaaauaaaccaaucauuagccuuuauaagaaaaucagacgaauuauuacacaacguaaacguggggaaaagcacaacuaacaucaugauaacaacuaucauaauuguaaucaucgucauccuauuacuccuaaucgcaguaggacuauuccuauacugcaaagcuagaucaacaccagucacccuaucgaaagaucaauugucaggaauaaacaauauagccuuuucaaauuaaggacuaguguccaccugucccuccugggcugcuggauugucucguuuuccugccaaauaaacaggaucagcgcuuuacagaucuaaaaaaaaaaaaaaaaaaaaaaaaaaaaaaaaaaaaaaaaaaaaaaaaaaaaaaaaaaaaaaaaugcaucccccccccccccccccccccccccccccccaaaggcucuuuucagagccaccagaauu

SEQ ID NO: 13996 - RNA, 2057 nt, Artificial Sequence
  mRNA product Design b-1 comprising derived and/or modified sequence from HRSV(Memphis-37)__AIY60640.1__F_DSCav1_mut1 (opt11)
gggagacggagacggccugcaggaccugcucucucagcccucagccgaggccuacgccgagccgagugcgcagccgacgaccgggaggagccgcagccuucaacucugagguacugugauccgcgcugcccgccgggccgccccaguccgcugcugcggcaccuccuucccucgcgcccucuucgcucgccagcgccuucccugugagccugcgucaccgcggccgccaagcuuaccauggaacuccccauccucaaaacgaacgccaucacaaccauccucgccgccgucacccucugcuucgcgucaucccaaaacauaacugaagaguucuaucaaucaaccugcuccgcagucucaaaaggcuaccucggcgcccuacggaccggcugguacacaagcgucaucacaauagaacuuuccaacaucaaagaaaacaaauguaacggcaccgacgcaaaagucaaacucauaaaacaagaacuagacaaauauaaaaacgccguaacugaacuacaacuccucaugcaaucaacuccugcagccgguagcggcuccgcaaucugcucaggcaucgcagucugcaaagucuuacaccuagaaggcgaagucaacaaaaucaagaacgcccuacuauccacaaacaaagcaguagucucucuauccaacggagucuccguccucacauucaaaguacucgaccuaaagaacuacaucgacaaacaacuacuaccaaucuuaaacaaacaauccugcucaaucccuaacauugaaaccgucauagaguuccaacagaaaaacaaccgccuccucgaaauaaccagagaguucucagucaacgccggcgucaccaccccggucucaaccuacaugcuaaccaacucugaacuucucagccuaaucaacgacaugcccauuaccaacgaccaaaagaaacucauguccaauaacguccaaaucguucgacaacaauccuacucaaucaugugcaucauaaaagaagaaguccuagcauacgucguccaacucccacuauacggcguaaucgacacccccugcuggaaacuccacaccuccccucucuguaccaccaacaccaaagaaggguccaacaucugccucacgcgcaccgaccgaggcugguauugcgacaaugcaggcucugucuccuucuucccccaagccgaaaccugcaaaguccaaucuaaccgcgucuucugcgacaccaugaacagucuuacccucccgucagaagucaaccucugcaacauagauaucuucaacccaaaauacgacugcaaaaucaugaccucaaaaaccgacguuuccucauccguuaucaccucccucggcgcaaucgucagcugcuacggcaagacaaagugcacggcuucaaacaaaaaccgcggaaucaucaagacauucagcaacggcugcgacuacguauccaacaaaggaguggacacagucuccguuggaaacacccucuacugcguaaacaaacaagaaggccaaucacucuacgucaaaggcgaacccaucaucaacuucuacgacccacucgucuuccccuccgacgaguucgacgccucaaucagccaagucaacgagaaaauuaaccagucacucgccuucauacgcaaauccgacgaacuucuacacaacguaaacgucggaaaaucaaccacaaacaucaugauuaccacaauuaucauagucaucauaguaauccuccugcuacucauagcagucggacucuuccuauacugcaaagcccgcuccaccccugucacccuauccaaagaccaacuuuccggcaucaacaacauagccuuuuccaacuaaggacuaguguccaccugucccuccugggcugcuggauugucucguuuuccugccaaauaaacaggaucagcgcuuuacagaucuaaaaaaaaaaaaaaaaaaaaaaaaaaaaaaaaaaaaaaaaaaaaaaaaaaaaaaaaaaaaaaaaugcaucccccccccccccccccccccccccccccccaaaggcucuuuucagagccaccagaauu

SEQ ID NO: 13997 - RNA, 1877 nt, Artificial Sequence
  mRNA product Design b-2 comprising derived and/or modified sequence from HRSV(Memphis-37)__AIY60640.1__F_DSCav1_mut1 (opt1)
gggagagccucugcuggaguccggggaguggcguuggcugcuagagcgaagcuuaccauggagcugcccauccucaagaccaacgccaucaccacgauccuggccgcggugacccugugcuucgccagcucccagaacaucaccgaggaguucuaccagagcacgugcuccgccgucagcaagggcuaccucggcgcccugcgcaccgggugguacaccagcgugaucaccaucgagcuguccaacaucaaggagaacaagugcaacggcaccgacgccaaggugaagcucaucaagcaggagcuggacaaguacaagaacgcggucacggagcugcagcuccugaugcagagcaccccggccgccggcuccgggagcgcgaucugcuccggcaucgccgucugcaaggugcugcaccucgagggcgaggugaacaagaucaagaacgcccugcuguccaccaacaaggccgucgugagccucuccaacggggugagcguccugaccuucaaggugcuggaccucaagaacuacaucgacaagcagcugcugcccauccugaacaagcagagcugcuccauccccaacaucgagaccgucaucgaguuccagcagaagaacaaccgccuccuggagaucacgcgggaguucagcgugaacgcgggcgugaccacccccgucuccaccuacaugcugacgaacagcgagcuccugucccugaucaacgacaugccgaucaccaacgaccagaagaagcucaugagcaacaacgugcagaucgugcgccagcaguccuacagcaucaugugcaucaucaaggaggagguccuggccuacguggugcagcugccccucuacggggucaucgacacccccugcuggaagcugcacaccagcccccugugcacgaccaacaccaaggagggcuccaacaucugccucacccggacggaccgcgggugguacugcgacaacgccggcagcguguccuucuucccgcaggccgagaccugcaagguccagagcaaccggguguucugcgacaccaugaacucccugacccugcccagcgaggugaaccucugcaacaucgacaucuucaaccccaaguacgacugcaagaucaugacguccaagaccgacgucagcuccagcgugaucaccucccugggcgccaucgugagcugcuacgggaagaccaagugcacggcgagcaacaagaaccgcggcaucaucaagaccuucuccaacgggugcgacuacgucagcaacaagggcguggacaccguguccgucggcaacacccuguacugcgugaacaagcaggagggccagagccucuacgugaagggggagcccaucaucaacuucuacgacccgcuggucuuccccuccgacgaguucgacgccagcaucucccaggugaacgagaagaucaaccagagccuggccuucauccggaaguccgacgagcuccugcacaacgugaacgucggcaagagcaccacgaacaucaugaucaccaccaucaucaucgugaucaucgugauccugcugcuccugaucgccgucgggcuguuccucuacugcaaggcccgcuccacccccgugacgcugagcaaggaccagcuguccgggaucaacaacaucgcguucagcaacugaggacuaguguccaccugucccuccugggcugcuggauugucucguuuuccugccaaauaaacaggaucagcgcuuuacagaucuaaaaaaaaaaaaaaaaaaaaaaaaaaaaaaaaaaaaaaaaaaaaaaaaaaaaaaaaaaaaaaaaugcaucccccccccccccccccccccccccccccccaaaggcucuuuucagagccaccagaauu

SEQ ID NO: 13998 - RNA, 1877 nt, Artificial Sequence
  mRNA product Design b-2 comprising derived and/or modified sequence from HRSV(Memphis-37)__AIY60640.1__F_DSCav1_mut1 (opt1)
gggagagccucugcuggaguccggggaguggcguuggcugcuagagcgaagcuuaccauggagcugcccauccucaagaccaacgccaucaccacgauccuggccgcggugacccugugcuucgccagcucccagaacaucaccgaggaguucuaccagagcacgugcuccgccgucagcaagggcuaccucggggcccugcgcaccggcugguacaccuccgugaucaccaucgagcugagcaacaucaaggagaacaagugcaacgggaccgacgccaaggugaagcucaucaagcaggagcuggacaaguacaagaacgcggucacggagcugcagcuccugaugcaguccaccccggccgccggcagcggguccgccaucugcagcggcaucgcggugugcaaggugcugcaccucgagggcgaggucaacaagaucaagaacgcccugcuguccaccaacaaggccguggugagccucuccaacggggucagcgugcugaccuucaaggugcuggaccucaagaacuacaucgacaagcagcugcugcccauccucaacaagcaguccugcagcauccccaacaucgagacggucaucgaguuccagcagaagaacaaccggcugcuggagaucacccgcgaguucuccgugaacgccggcgugaccacccccgucagcacguacaugcucaccaacuccgagcugcugagccucaucaacgacaugccgaucaccaacgaccagaagaagcugaugagcaacaacgugcagaucgugcggcagcaguccuacagcaucaugugcaucaucaaggaggagguccuggccuacguggugcagcucccccuguacggggucaucgacacccccugcuggaagcugcacacgagcccccucugcaccaccaacaccaaggagggcuccaacaucugccugacgcgcaccgaccgggggugguacugcgacaacgcgggcuccgugagcuucuucccgcaggccgagaccugcaaggugcaguccaaccgcgucuucugcgacaccaugaacagccugacgcuccccuccgaggugaaccugugcaacaucgacaucuucaaccccaaguacgacugcaagaucaugaccagcaagaccgacgucuccagcuccgugaucaccagccugggcgccaucguguccugcuacgggaagacgaagugcaccgccagcaacaagaaccggggcaucaucaagaccuucuccaacgggugcgacuacgucagcaacaagggcguggacaccguguccgucggcaacacgcucuacugcgugaacaagcaggaggggcagagccuguacgugaagggcgagcccaucaucaacuucuacgacccgcuggucuuccccagcgacgaguucgacgccuccaucagccaggugaacgagaagaucaaccagucccucgcguucauccgcaagagcgacgagcugcugcacaacgugaacgucgggaaguccaccaccaacaucaugaucaccaccaucaucaucgugaucaucgugauccuccugcugcucaucgccgucggccuguuccuguacugcaaggcccggagcacgcccgugacccuguccaaggaccagcucagcgggaucaacaacaucgccuucuccaacugaggacuaguguccaccugucccuccugggcugcuggauugucucguuuuccugccaaauaaacaggaucagcgcuuuacagaucuaaaaaaaaaaaaaaaaaaaaaaaaaaaaaaaaaaaaaaaaaaaaaaaaaaaaaaaaaaaaaaaaugcaucccccccccccccccccccccccccccccccaaaggcucuuuucagagccaccagaauu

SEQ ID NO: 13999 - RNA, 1877 nt, Artificial Sequence
  mRNA product Design b-2 comprising derived and/or modified sequence from HRSV(Memphis-37)__AIY60640.1__F_DSCav1_mut1 (opt2)
gggagagccucugcuggaguccggggaguggcguuggcugcuagagcgaagcuuaccauggagcuccccauccucaagaccaacgccaucaccaccauccucgccgccgucacccucugcuucgccuccucccagaacaucaccgaggaguucuaccaguccaccugcuccgccgucuccaagggcuaccucggcgcccuccgcaccggcugguacaccuccgucaucaccaucgagcucuccaacaucaaggagaacaagugcaacggcaccgacgccaaggucaagcucaucaagcaggagcucgacaaguacaagaacgccgucaccgagcuccagcuccucaugcaguccacccccgccgccggcuccggcuccgccaucugcuccggcaucgccgucugcaagguccuccaccucgagggcgaggucaacaagaucaagaacgcccuccucuccaccaacaaggccgucgucucccucuccaacggcgucuccguccucaccuucaagguccucgaccucaagaacuacaucgacaagcagcuccuccccauccucaacaagcaguccugcuccauccccaacaucgagaccgucaucgaguuccagcagaagaacaaccgccuccucgagaucacccgcgaguucuccgucaacgccggcgucaccacccccgucuccaccuacaugcucaccaacuccgagcuccucucccucaucaacgacaugcccaucaccaacgaccagaagaagcucauguccaacaacguccagaucguccgccagcaguccuacuccaucaugugcaucaucaaggaggagguccucgccuacgucguccagcucccccucuacggcgucaucgacacccccugcuggaagcuccacaccuccccccucugcaccaccaacaccaaggagggcuccaacaucugccucacccgcaccgaccgcggcugguacugcgacaacgccggcuccgucuccuucuucccccaggccgagaccugcaagguccaguccaaccgcgucuucugcgacaccaugaacucccucacccuccccuccgaggucaaccucugcaacaucgacaucuucaaccccaaguacgacugcaagaucaugaccuccaagaccgacgucuccuccuccgucaucaccucccucggcgccaucgucuccugcuacggcaagaccaagugcaccgccuccaacaagaaccgcggcaucaucaagaccuucuccaacggcugcgacuacgucuccaacaagggcgucgacaccgucuccgucggcaacacccucuacugcgucaacaagcaggagggccagucccucuacgucaagggcgagcccaucaucaacuucuacgacccccucgucuuccccuccgacgaguucgacgccuccaucucccaggucaacgagaagaucaaccagucccucgccuucauccgcaaguccgacgagcuccuccacaacgucaacgucggcaaguccaccaccaacaucaugaucaccaccaucaucaucgucaucaucgucauccuccuccuccucaucgccgucggccucuuccucuacugcaaggcccgcuccacccccgucacccucuccaaggaccagcucuccggcaucaacaacaucgccuucuccaacugaggacuaguguccaccugucccuccugggcugcuggauugucucguuuuccugccaaauaaacaggaucagcgcuuuacagaucuaaaaaaaaaaaaaaaaaaaaaaaaaaaaaaaaaaaaaaaaaaaaaaaaaaaaaaaaaaaaaaaaugcaucccccccccccccccccccccccccccccccaaaggcucuuuucagagccaccagaauu

SEQ ID NO: 14000 - RNA, 1877 nt, Artificial Sequence
  mRNA product Design b-2 comprising derived and/or modified sequence from HRSV(Memphis-37)__AIY60640.1__F_DSCav1_mut1 (opt3)
gggagagccucugcuggaguccggggaguggcguuggcugcuagagcgaagcuuaccauggagcugcccauccucaagaccaacgccauuacaacuauacuugcugcagugacgcugugcuucgccagcucccagaauaucaccgaagaguuuuaccaaucuacauguucagcggucaguaaaggcuauuugggggcuuuaagaacuggaugguacaccagcguuauuacaaucgaacuguccaacauuaaggagaauaaaugcaacgguaccgacgccaaggugaaacuaaucaagcaggaacucgauaaguauaaaaaugcaguaacugagcugcagcuucugaugcagucuacuccugccgcuggcucggggucagcaauauguagcggaaucgccgugugcaaggucuugcaccucgagggcgaagugaacaaaauuaagaaugcucugcugaguaccaacaaagccguugugucccucucuaauggugucagcguguuaacguucaagguacuggaccuuaagaacuacaucgauaaacaauugcugccaauucuaaauaagcaguccuguucaaucccgaacauagagacuguuauugaauuucagcagaaaaauaacaggcuccuggagaucacccgggaguucagugugaaugcgggggucacaacucccgugagcaccuauaugcuuacaaacucugaacuguugucccucauuaacgacaugccuaucaccaaugaucaaaagaaacugaugucaaacaaugugcagaucguccgccagcagagcuacaguauuaugugcauaaucaaggaggaaguuuuagcauaugugguacaacugccacucuacggagugauugacacgcccuguuggaaacuucauacuucuccucugugcacaaccaacacuaaggagggcuccaauaucuguuugacacgaaccgaucguggcugguacugcgacaacgccgggagcgucucguuuuucccacaggcugaaacguguaaggugcagucuaauagaguguuuugcgauaccaugaacucccuaacacugcccucagagguuaaucucugcaacauagacauuuucaauccuaaauaugauuguaagaucaugacaaguaaaaccgacgucagcuccucugugaucacaagccugggagccauuguaucaugcuacgguaagacuaaauguaccgcaaguaacaagaauaggggcaucauuaagacauuuuccaacgggugcgauuauguuagcaauaaaggaguggacaccgucucugugggcaacacucuuuacugugucaacaagcaagagggucagucacuguaugugaaaggggaaccaauaaucaauuucuacgacccguugguuuuucccagugaugaguucgacgcuagcauuucccaggugaacgaaaagaucaaucagucucucgccuuuauccggaaaucggaugagcuguuacacaacguaaaugucggaaagagcacgacaaacauuaugauaaccacuaucauuaucgugauuaucguuauacugcuacuccugaucgcggugggccuuuucuuguauugcaaggcccgcuccaccccugucacacugucaaaagaccaacucaguggcauuaauaacaucgcauucucuaauugaggacuaguguccaccugucccuccugggcugcuggauugucucguuuuccugccaaauaaacaggaucagcgcuuuacagaucuaaaaaaaaaaaaaaaaaaaaaaaaaaaaaaaaaaaaaaaaaaaaaaaaaaaaaaaaaaaaaaaaugcaucccccccccccccccccccccccccccccccaaaggcucuuuucagagccaccagaauu

SEQ ID NO: 14001 - RNA, 1877 nt, Artificial Sequence
  mRNA product Design b-2 comprising derived and/or modified sequence from HRSV(Memphis-37)__AIY60640.1__F_DSCav1_mut1 (opt4)
gggagagccucugcuggaguccggggaguggcguuggcugcuagagcgaagcuuaccauggagcugcccauccugaagaccaacgccaucaccaccauccuggccgccgugacccugugcuucgccagcagccagaacaucaccgaggaguucuaccagagcaccugcagcgccgugagcaagggcuaccugggcgcccugagaaccggcugguacaccagcgugaucaccaucgagcugagcaacaucaaggagaacaagugcaacggcaccgacgccaaggugaagcugaucaagcaggagcuggacaaguacaagaacgccgugaccgagcugcagcugcugaugcagagcacccccgccgccggcagcggcagcgccaucugcagcggcaucgccgugugcaaggugcugcaccuggagggcgaggugaacaagaucaagaacgcccugcugagcaccaacaaggccguggugagccugagcaacggcgugagcgugcugaccuucaaggugcuggaccugaagaacuacaucgacaagcagcugcugcccauccugaacaagcagagcugcagcauccccaacaucgagaccgugaucgaguuccagcagaagaacaacagacugcuggagaucaccagagaguucagcgugaacgccggcgugaccacccccgugagcaccuacaugcugaccaacagcgagcugcugagccugaucaacgacaugcccaucaccaacgaccagaagaagcugaugagcaacaacgugcagaucgugagacagcagagcuacagcaucaugugcaucaucaaggaggaggugcuggccuacguggugcagcugccccuguacggcgugaucgacacccccugcuggaagcugcacaccagcccccugugcaccaccaacaccaaggagggcagcaacaucugccugaccagaaccgacagaggcugguacugcgacaacgccggcagcgugagcuucuucccccaggccgagaccugcaaggugcagagcaacagaguguucugcgacaccaugaacagccugacccugcccagcgaggugaaccugugcaacaucgacaucuucaaccccaaguacgacugcaagaucaugaccagcaagaccgacgugagcagcagcgugaucaccagccugggcgccaucgugagcugcuacggcaagaccaagugcaccgccagcaacaagaacagaggcaucaucaagaccuucagcaacggcugcgacuacgugagcaacaagggcguggacaccgugagcgugggcaacacccuguacugcgugaacaagcaggagggccagagccuguacgugaagggcgagcccaucaucaacuucuacgacccccugguguuccccagcgacgaguucgacgccagcaucagccaggugaacgagaagaucaaccagagccuggccuucaucagaaagagcgacgagcugcugcacaacgugaacgugggcaagagcaccaccaacaucaugaucaccaccaucaucaucgugaucaucgugauccugcugcugcugaucgccgugggccuguuccuguacugcaaggccagaagcacccccgugacccugagcaaggaccagcugagcggcaucaacaacaucgccuucagcaacugaggacuaguguccaccugucccuccugggcugcuggauugucucguuuuccugccaaauaaacaggaucagcgcuuuacagaucuaaaaaaaaaaaaaaaaaaaaaaaaaaaaaaaaaaaaaaaaaaaaaaaaaaaaaaaaaaaaaaaaugcaucccccccccccccccccccccccccccccccaaaggcucuuuucagagccaccagaauu

SEQ ID NO: 14002 - RNA, 1877 nt, Artificial Sequence
  mRNA product Design b-2 comprising derived and/or modified sequence from HRSV(Memphis-37)__AIY60640.1__F_DSCav1_mut1 (opt5)
gggagagccucugcuggaguccggggaguggcguuggcugcuagagcgaagcuuaccauggagcugcccauccucaagaccaacgccauuacaacgauccuggcugccgugacccuuugcuucgcgagcucccagaauauuacagaagaguuuuaccaaucuaccuguagcgcugucuccaaaggcuaucugggggcccucagaacaggaugguacaccucuguuaucacaauugaacugagcaacaucaaggagaauaaaugcaacggcaccgacgccaaggugaaacuuaucaagcaggaacuggauaaguauaaaaaugcugugacggagcuccagcugcugaugcaguccaccccugccgcugggucuggaagcgccauuuguuccggcaucgcggucugcaaggugcuccaccuggagggggaaguuaacaaaauuaagaaugcccuucugagcacaaacaaagcuguggucucucucuccaauggagugagcguucugaccuucaaggugcuugaccugaagaacuacaucgauaaacaacuccugccgauucugaauaagcagucuuguuccauccccaacauugagacagucaucgaauuucagcagaaaaauaaccggcuccuggagaucacccgcgaguucagcgugaaugccggcgugacgacaccugucucuaccuauaugcuuacaaacuccgaacugcucagccugauuaacgacaugcccaucaccaaugaucaaaagaaacuuauguccaacaauguucagauugugagacagcagucuuacagcaucaugugcauuaucaaggaggaagugcuggcuuaugucgugcaacucccucuguacggcguuaucgacacccccuguuggaaacugcauacauccccucucugcacgaccaacacaaaggaggggagcaauauuugucugacccggacagaucgcggaugguacugcgacaacgccggcucuguguccuuuuucccgcaggcggaaaccuguaagguccagagcaauagaguguuuugcgauacgaugaacucucuuacacugcccagcgagguuaaucucugcaacaucgacauuuucaauccuaaauaugauuguaagaucaugaccuccaaaaccgacgugucuagcuccgucauuacaagccugggggccaucgugucuugcuacggaaagaccaaauguacagcuuccaacaagaaucggggcaucauuaagacguuuagcaacgggugcgauuaugucucuaauaaaggaguggacaccguuuccgugggcaacacacuuuacugugucaacaagcaagagggccagagccuguaugugaaaggggaacccaucauuaauuucuacgacccucucguuuuucccuccgaugaguucgacgccucuaucagccaggugaacgaaaagauuaaucagucccuggcuuuuauccgcaaaucugaugagcugcuccacaacgucaaugugggaaagagcaccacaaacauuaugaucaccacgaucauuaucgugauuaucguuauucugcuucugcucaucgccgucggccuguuccuguauugcaaggccagauccaccccggugacacuuagcaaagaccaacucucugggaucaauaacauugcuuucuccaauugaggacuaguguccaccugucccuccugggcugcuggauugucucguuuuccugccaaauaaacaggaucagcgcuuuacagaucuaaaaaaaaaaaaaaaaaaaaaaaaaaaaaaaaaaaaaaaaaaaaaaaaaaaaaaaaaaaaaaaaugcaucccccccccccccccccccccccccccccccaaaggcucuuuucagagccaccagaauu

SEQ ID NO: 14003 - RNA, 1877 nt, Artificial Sequence
  mRNA product Design b-2 comprising derived and/or modified sequence from HRSV(Memphis-37)__AIY60640.1__F_DSCav1_mut1 (opt6)
gggagagccucugcuggaguccggggaguggcguuggcugcuagagcgaagcuuaccauggaacuuccaauucuaaaaaccaaugcuauaacaacaauauuagcagcaguuacauuaugcuucgccucaucacaaaauaucacagaagaauuuuaccaauccacaugcucagcaguaucuaaaggguaccuaggagcccuacgaacaggaugguacacaucaguaauaacaauagaacucucaaacaucaaagaaaacaaaugcaauggaacagacgcuaaaguaaaauuaauaaaacaagaacuagacaaauacaaaaacgccgucaccgaacuucaguuacucaugcaaagcacaccugcagcaggaucagguucagcaauaugcucaggaauagcaguuugcaaaguauuacaccuagaaggugaagucaacaaaauaaaaaacgcacuucuaaguacuaacaaagcuguaguaucauuaucaaacggaguauccguacuaaccuuuaaaguccuagaccuaaaaaacuacauagacaaacaacuacucccaauacucaauaaacaauccugcucaauucccaacaucgaaacaguaauagaauuucaacaaaaaaacaaucgccuucuagaaauaacaagagaauuuucagucaacgccggaguaacaacaccaguaucaacauauaugcuaacaaacagugaacuauuauccuuaauaaacgacaugccaauaacaaaugaccaaaaaaaacuaauguccaauaauguccaaauaguaagacaacaaagcuauucaauuauguguauaauaaaagaagaaguauuagcauacguaguucaacuaccacuauauggcguuauagacacaccaugcuggaaauuacacacaagcccacuaugcacaacaaauacaaaagaaggauccaacauuugcuuaacuagaacugacagaggaugguacugcgacaacgcuggaucagucucuuucuucccacaagcagaaaccuguaaaguacaaucaaauagagucuucugcgacacaaugaacucacuaacucucccaucugaaguaaacuuaugcaacaucgauauauuuaacccaaaauacgauuguaaaauaaugacauccaaaacagacguuucaucaagcguaaucaccucccucggagcaaucguaagcugcuacgguaaaacaaaaugcacagcauccaacaaaaacagaggcaucauaaaaacauucucaaacggaugugacuauguaucaaacaaaggaguagacacaguuucaguaggcaauaccuuauacugugucaauaaacaagaaggacaaucacuauauguaaaaggagaaccuauaauaaacuucuacgacccccucgucuucccuagcgaugaauuugacgcaucaauaucgcaaguaaacgaaaaaauaaaccaaucauuagccuuuauaagaaaaucagacgaauuauuacacaacguaaacguggggaaaagcacaacuaacaucaugauaacaacuaucauaauuguaaucaucgucauccuauuacuccuaaucgcaguaggacuauuccuauacugcaaagcuagaucaacaccagucacccuaucgaaagaucaauugucaggaauaaacaauauagccuuuucaaauuaaggacuaguguccaccugucccuccugggcugcuggauugucucguuuuccugccaaauaaacaggaucagcgcuuuacagaucuaaaaaaaaaaaaaaaaaaaaaaaaaaaaaaaaaaaaaaaaaaaaaaaaaaaaaaaaaaaaaaaaugcaucccccccccccccccccccccccccccccccaaaggcucuuuucagagccaccagaauu

SEQ ID NO: 14004 - RNA, 1877 nt, Artificial Sequence
  mRNA product Design b-2 comprising derived and/or modified sequence from HRSV(Memphis-37)__AIY60640.1__F_DSCav1_mut1 (opt11)
gggagagccucugcuggaguccggggaguggcguuggcugcuagagcgaagcuuaccauggaacuccccauccucaaaacgaacgccaucacaaccauccucgccgccgucacccucugcuucgcgucaucccaaaacauaacugaagaguucuaucaaucaaccugcuccgcagucucaaaaggcuaccucggcgcccuacggaccggcugguacacaagcgucaucacaauagaacuuuccaacaucaaagaaaacaaauguaacggcaccgacgcaaaagucaaacucauaaaacaagaacuagacaaauauaaaaacgccguaacugaacuacaacuccucaugcaaucaacuccugcagccgguagcggcuccgcaaucugcucaggcaucgcagucugcaaagucuuacaccuagaaggcgaagucaacaaaaucaagaacgcccuacuauccacaaacaaagcaguagucucucuauccaacggagucuccguccucacauucaaaguacucgaccuaaagaacuacaucgacaaacaacuacuaccaaucuuaaacaaacaauccugcucaaucccuaacauugaaaccgucauagaguuccaacagaaaaacaaccgccuccucgaaauaaccagagaguucucagucaacgccggcgucaccaccccggucucaaccuacaugcuaaccaacucugaacuucucagccuaaucaacgacaugcccauuaccaacgaccaaaagaaacucauguccaauaacguccaaaucguucgacaacaauccuacucaaucaugugcaucauaaaagaagaaguccuagcauacgucguccaacucccacuauacggcguaaucgacacccccugcuggaaacuccacaccuccccucucuguaccaccaacaccaaagaaggguccaacaucugccucacgcgcaccgaccgaggcugguauugcgacaaugcaggcucugucuccuucuucccccaagccgaaaccugcaaaguccaaucuaaccgcgucuucugcgacaccaugaacagucuuacccucccgucagaagucaaccucugcaacauagauaucuucaacccaaaauacgacugcaaaaucaugaccucaaaaaccgacguuuccucauccguuaucaccucccucggcgcaaucgucagcugcuacggcaagacaaagugcacggcuucaaacaaaaaccgcggaaucaucaagacauucagcaacggcugcgacuacguauccaacaaaggaguggacacagucuccguuggaaacacccucuacugcguaaacaaacaagaaggccaaucacucuacgucaaaggcgaacccaucaucaacuucuacgacccacucgucuuccccuccgacgaguucgacgccucaaucagccaagucaacgagaaaauuaaccagucacucgccuucauacgcaaauccgacgaacuucuacacaacguaaacgucggaaaaucaaccacaaacaucaugauuaccacaauuaucauagucaucauaguaauccuccugcuacucauagcagucggacucuuccuauacugcaaagcccgcuccaccccugucacccuauccaaagaccaacuuuccggcaucaacaacauagccuuuuccaacuaaggacuaguguccaccugucccuccugggcugcuggauugucucguuuuccugccaaauaaacaggaucagcgcuuuacagaucuaaaaaaaaaaaaaaaaaaaaaaaaaaaaaaaaaaaaaaaaaaaaaaaaaaaaaaaaaaaaaaaaugcaucccccccccccccccccccccccccccccccaaaggcucuuuucagagccaccagaauu

SEQ ID NO: 14005 - RNA, 1897 nt, Artificial Sequence
  mRNA product Design b-3 comprising derived and/or modified sequence from HRSV(Memphis-37)__AIY60640.1__F_DSCav1_mut1 (opt1)
gggagagucccgcagucggcguccagcggcucugcuuguucgugugugugucguugcaggccuuauucaagcuuaccauggagcugcccauccucaagaccaacgccaucaccacgauccuggccgcggugacccugugcuucgccagcucccagaacaucaccgaggaguucuaccagagcacgugcuccgccgucagcaagggcuaccucggcgcccugcgcaccgggugguacaccagcgugaucaccaucgagcuguccaacaucaaggagaacaagugcaacggcaccgacgccaaggugaagcucaucaagcaggagcuggacaaguacaagaacgcggucacggagcugcagcuccugaugcagagcaccccggccgccggcuccgggagcgcgaucugcuccggcaucgccgucugcaaggugcugcaccucgagggcgaggugaacaagaucaagaacgcccugcuguccaccaacaaggccgucgugagccucuccaacggggugagcguccugaccuucaaggugcuggaccucaagaacuacaucgacaagcagcugcugcccauccugaacaagcagagcugcuccauccccaacaucgagaccgucaucgaguuccagcagaagaacaaccgccuccuggagaucacgcgggaguucagcgugaacgcgggcgugaccacccccgucuccaccuacaugcugacgaacagcgagcuccugucccugaucaacgacaugccgaucaccaacgaccagaagaagcucaugagcaacaacgugcagaucgugcgccagcaguccuacagcaucaugugcaucaucaaggaggagguccuggccuacguggugcagcugccccucuacggggucaucgacacccccugcuggaagcugcacaccagcccccugugcacgaccaacaccaaggagggcuccaacaucugccucacccggacggaccgcgggugguacugcgacaacgccggcagcguguccuucuucccgcaggccgagaccugcaagguccagagcaaccggguguucugcgacaccaugaacucccugacccugcccagcgaggugaaccucugcaacaucgacaucuucaaccccaaguacgacugcaagaucaugacguccaagaccgacgucagcuccagcgugaucaccucccugggcgccaucgugagcugcuacgggaagaccaagugcacggcgagcaacaagaaccgcggcaucaucaagaccuucuccaacgggugcgacuacgucagcaacaagggcguggacaccguguccgucggcaacacccuguacugcgugaacaagcaggagggccagagccucuacgugaagggggagcccaucaucaacuucuacgacccgcuggucuuccccuccgacgaguucgacgccagcaucucccaggugaacgagaagaucaaccagagccuggccuucauccggaaguccgacgagcuccugcacaacgugaacgucggcaagagcaccacgaacaucaugaucaccaccaucaucaucgugaucaucgugauccugcugcuccugaucgccgucgggcuguuccucuacugcaaggcccgcuccacccccgugacgcugagcaaggaccagcuguccgggaucaacaacaucgcguucagcaacugaggacuaguguccaccugucccuccugggcugcuggauugucucguuuuccugccaaauaaacaggaucagcgcuuuacagaucuaaaaaaaaaaaaaaaaaaaaaaaaaaaaaaaaaaaaaaaaaaaaaaaaaaaaaaaaaaaaaaaaugcaucccccccccccccccccccccccccccccccaaaggcucuuuucagagccaccagaauu

SEQ ID NO: 14006 - RNA, 1897 nt, Artificial Sequence
  mRNA product Design b-3 comprising derived and/or modified sequence from HRSV(Memphis-37)__AIY60640.1__F_DSCav1_mut1 (opt1)
gggagagucccgcagucggcguccagcggcucugcuuguucgugugugugucguugcaggccuuauucaagcuuaccauggagcugcccauccucaagaccaacgccaucaccacgauccuggccgcggugacccugugcuucgccagcucccagaacaucaccgaggaguucuaccagagcacgugcuccgccgucagcaagggcuaccucggggcccugcgcaccggcugguacaccuccgugaucaccaucgagcugagcaacaucaaggagaacaagugcaacgggaccgacgccaaggugaagcucaucaagcaggagcuggacaaguacaagaacgcggucacggagcugcagcuccugaugcaguccaccccggccgccggcagcggguccgccaucugcagcggcaucgcggugugcaaggugcugcaccucgagggcgaggucaacaagaucaagaacgcccugcuguccaccaacaaggccguggugagccucuccaacggggucagcgugcugaccuucaaggugcuggaccucaagaacuacaucgacaagcagcugcugcccauccucaacaagcaguccugcagcauccccaacaucgagacggucaucgaguuccagcagaagaacaaccggcugcuggagaucacccgcgaguucuccgugaacgccggcgugaccacccccgucagcacguacaugcucaccaacuccgagcugcugagccucaucaacgacaugccgaucaccaacgaccagaagaagcugaugagcaacaacgugcagaucgugcggcagcaguccuacagcaucaugugcaucaucaaggaggagguccuggccuacguggugcagcucccccuguacggggucaucgacacccccugcuggaagcugcacacgagcccccucugcaccaccaacaccaaggagggcuccaacaucugccugacgcgcaccgaccgggggugguacugcgacaacgcgggcuccgugagcuucuucccgcaggccgagaccugcaaggugcaguccaaccgcgucuucugcgacaccaugaacagccugacgcuccccuccgaggugaaccugugcaacaucgacaucuucaaccccaaguacgacugcaagaucaugaccagcaagaccgacgucuccagcuccgugaucaccagccugggcgccaucguguccugcuacgggaagacgaagugcaccgccagcaacaagaaccggggcaucaucaagaccuucuccaacgggugcgacuacgucagcaacaagggcguggacaccguguccgucggcaacacgcucuacugcgugaacaagcaggaggggcagagccuguacgugaagggcgagcccaucaucaacuucuacgacccgcuggucuuccccagcgacgaguucgacgccuccaucagccaggugaacgagaagaucaaccagucccucgcguucauccgcaagagcgacgagcugcugcacaacgugaacgucgggaaguccaccaccaacaucaugaucaccaccaucaucaucgugaucaucgugauccuccugcugcucaucgccgucggccuguuccuguacugcaaggcccggagcacgcccgugacccuguccaaggaccagcucagcgggaucaacaacaucgccuucuccaacugaggacuaguguccaccugucccuccugggcugcuggauugucucguuuuccugccaaauaaacaggaucagcgcuuuacagaucuaaaaaaaaaaaaaaaaaaaaaaaaaaaaaaaaaaaaaaaaaaaaaaaaaaaaaaaaaaaaaaaaugcaucccccccccccccccccccccccccccccccaaaggcucuuuucagagccaccagaauu

SEQ ID NO: 14007 - RNA, 1897 nt, Artificial Sequence
  mRNA product Design b-3 comprising derived and/or modified sequence from HRSV(Memphis-37)__AIY60640.1__F_DSCav1_mut1 (opt2)
gggagagucccgcagucggcguccagcggcucugcuuguucgugugugugucguugcaggccuuauucaagcuuaccauggagcuccccauccucaagaccaacgccaucaccaccauccucgccgccgucacccucugcuucgccuccucccagaacaucaccgaggaguucuaccaguccaccugcuccgccgucuccaagggcuaccucggcgcccuccgcaccggcugguacaccuccgucaucaccaucgagcucuccaacaucaaggagaacaagugcaacggcaccgacgccaaggucaagcucaucaagcaggagcucgacaaguacaagaacgccgucaccgagcuccagcuccucaugcaguccacccccgccgccggcuccggcuccgccaucugcuccggcaucgccgucugcaagguccuccaccucgagggcgaggucaacaagaucaagaacgcccuccucuccaccaacaaggccgucgucucccucuccaacggcgucuccguccucaccuucaagguccucgaccucaagaacuacaucgacaagcagcuccuccccauccucaacaagcaguccugcuccauccccaacaucgagaccgucaucgaguuccagcagaagaacaaccgccuccucgagaucacccgcgaguucuccgucaacgccggcgucaccacccccgucuccaccuacaugcucaccaacuccgagcuccucucccucaucaacgacaugcccaucaccaacgaccagaagaagcucauguccaacaacguccagaucguccgccagcaguccuacuccaucaugugcaucaucaaggaggagguccucgccuacgucguccagcucccccucuacggcgucaucgacacccccugcuggaagcuccacaccuccccccucugcaccaccaacaccaaggagggcuccaacaucugccucacccgcaccgaccgcggcugguacugcgacaacgccggcuccgucuccuucuucccccaggccgagaccugcaagguccaguccaaccgcgucuucugcgacaccaugaacucccucacccuccccuccgaggucaaccucugcaacaucgacaucuucaaccccaaguacgacugcaagaucaugaccuccaagaccgacgucuccuccuccgucaucaccucccucggcgccaucgucuccugcuacggcaagaccaagugcaccgccuccaacaagaaccgcggcaucaucaagaccuucuccaacggcugcgacuacgucuccaacaagggcgucgacaccgucuccgucggcaacacccucuacugcgucaacaagcaggagggccagucccucuacgucaagggcgagcccaucaucaacuucuacgacccccucgucuuccccuccgacgaguucgacgccuccaucucccaggucaacgagaagaucaaccagucccucgccuucauccgcaaguccgacgagcuccuccacaacgucaacgucggcaaguccaccaccaacaucaugaucaccaccaucaucaucgucaucaucgucauccuccuccuccucaucgccgucggccucuuccucuacugcaaggcccgcuccacccccgucacccucuccaaggaccagcucuccggcaucaacaacaucgccuucuccaacugaggacuaguguccaccugucccuccugggcugcuggauugucucguuuuccugccaaauaaacaggaucagcgcuuuacagaucuaaaaaaaaaaaaaaaaaaaaaaaaaaaaaaaaaaaaaaaaaaaaaaaaaaaaaaaaaaaaaaaaugcaucccccccccccccccccccccccccccccccaaaggcucuuuucagagccaccagaauu

SEQ ID NO: 14008 - RNA, 1897 nt, Artificial Sequence
  mRNA product Design b-3 comprising derived and/or modified sequence from HRSV(Memphis-37)__AIY60640.1__F_DSCav1_mut1 (opt3)
gggagagucccgcagucggcguccagcggcucugcuuguucgugugugugucguugcaggccuuauucaagcuuaccauggagcugcccauccucaagaccaacgccauuacaacuauacuugcugcagugacgcugugcuucgccagcucccagaauaucaccgaagaguuuuaccaaucuacauguucagcggucaguaaaggcuauuugggggcuuuaagaacuggaugguacaccagcguuauuacaaucgaacuguccaacauuaaggagaauaaaugcaacgguaccgacgccaaggugaaacuaaucaagcaggaacucgauaaguauaaaaaugcaguaacugagcugcagcuucugaugcagucuacuccugccgcuggcucggggucagcaauauguagcggaaucgccgugugcaaggucuugcaccucgagggcgaagugaacaaaauuaagaaugcucugcugaguaccaacaaagccguugugucccucucuaauggugucagcguguuaacguucaagguacuggaccuuaagaacuacaucgauaaacaauugcugccaauucuaaauaagcaguccuguucaaucccgaacauagagacuguuauugaauuucagcagaaaaauaacaggcuccuggagaucacccgggaguucagugugaaugcgggggucacaacucccgugagcaccuauaugcuuacaaacucugaacuguugucccucauuaacgacaugccuaucaccaaugaucaaaagaaacugaugucaaacaaugugcagaucguccgccagcagagcuacaguauuaugugcauaaucaaggaggaaguuuuagcauaugugguacaacugccacucuacggagugauugacacgcccuguuggaaacuucauacuucuccucugugcacaaccaacacuaaggagggcuccaauaucuguuugacacgaaccgaucguggcugguacugcgacaacgccgggagcgucucguuuuucccacaggcugaaacguguaaggugcagucuaauagaguguuuugcgauaccaugaacucccuaacacugcccucagagguuaaucucugcaacauagacauuuucaauccuaaauaugauuguaagaucaugacaaguaaaaccgacgucagcuccucugugaucacaagccugggagccauuguaucaugcuacgguaagacuaaauguaccgcaaguaacaagaauaggggcaucauuaagacauuuuccaacgggugcgauuauguuagcaauaaaggaguggacaccgucucugugggcaacacucuuuacugugucaacaagcaagagggucagucacuguaugugaaaggggaaccaauaaucaauuucuacgacccguugguuuuucccagugaugaguucgacgcuagcauuucccaggugaacgaaaagaucaaucagucucucgccuuuauccggaaaucggaugagcuguuacacaacguaaaugucggaaagagcacgacaaacauuaugauaaccacuaucauuaucgugauuaucguuauacugcuacuccugaucgcggugggccuuuucuuguauugcaaggcccgcuccaccccugucacacugucaaaagaccaacucaguggcauuaauaacaucgcauucucuaauugaggacuaguguccaccugucccuccugggcugcuggauugucucguuuuccugccaaauaaacaggaucagcgcuuuacagaucuaaaaaaaaaaaaaaaaaaaaaaaaaaaaaaaaaaaaaaaaaaaaaaaaaaaaaaaaaaaaaaaaugcaucccccccccccccccccccccccccccccccaaaggcucuuuucagagccaccagaauu

SEQ ID NO: 14009 - RNA, 1897 nt, Artificial Sequence
  mRNA product Design b-3 comprising derived and/or modified sequence from HRSV(Memphis-37)__AIY60640.1__F_DSCav1_mut1 (opt4)
gggagagucccgcagucggcguccagcggcucugcuuguucgugugugugucguugcaggccuuauucaagcuuaccauggagcugcccauccugaagaccaacgccaucaccaccauccuggccgccgugacccugugcuucgccagcagccagaacaucaccgaggaguucuaccagagcaccugcagcgccgugagcaagggcuaccugggcgcccugagaaccggcugguacaccagcgugaucaccaucgagcugagcaacaucaaggagaacaagugcaacggcaccgacgccaaggugaagcugaucaagcaggagcuggacaaguacaagaacgccgugaccgagcugcagcugcugaugcagagcacccccgccgccggcagcggcagcgccaucugcagcggcaucgccgugugcaaggugcugcaccuggagggcgaggugaacaagaucaagaacgcccugcugagcaccaacaaggccguggugagccugagcaacggcgugagcgugcugaccuucaaggugcuggaccugaagaacuacaucgacaagcagcugcugcccauccugaacaagcagagcugcagcauccccaacaucgagaccgugaucgaguuccagcagaagaacaacagacugcuggagaucaccagagaguucagcgugaacgccggcgugaccacccccgugagcaccuacaugcugaccaacagcgagcugcugagccugaucaacgacaugcccaucaccaacgaccagaagaagcugaugagcaacaacgugcagaucgugagacagcagagcuacagcaucaugugcaucaucaaggaggaggugcuggccuacguggugcagcugccccuguacggcgugaucgacacccccugcuggaagcugcacaccagcccccugugcaccaccaacaccaaggagggcagcaacaucugccugaccagaaccgacagaggcugguacugcgacaacgccggcagcgugagcuucuucccccaggccgagaccugcaaggugcagagcaacagaguguucugcgacaccaugaacagccugacccugcccagcgaggugaaccugugcaacaucgacaucuucaaccccaaguacgacugcaagaucaugaccagcaagaccgacgugagcagcagcgugaucaccagccugggcgccaucgugagcugcuacggcaagaccaagugcaccgccagcaacaagaacagaggcaucaucaagaccuucagcaacggcugcgacuacgugagcaacaagggcguggacaccgugagcgugggcaacacccuguacugcgugaacaagcaggagggccagagccuguacgugaagggcgagcccaucaucaacuucuacgacccccugguguuccccagcgacgaguucgacgccagcaucagccaggugaacgagaagaucaaccagagccuggccuucaucagaaagagcgacgagcugcugcacaacgugaacgugggcaagagcaccaccaacaucaugaucaccaccaucaucaucgugaucaucgugauccugcugcugcugaucgccgugggccuguuccuguacugcaaggccagaagcacccccgugacccugagcaaggaccagcugagcggcaucaacaacaucgccuucagcaacugaggacuaguguccaccugucccuccugggcugcuggauugucucguuuuccugccaaauaaacaggaucagcgcuuuacagaucuaaaaaaaaaaaaaaaaaaaaaaaaaaaaaaaaaaaaaaaaaaaaaaaaaaaaaaaaaaaaaaaaugcaucccccccccccccccccccccccccccccccaaaggcucuuuucagagccaccagaauu

SEQ ID NO: 14010 - RNA, 1897 nt, Artificial Sequence
  mRNA product Design b-3 comprising derived and/or modified sequence from HRSV(Memphis-37)__AIY60640.1__F_DSCav1_mut1 (opt5)
gggagagucccgcagucggcguccagcggcucugcuuguucgugugugugucguugcaggccuuauucaagcuuaccauggagcugcccauccucaagaccaacgccauuacaacgauccuggcugccgugacccuuugcuucgcgagcucccagaauauuacagaagaguuuuaccaaucuaccuguagcgcugucuccaaaggcuaucugggggcccucagaacaggaugguacaccucuguuaucacaauugaacugagcaacaucaaggagaauaaaugcaacggcaccgacgccaaggugaaacuuaucaagcaggaacuggauaaguauaaaaaugcugugacggagcuccagcugcugaugcaguccaccccugccgcugggucuggaagcgccauuuguuccggcaucgcggucugcaaggugcuccaccuggagggggaaguuaacaaaauuaagaaugcccuucugagcacaaacaaagcuguggucucucucuccaauggagugagcguucugaccuucaaggugcuugaccugaagaacuacaucgauaaacaacuccugccgauucugaauaagcagucuuguuccauccccaacauugagacagucaucgaauuucagcagaaaaauaaccggcuccuggagaucacccgcgaguucagcgugaaugccggcgugacgacaccugucucuaccuauaugcuuacaaacuccgaacugcucagccugauuaacgacaugcccaucaccaaugaucaaaagaaacuuauguccaacaauguucagauugugagacagcagucuuacagcaucaugugcauuaucaaggaggaagugcuggcuuaugucgugcaacucccucuguacggcguuaucgacacccccuguuggaaacugcauacauccccucucugcacgaccaacacaaaggaggggagcaauauuugucugacccggacagaucgcggaugguacugcgacaacgccggcucuguguccuuuuucccgcaggcggaaaccuguaagguccagagcaauagaguguuuugcgauacgaugaacucucuuacacugcccagcgagguuaaucucugcaacaucgacauuuucaauccuaaauaugauuguaagaucaugaccuccaaaaccgacgugucuagcuccgucauuacaagccugggggccaucgugucuugcuacggaaagaccaaauguacagcuuccaacaagaaucggggcaucauuaagacguuuagcaacgggugcgauuaugucucuaauaaaggaguggacaccguuuccgugggcaacacacuuuacugugucaacaagcaagagggccagagccuguaugugaaaggggaacccaucauuaauuucuacgacccucucguuuuucccuccgaugaguucgacgccucuaucagccaggugaacgaaaagauuaaucagucccuggcuuuuauccgcaaaucugaugagcugcuccacaacgucaaugugggaaagagcaccacaaacauuaugaucaccacgaucauuaucgugauuaucguuauucugcuucugcucaucgccgucggccuguuccuguauugcaaggccagauccaccccggugacacuuagcaaagaccaacucucugggaucaauaacauugcuuucuccaauugaggacuaguguccaccugucccuccugggcugcuggauugucucguuuuccugccaaauaaacaggaucagcgcuuuacagaucuaaaaaaaaaaaaaaaaaaaaaaaaaaaaaaaaaaaaaaaaaaaaaaaaaaaaaaaaaaaaaaaaugcaucccccccccccccccccccccccccccccccaaaggcucuuuucagagccaccagaauu

SEQ ID NO: 14011 - RNA, 1897 nt, Artificial Sequence
  mRNA product Design b-3 comprising derived and/or modified sequence from HRSV(Memphis-37)__AIY60640.1__F_DSCav1_mut1 (opt6)
gggagagucccgcagucggcguccagcggcucugcuuguucgugugugugucguugcaggccuuauucaagcuuaccauggaacuuccaauucuaaaaaccaaugcuauaacaacaauauuagcagcaguuacauuaugcuucgccucaucacaaaauaucacagaagaauuuuaccaauccacaugcucagcaguaucuaaaggguaccuaggagcccuacgaacaggaugguacacaucaguaauaacaauagaacucucaaacaucaaagaaaacaaaugcaauggaacagacgcuaaaguaaaauuaauaaaacaagaacuagacaaauacaaaaacgccgucaccgaacuucaguuacucaugcaaagcacaccugcagcaggaucagguucagcaauaugcucaggaauagcaguuugcaaaguauuacaccuagaaggugaagucaacaaaauaaaaaacgcacuucuaaguacuaacaaagcuguaguaucauuaucaaacggaguauccguacuaaccuuuaaaguccuagaccuaaaaaacuacauagacaaacaacuacucccaauacucaauaaacaauccugcucaauucccaacaucgaaacaguaauagaauuucaacaaaaaaacaaucgccuucuagaaauaacaagagaauuuucagucaacgccggaguaacaacaccaguaucaacauauaugcuaacaaacagugaacuauuauccuuaauaaacgacaugccaauaacaaaugaccaaaaaaaacuaauguccaauaauguccaaauaguaagacaacaaagcuauucaauuauguguauaauaaaagaagaaguauuagcauacguaguucaacuaccacuauauggcguuauagacacaccaugcuggaaauuacacacaagcccacuaugcacaacaaauacaaaagaaggauccaacauuugcuuaacuagaacugacagaggaugguacugcgacaacgcuggaucagucucuuucuucccacaagcagaaaccuguaaaguacaaucaaauagagucuucugcgacacaaugaacucacuaacucucccaucugaaguaaacuuaugcaacaucgauauauuuaacccaaaauacgauuguaaaauaaugacauccaaaacagacguuucaucaagcguaaucaccucccucggagcaaucguaagcugcuacgguaaaacaaaaugcacagcauccaacaaaaacagaggcaucauaaaaacauucucaaacggaugugacuauguaucaaacaaaggaguagacacaguuucaguaggcaauaccuuauacugugucaauaaacaagaaggacaaucacuauauguaaaaggagaaccuauaauaaacuucuacgacccccucgucuucccuagcgaugaauuugacgcaucaauaucgcaaguaaacgaaaaaauaaaccaaucauuagccuuuauaagaaaaucagacgaauuauuacacaacguaaacguggggaaaagcacaacuaacaucaugauaacaacuaucauaauuguaaucaucgucauccuauuacuccuaaucgcaguaggacuauuccuauacugcaaagcuagaucaacaccagucacccuaucgaaagaucaauugucaggaauaaacaauauagccuuuucaaauuaaggacuaguguccaccugucccuccugggcugcuggauugucucguuuuccugccaaauaaacaggaucagcgcuuuacagaucuaaaaaaaaaaaaaaaaaaaaaaaaaaaaaaaaaaaaaaaaaaaaaaaaaaaaaaaaaaaaaaaaugcaucccccccccccccccccccccccccccccccaaaggcucuuuucagagccaccagaauu

SEQ ID NO: 14012 - RNA, 1897 nt, Artificial Sequence
  mRNA product Design b-3 comprising derived and/or modified sequence from HRSV(Memphis-37)__AIY60640.1__F_DSCav1_mut1 (opt11)
gggagagucccgcagucggcguccagcggcucugcuuguucgugugugugucguugcaggccuuauucaagcuuaccauggaacuccccauccucaaaacgaacgccaucacaaccauccucgccgccgucacccucugcuucgcgucaucccaaaacauaacugaagaguucuaucaaucaaccugcuccgcagucucaaaaggcuaccucggcgcccuacggaccggcugguacacaagcgucaucacaauagaacuuuccaacaucaaagaaaacaaauguaacggcaccgacgcaaaagucaaacucauaaaacaagaacuagacaaauauaaaaacgccguaacugaacuacaacuccucaugcaaucaacuccugcagccgguagcggcuccgcaaucugcucaggcaucgcagucugcaaagucuuacaccuagaaggcgaagucaacaaaaucaagaacgcccuacuauccacaaacaaagcaguagucucucuauccaacggagucuccguccucacauucaaaguacucgaccuaaagaacuacaucgacaaacaacuacuaccaaucuuaaacaaacaauccugcucaaucccuaacauugaaaccgucauagaguuccaacagaaaaacaaccgccuccucgaaauaaccagagaguucucagucaacgccggcgucaccaccccggucucaaccuacaugcuaaccaacucugaacuucucagccuaaucaacgacaugcccauuaccaacgaccaaaagaaacucauguccaauaacguccaaaucguucgacaacaauccuacucaaucaugugcaucauaaaagaagaaguccuagcauacgucguccaacucccacuauacggcguaaucgacacccccugcuggaaacuccacaccuccccucucuguaccaccaacaccaaagaaggguccaacaucugccucacgcgcaccgaccgaggcugguauugcgacaaugcaggcucugucuccuucuucccccaagccgaaaccugcaaaguccaaucuaaccgcgucuucugcgacaccaugaacagucuuacccucccgucagaagucaaccucugcaacauagauaucuucaacccaaaauacgacugcaaaaucaugaccucaaaaaccgacguuuccucauccguuaucaccucccucggcgcaaucgucagcugcuacggcaagacaaagugcacggcuucaaacaaaaaccgcggaaucaucaagacauucagcaacggcugcgacuacguauccaacaaaggaguggacacagucuccguuggaaacacccucuacugcguaaacaaacaagaaggccaaucacucuacgucaaaggcgaacccaucaucaacuucuacgacccacucgucuuccccuccgacgaguucgacgccucaaucagccaagucaacgagaaaauuaaccagucacucgccuucauacgcaaauccgacgaacuucuacacaacguaaacgucggaaaaucaaccacaaacaucaugauuaccacaauuaucauagucaucauaguaauccuccugcuacucauagcagucggacucuuccuauacugcaaagcccgcuccaccccugucacccuauccaaagaccaacuuuccggcaucaacaacauagccuuuuccaacuaaggacuaguguccaccugucccuccugggcugcuggauugucucguuuuccugccaaauaaacaggaucagcgcuuuacagaucuaaaaaaaaaaaaaaaaaaaaaaaaaaaaaaaaaaaaaaaaaaaaaaaaaaaaaaaaaaaaaaaaugcaucccccccccccccccccccccccccccccccaaaggcucuuuucagagccaccagaauu

SEQ ID NO: 14013 - RNA, 1948 nt, Artificial Sequence
  mRNA product Design b-4 comprising derived and/or modified sequence from HRSV(Memphis-37)__AIY60640.1__F_DSCav1_mut1 (opt1)
gggagagucccgcagucggcguccagcggcucugcuuguucgugugugugucguugcaggccuuauucaagcuuaccauggagcugcccauccucaagaccaacgccaucaccacgauccuggccgcggugacccugugcuucgccagcucccagaacaucaccgaggaguucuaccagagcacgugcuccgccgucagcaagggcuaccucggcgcccugcgcaccgggugguacaccagcgugaucaccaucgagcuguccaacaucaaggagaacaagugcaacggcaccgacgccaaggugaagcucaucaagcaggagcuggacaaguacaagaacgcggucacggagcugcagcuccugaugcagagcaccccggccgccggcuccgggagcgcgaucugcuccggcaucgccgucugcaaggugcugcaccucgagggcgaggugaacaagaucaagaacgcccugcuguccaccaacaaggccgucgugagccucuccaacggggugagcguccugaccuucaaggugcuggaccucaagaacuacaucgacaagcagcugcugcccauccugaacaagcagagcugcuccauccccaacaucgagaccgucaucgaguuccagcagaagaacaaccgccuccuggagaucacgcgggaguucagcgugaacgcgggcgugaccacccccgucuccaccuacaugcugacgaacagcgagcuccugucccugaucaacgacaugccgaucaccaacgaccagaagaagcucaugagcaacaacgugcagaucgugcgccagcaguccuacagcaucaugugcaucaucaaggaggagguccuggccuacguggugcagcugccccucuacggggucaucgacacccccugcuggaagcugcacaccagcccccugugcacgaccaacaccaaggagggcuccaacaucugccucacccggacggaccgcgggugguacugcgacaacgccggcagcguguccuucuucccgcaggccgagaccugcaagguccagagcaaccggguguucugcgacaccaugaacucccugacccugcccagcgaggugaaccucugcaacaucgacaucuucaaccccaaguacgacugcaagaucaugacguccaagaccgacgucagcuccagcgugaucaccucccugggcgccaucgugagcugcuacgggaagaccaagugcacggcgagcaacaagaaccgcggcaucaucaagaccuucuccaacgggugcgacuacgucagcaacaagggcguggacaccguguccgucggcaacacccuguacugcgugaacaagcaggagggccagagccucuacgugaagggggagcccaucaucaacuucuacgacccgcuggucuuccccuccgacgaguucgacgccagcaucucccaggugaacgagaagaucaaccagagccuggccuucauccggaaguccgacgagcuccugcacaacgugaacgucggcaagagcaccacgaacaucaugaucaccaccaucaucaucgugaucaucgugauccugcugcuccugaucgccgucgggcuguuccucuacugcaaggcccgcuccacccccgugacgcugagcaaggaccagcuguccgggaucaacaacaucgcguucagcaacugaggacuaguaauaaggaaacuguaugaaugucugugggcaggaagugaagagauccuucuguaaagguuuuuggaauuaugucugcugaauaauaaacuuuuuugaaauaauaaaucugguagaaaaaugagaucuaaaaaaaaaaaaaaaaaaaaaaaaaaaaaaaaaaaaaaaaaaaaaaaaaaaaaaaaaaaaaaaaugcaucccccccccccccccccccccccccccccccaaaggcucuuuucagagccaccagaauu

SEQ ID NO: 14014 - RNA, 1948 nt, Artificial Sequence
  mRNA product Design b-4 comprising derived and/or modified sequence from HRSV(Memphis-37)__AIY60640.1__F_DSCav1_mut1 (opt1)
gggagagucccgcagucggcguccagcggcucugcuuguucgugugugugucguugcaggccuuauucaagcuuaccauggagcugcccauccucaagaccaacgccaucaccacgauccuggccgcggugacccugugcuucgccagcucccagaacaucaccgaggaguucuaccagagcacgugcuccgccgucagcaagggcuaccucggggcccugcgcaccggcugguacaccuccgugaucaccaucgagcugagcaacaucaaggagaacaagugcaacgggaccgacgccaaggugaagcucaucaagcaggagcuggacaaguacaagaacgcggucacggagcugcagcuccugaugcaguccaccccggccgccggcagcggguccgccaucugcagcggcaucgcggugugcaaggugcugcaccucgagggcgaggucaacaagaucaagaacgcccugcuguccaccaacaaggccguggugagccucuccaacggggucagcgugcugaccuucaaggugcuggaccucaagaacuacaucgacaagcagcugcugcccauccucaacaagcaguccugcagcauccccaacaucgagacggucaucgaguuccagcagaagaacaaccggcugcuggagaucacccgcgaguucuccgugaacgccggcgugaccacccccgucagcacguacaugcucaccaacuccgagcugcugagccucaucaacgacaugccgaucaccaacgaccagaagaagcugaugagcaacaacgugcagaucgugcggcagcaguccuacagcaucaugugcaucaucaaggaggagguccuggccuacguggugcagcucccccuguacggggucaucgacacccccugcuggaagcugcacacgagcccccucugcaccaccaacaccaaggagggcuccaacaucugccugacgcgcaccgaccgggggugguacugcgacaacgcgggcuccgugagcuucuucccgcaggccgagaccugcaaggugcaguccaaccgcgucuucugcgacaccaugaacagccugacgcuccccuccgaggugaaccugugcaacaucgacaucuucaaccccaaguacgacugcaagaucaugaccagcaagaccgacgucuccagcuccgugaucaccagccugggcgccaucguguccugcuacgggaagacgaagugcaccgccagcaacaagaaccggggcaucaucaagaccuucuccaacgggugcgacuacgucagcaacaagggcguggacaccguguccgucggcaacacgcucuacugcgugaacaagcaggaggggcagagccuguacgugaagggcgagcccaucaucaacuucuacgacccgcuggucuuccccagcgacgaguucgacgccuccaucagccaggugaacgagaagaucaaccagucccucgcguucauccgcaagagcgacgagcugcugcacaacgugaacgucgggaaguccaccaccaacaucaugaucaccaccaucaucaucgugaucaucgugauccuccugcugcucaucgccgucggccuguuccuguacugcaaggcccggagcacgcccgugacccuguccaaggaccagcucagcgggaucaacaacaucgccuucuccaacugaggacuaguaauaaggaaacuguaugaaugucugugggcaggaagugaagagauccuucuguaaagguuuuuggaauuaugucugcugaauaauaaacuuuuuugaaauaauaaaucugguagaaaaaugagaucuaaaaaaaaaaaaaaaaaaaaaaaaaaaaaaaaaaaaaaaaaaaaaaaaaaaaaaaaaaaaaaaaugcaucccccccccccccccccccccccccccccccaaaggcucuuuucagagccaccagaauu

SEQ ID NO: 14015 - RNA, 1948 nt, Artificial Sequence
  mRNA product Design b-4 comprising derived and/or modified sequence from HRSV(Memphis-37)__AIY60640.1__F_DSCav1_mut1 (opt2)
gggagagucccgcagucggcguccagcggcucugcuuguucgugugugugucguugcaggccuuauucaagcuuaccauggagcuccccauccucaagaccaacgccaucaccaccauccucgccgccgucacccucugcuucgccuccucccagaacaucaccgaggaguucuaccaguccaccugcuccgccgucuccaagggcuaccucggcgcccuccgcaccggcugguacaccuccgucaucaccaucgagcucuccaacaucaaggagaacaagugcaacggcaccgacgccaaggucaagcucaucaagcaggagcucgacaaguacaagaacgccgucaccgagcuccagcuccucaugcaguccacccccgccgccggcuccggcuccgccaucugcuccggcaucgccgucugcaagguccuccaccucgagggcgaggucaacaagaucaagaacgcccuccucuccaccaacaaggccgucgucucccucuccaacggcgucuccguccucaccuucaagguccucgaccucaagaacuacaucgacaagcagcuccuccccauccucaacaagcaguccugcuccauccccaacaucgagaccgucaucgaguuccagcagaagaacaaccgccuccucgagaucacccgcgaguucuccgucaacgccggcgucaccacccccgucuccaccuacaugcucaccaacuccgagcuccucucccucaucaacgacaugcccaucaccaacgaccagaagaagcucauguccaacaacguccagaucguccgccagcaguccuacuccaucaugugcaucaucaaggaggagguccucgccuacgucguccagcucccccucuacggcgucaucgacacccccugcuggaagcuccacaccuccccccucugcaccaccaacaccaaggagggcuccaacaucugccucacccgcaccgaccgcggcugguacugcgacaacgccggcuccgucuccuucuucccccaggccgagaccugcaagguccaguccaaccgcgucuucugcgacaccaugaacucccucacccuccccuccgaggucaaccucugcaacaucgacaucuucaaccccaaguacgacugcaagaucaugaccuccaagaccgacgucuccuccuccgucaucaccucccucggcgccaucgucuccugcuacggcaagaccaagugcaccgccuccaacaagaaccgcggcaucaucaagaccuucuccaacggcugcgacuacgucuccaacaagggcgucgacaccgucuccgucggcaacacccucuacugcgucaacaagcaggagggccagucccucuacgucaagggcgagcccaucaucaacuucuacgacccccucgucuuccccuccgacgaguucgacgccuccaucucccaggucaacgagaagaucaaccagucccucgccuucauccgcaaguccgacgagcuccuccacaacgucaacgucggcaaguccaccaccaacaucaugaucaccaccaucaucaucgucaucaucgucauccuccuccuccucaucgccgucggccucuuccucuacugcaaggcccgcuccacccccgucacccucuccaaggaccagcucuccggcaucaacaacaucgccuucuccaacugaggacuaguaauaaggaaacuguaugaaugucugugggcaggaagugaagagauccuucuguaaagguuuuuggaauuaugucugcugaauaauaaacuuuuuugaaauaauaaaucugguagaaaaaugagaucuaaaaaaaaaaaaaaaaaaaaaaaaaaaaaaaaaaaaaaaaaaaaaaaaaaaaaaaaaaaaaaaaugcaucccccccccccccccccccccccccccccccaaaggcucuuuucagagccaccagaauu

SEQ ID NO: 14016 - RNA, 1948 nt, Artificial Sequence
  mRNA product Design b-4 comprising derived and/or modified sequence from HRSV(Memphis-37)__AIY60640.1__F_DSCav1_mut1 (opt3)
gggagagucccgcagucggcguccagcggcucugcuuguucgugugugugucguugcaggccuuauucaagcuuaccauggagcugcccauccucaagaccaacgccauuacaacuauacuugcugcagugacgcugugcuucgccagcucccagaauaucaccgaagaguuuuaccaaucuacauguucagcggucaguaaaggcuauuugggggcuuuaagaacuggaugguacaccagcguuauuacaaucgaacuguccaacauuaaggagaauaaaugcaacgguaccgacgccaaggugaaacuaaucaagcaggaacucgauaaguauaaaaaugcaguaacugagcugcagcuucugaugcagucuacuccugccgcuggcucggggucagcaauauguagcggaaucgccgugugcaaggucuugcaccucgagggcgaagugaacaaaauuaagaaugcucugcugaguaccaacaaagccguugugucccucucuaauggugucagcguguuaacguucaagguacuggaccuuaagaacuacaucgauaaacaauugcugccaauucuaaauaagcaguccuguucaaucccgaacauagagacuguuauugaauuucagcagaaaaauaacaggcuccuggagaucacccgggaguucagugugaaugcgggggucacaacucccgugagcaccuauaugcuuacaaacucugaacuguugucccucauuaacgacaugccuaucaccaaugaucaaaagaaacugaugucaaacaaugugcagaucguccgccagcagagcuacaguauuaugugcauaaucaaggaggaaguuuuagcauaugugguacaacugccacucuacggagugauugacacgcccuguuggaaacuucauacuucuccucugugcacaaccaacacuaaggagggcuccaauaucuguuugacacgaaccgaucguggcugguacugcgacaacgccgggagcgucucguuuuucccacaggcugaaacguguaaggugcagucuaauagaguguuuugcgauaccaugaacucccuaacacugcccucagagguuaaucucugcaacauagacauuuucaauccuaaauaugauuguaagaucaugacaaguaaaaccgacgucagcuccucugugaucacaagccugggagccauuguaucaugcuacgguaagacuaaauguaccgcaaguaacaagaauaggggcaucauuaagacauuuuccaacgggugcgauuauguuagcaauaaaggaguggacaccgucucugugggcaacacucuuuacugugucaacaagcaagagggucagucacuguaugugaaaggggaaccaauaaucaauuucuacgacccguugguuuuucccagugaugaguucgacgcuagcauuucccaggugaacgaaaagaucaaucagucucucgccuuuauccggaaaucggaugagcuguuacacaacguaaaugucggaaagagcacgacaaacauuaugauaaccacuaucauuaucgugauuaucguuauacugcuacuccugaucgcggugggccuuuucuuguauugcaaggcccgcuccaccccugucacacugucaaaagaccaacucaguggcauuaauaacaucgcauucucuaauugaggacuaguaauaaggaaacuguaugaaugucugugggcaggaagugaagagauccuucuguaaagguuuuuggaauuaugucugcugaauaauaaacuuuuuugaaauaauaaaucugguagaaaaaugagaucuaaaaaaaaaaaaaaaaaaaaaaaaaaaaaaaaaaaaaaaaaaaaaaaaaaaaaaaaaaaaaaaaugcaucccccccccccccccccccccccccccccccaaaggcucuuuucagagccaccagaauu

SEQ ID NO: 14017 - RNA, 1948 nt, Artificial Sequence
  mRNA product Design b-4 comprising derived and/or modified sequence from HRSV(Memphis-37)__AIY60640.1__F_DSCav1_mut1 (opt4)
gggagagucccgcagucggcguccagcggcucugcuuguucgugugugugucguugcaggccuuauucaagcuuaccauggagcugcccauccugaagaccaacgccaucaccaccauccuggccgccgugacccugugcuucgccagcagccagaacaucaccgaggaguucuaccagagcaccugcagcgccgugagcaagggcuaccugggcgcccugagaaccggcugguacaccagcgugaucaccaucgagcugagcaacaucaaggagaacaagugcaacggcaccgacgccaaggugaagcugaucaagcaggagcuggacaaguacaagaacgccgugaccgagcugcagcugcugaugcagagcacccccgccgccggcagcggcagcgccaucugcagcggcaucgccgugugcaaggugcugcaccuggagggcgaggugaacaagaucaagaacgcccugcugagcaccaacaaggccguggugagccugagcaacggcgugagcgugcugaccuucaaggugcuggaccugaagaacuacaucgacaagcagcugcugcccauccugaacaagcagagcugcagcauccccaacaucgagaccgugaucgaguuccagcagaagaacaacagacugcuggagaucaccagagaguucagcgugaacgccggcgugaccacccccgugagcaccuacaugcugaccaacagcgagcugcugagccugaucaacgacaugcccaucaccaacgaccagaagaagcugaugagcaacaacgugcagaucgugagacagcagagcuacagcaucaugugcaucaucaaggaggaggugcuggccuacguggugcagcugccccuguacggcgugaucgacacccccugcuggaagcugcacaccagcccccugugcaccaccaacaccaaggagggcagcaacaucugccugaccagaaccgacagaggcugguacugcgacaacgccggcagcgugagcuucuucccccaggccgagaccugcaaggugcagagcaacagaguguucugcgacaccaugaacagccugacccugcccagcgaggugaaccugugcaacaucgacaucuucaaccccaaguacgacugcaagaucaugaccagcaagaccgacgugagcagcagcgugaucaccagccugggcgccaucgugagcugcuacggcaagaccaagugcaccgccagcaacaagaacagaggcaucaucaagaccuucagcaacggcugcgacuacgugagcaacaagggcguggacaccgugagcgugggcaacacccuguacugcgugaacaagcaggagggccagagccuguacgugaagggcgagcccaucaucaacuucuacgacccccugguguuccccagcgacgaguucgacgccagcaucagccaggugaacgagaagaucaaccagagccuggccuucaucagaaagagcgacgagcugcugcacaacgugaacgugggcaagagcaccaccaacaucaugaucaccaccaucaucaucgugaucaucgugauccugcugcugcugaucgccgugggccuguuccuguacugcaaggccagaagcacccccgugacccugagcaaggaccagcugagcggcaucaacaacaucgccuucagcaacugaggacuaguaauaaggaaacuguaugaaugucugugggcaggaagugaagagauccuucuguaaagguuuuuggaauuaugucugcugaauaauaaacuuuuuugaaauaauaaaucugguagaaaaaugagaucuaaaaaaaaaaaaaaaaaaaaaaaaaaaaaaaaaaaaaaaaaaaaaaaaaaaaaaaaaaaaaaaaugcaucccccccccccccccccccccccccccccccaaaggcucuuuucagagccaccagaauu

SEQ ID NO: 14018 - RNA, 1948 nt, Artificial Sequence
  mRNA product Design b-4 comprising derived and/or modified sequence from HRSV(Memphis-37)__AIY60640.1__F_DSCav1_mut1 (opt5)
gggagagucccgcagucggcguccagcggcucugcuuguucgugugugugucguugcaggccuuauucaagcuuaccauggagcugcccauccucaagaccaacgccauuacaacgauccuggcugccgugacccuuugcuucgcgagcucccagaauauuacagaagaguuuuaccaaucuaccuguagcgcugucuccaaaggcuaucugggggcccucagaacaggaugguacaccucuguuaucacaauugaacugagcaacaucaaggagaauaaaugcaacggcaccgacgccaaggugaaacuuaucaagcaggaacuggauaaguauaaaaaugcugugacggagcuccagcugcugaugcaguccaccccugccgcugggucuggaagcgccauuuguuccggcaucgcggucugcaaggugcuccaccuggagggggaaguuaacaaaauuaagaaugcccuucugagcacaaacaaagcuguggucucucucuccaauggagugagcguucugaccuucaaggugcuugaccugaagaacuacaucgauaaacaacuccugccgauucugaauaagcagucuuguuccauccccaacauugagacagucaucgaauuucagcagaaaaauaaccggcuccuggagaucacccgcgaguucagcgugaaugccggcgugacgacaccugucucuaccuauaugcuuacaaacuccgaacugcucagccugauuaacgacaugcccaucaccaaugaucaaaagaaacuuauguccaacaauguucagauugugagacagcagucuuacagcaucaugugcauuaucaaggaggaagugcuggcuuaugucgugcaacucccucuguacggcguuaucgacacccccuguuggaaacugcauacauccccucucugcacgaccaacacaaaggaggggagcaauauuugucugacccggacagaucgcggaugguacugcgacaacgccggcucuguguccuuuuucccgcaggcggaaaccuguaagguccagagcaauagaguguuuugcgauacgaugaacucucuuacacugcccagcgagguuaaucucugcaacaucgacauuuucaauccuaaauaugauuguaagaucaugaccuccaaaaccgacgugucuagcuccgucauuacaagccugggggccaucgugucuugcuacggaaagaccaaauguacagcuuccaacaagaaucggggcaucauuaagacguuuagcaacgggugcgauuaugucucuaauaaaggaguggacaccguuuccgugggcaacacacuuuacugugucaacaagcaagagggccagagccuguaugugaaaggggaacccaucauuaauuucuacgacccucucguuuuucccuccgaugaguucgacgccucuaucagccaggugaacgaaaagauuaaucagucccuggcuuuuauccgcaaaucugaugagcugcuccacaacgucaaugugggaaagagcaccacaaacauuaugaucaccacgaucauuaucgugauuaucguuauucugcuucugcucaucgccgucggccuguuccuguauugcaaggccagauccaccccggugacacuuagcaaagaccaacucucugggaucaauaacauugcuuucuccaauugaggacuaguaauaaggaaacuguaugaaugucugugggcaggaagugaagagauccuucuguaaagguuuuuggaauuaugucugcugaauaauaaacuuuuuugaaauaauaaaucugguagaaaaaugagaucuaaaaaaaaaaaaaaaaaaaaaaaaaaaaaaaaaaaaaaaaaaaaaaaaaaaaaaaaaaaaaaaaugcaucccccccccccccccccccccccccccccccaaaggcucuuuucagagccaccagaauu

SEQ ID NO: 14019 - RNA, 1948 nt, Artificial Sequence
  mRNA product Design b-4 comprising derived and/or modified sequence from HRSV(Memphis-37)__AIY60640.1__F_DSCav1_mut1 (opt6)
gggagagucccgcagucggcguccagcggcucugcuuguucgugugugugucguugcaggccuuauucaagcuuaccauggaacuuccaauucuaaaaaccaaugcuauaacaacaauauuagcagcaguuacauuaugcuucgccucaucacaaaauaucacagaagaauuuuaccaauccacaugcucagcaguaucuaaaggguaccuaggagcccuacgaacaggaugguacacaucaguaauaacaauagaacucucaaacaucaaagaaaacaaaugcaauggaacagacgcuaaaguaaaauuaauaaaacaagaacuagacaaauacaaaaacgccgucaccgaacuucaguuacucaugcaaagcacaccugcagcaggaucagguucagcaauaugcucaggaauagcaguuugcaaaguauuacaccuagaaggugaagucaacaaaauaaaaaacgcacuucuaaguacuaacaaagcuguaguaucauuaucaaacggaguauccguacuaaccuuuaaaguccuagaccuaaaaaacuacauagacaaacaacuacucccaauacucaauaaacaauccugcucaauucccaacaucgaaacaguaauagaauuucaacaaaaaaacaaucgccuucuagaaauaacaagagaauuuucagucaacgccggaguaacaacaccaguaucaacauauaugcuaacaaacagugaacuauuauccuuaauaaacgacaugccaauaacaaaugaccaaaaaaaacuaauguccaauaauguccaaauaguaagacaacaaagcuauucaauuauguguauaauaaaagaagaaguauuagcauacguaguucaacuaccacuauauggcguuauagacacaccaugcuggaaauuacacacaagcccacuaugcacaacaaauacaaaagaaggauccaacauuugcuuaacuagaacugacagaggaugguacugcgacaacgcuggaucagucucuuucuucccacaagcagaaaccuguaaaguacaaucaaauagagucuucugcgacacaaugaacucacuaacucucccaucugaaguaaacuuaugcaacaucgauauauuuaacccaaaauacgauuguaaaauaaugacauccaaaacagacguuucaucaagcguaaucaccucccucggagcaaucguaagcugcuacgguaaaacaaaaugcacagcauccaacaaaaacagaggcaucauaaaaacauucucaaacggaugugacuauguaucaaacaaaggaguagacacaguuucaguaggcaauaccuuauacugugucaauaaacaagaaggacaaucacuauauguaaaaggagaaccuauaauaaacuucuacgacccccucgucuucccuagcgaugaauuugacgcaucaauaucgcaaguaaacgaaaaaauaaaccaaucauuagccuuuauaagaaaaucagacgaauuauuacacaacguaaacguggggaaaagcacaacuaacaucaugauaacaacuaucauaauuguaaucaucgucauccuauuacuccuaaucgcaguaggacuauuccuauacugcaaagcuagaucaacaccagucacccuaucgaaagaucaauugucaggaauaaacaauauagccuuuucaaauuaaggacuaguaauaaggaaacuguaugaaugucugugggcaggaagugaagagauccuucuguaaagguuuuuggaauuaugucugcugaauaauaaacuuuuuugaaauaauaaaucugguagaaaaaugagaucuaaaaaaaaaaaaaaaaaaaaaaaaaaaaaaaaaaaaaaaaaaaaaaaaaaaaaaaaaaaaaaaaugcaucccccccccccccccccccccccccccccccaaaggcucuuuucagagccaccagaauu

SEQ ID NO: 14020 - RNA, 1948 nt, Artificial Sequence
  mRNA product Design b-4 comprising derived and/or modified sequence from HRSV(Memphis-37)__AIY60640.1__F_DSCav1_mut1 (opt11)
gggagagucccgcagucggcguccagcggcucugcuuguucgugugugugucguugcaggccuuauucaagcuuaccauggaacuccccauccucaaaacgaacgccaucacaaccauccucgccgccgucacccucugcuucgcgucaucccaaaacauaacugaagaguucuaucaaucaaccugcuccgcagucucaaaaggcuaccucggcgcccuacggaccggcugguacacaagcgucaucacaauagaacuuuccaacaucaaagaaaacaaauguaacggcaccgacgcaaaagucaaacucauaaaacaagaacuagacaaauauaaaaacgccguaacugaacuacaacuccucaugcaaucaacuccugcagccgguagcggcuccgcaaucugcucaggcaucgcagucugcaaagucuuacaccuagaaggcgaagucaacaaaaucaagaacgcccuacuauccacaaacaaagcaguagucucucuauccaacggagucuccguccucacauucaaaguacucgaccuaaagaacuacaucgacaaacaacuacuaccaaucuuaaacaaacaauccugcucaaucccuaacauugaaaccgucauagaguuccaacagaaaaacaaccgccuccucgaaauaaccagagaguucucagucaacgccggcgucaccaccccggucucaaccuacaugcuaaccaacucugaacuucucagccuaaucaacgacaugcccauuaccaacgaccaaaagaaacucauguccaauaacguccaaaucguucgacaacaauccuacucaaucaugugcaucauaaaagaagaaguccuagcauacgucguccaacucccacuauacggcguaaucgacacccccugcuggaaacuccacaccuccccucucuguaccaccaacaccaaagaaggguccaacaucugccucacgcgcaccgaccgaggcugguauugcgacaaugcaggcucugucuccuucuucccccaagccgaaaccugcaaaguccaaucuaaccgcgucuucugcgacaccaugaacagucuuacccucccgucagaagucaaccucugcaacauagauaucuucaacccaaaauacgacugcaaaaucaugaccucaaaaaccgacguuuccucauccguuaucaccucccucggcgcaaucgucagcugcuacggcaagacaaagugcacggcuucaaacaaaaaccgcggaaucaucaagacauucagcaacggcugcgacuacguauccaacaaaggaguggacacagucuccguuggaaacacccucuacugcguaaacaaacaagaaggccaaucacucuacgucaaaggcgaacccaucaucaacuucuacgacccacucgucuuccccuccgacgaguucgacgccucaaucagccaagucaacgagaaaauuaaccagucacucgccuucauacgcaaauccgacgaacuucuacacaacguaaacgucggaaaaucaaccacaaacaucaugauuaccacaauuaucauagucaucauaguaauccuccugcuacucauagcagucggacucuuccuauacugcaaagcccgcuccaccccugucacccuauccaaagaccaacuuuccggcaucaacaacauagccuuuuccaacuaaggacuaguaauaaggaaacuguaugaaugucugugggcaggaagugaagagauccuucuguaaagguuuuuggaauuaugucugcugaauaauaaacuuuuuugaaauaauaaaucugguagaaaaaugagaucuaaaaaaaaaaaaaaaaaaaaaaaaaaaaaaaaaaaaaaaaaaaaaaaaaaaaaaaaaaaaaaaaugcaucccccccccccccccccccccccccccccccaaaggcucuuuucagagccaccagaauu

SEQ ID NO: 14021 - RNA, 2010 nt, Artificial Sequence
  mRNA product Design b-5 comprising derived and/or modified sequence from HRSV(Memphis-37)__AIY60640.1__F_DSCav1_mut1 (opt1)
gggagacuccugucgggcggaaguaggaggaguagaguuuaaaaacaguacucuuuuuccgguucgggacguaguugaagcaacgacaagccggauaaccgcucuugagacaggaagcuuaccauggagcugcccauccucaagaccaacgccaucaccacgauccuggccgcggugacccugugcuucgccagcucccagaacaucaccgaggaguucuaccagagcacgugcuccgccgucagcaagggcuaccucggcgcccugcgcaccgggugguacaccagcgugaucaccaucgagcuguccaacaucaaggagaacaagugcaacggcaccgacgccaaggugaagcucaucaagcaggagcuggacaaguacaagaacgcggucacggagcugcagcuccugaugcagagcaccccggccgccggcuccgggagcgcgaucugcuccggcaucgccgucugcaaggugcugcaccucgagggcgaggugaacaagaucaagaacgcccugcuguccaccaacaaggccgucgugagccucuccaacggggugagcguccugaccuucaaggugcuggaccucaagaacuacaucgacaagcagcugcugcccauccugaacaagcagagcugcuccauccccaacaucgagaccgucaucgaguuccagcagaagaacaaccgccuccuggagaucacgcgggaguucagcgugaacgcgggcgugaccacccccgucuccaccuacaugcugacgaacagcgagcuccugucccugaucaacgacaugccgaucaccaacgaccagaagaagcucaugagcaacaacgugcagaucgugcgccagcaguccuacagcaucaugugcaucaucaaggaggagguccuggccuacguggugcagcugccccucuacggggucaucgacacccccugcuggaagcugcacaccagcccccugugcacgaccaacaccaaggagggcuccaacaucugccucacccggacggaccgcgggugguacugcgacaacgccggcagcguguccuucuucccgcaggccgagaccugcaagguccagagcaaccggguguucugcgacaccaugaacucccugacccugcccagcgaggugaaccucugcaacaucgacaucuucaaccccaaguacgacugcaagaucaugacguccaagaccgacgucagcuccagcgugaucaccucccugggcgccaucgugagcugcuacgggaagaccaagugcacggcgagcaacaagaaccgcggcaucaucaagaccuucuccaacgggugcgacuacgucagcaacaagggcguggacaccguguccgucggcaacacccuguacugcgugaacaagcaggagggccagagccucuacgugaagggggagcccaucaucaacuucuacgacccgcuggucuuccccuccgacgaguucgacgccagcaucucccaggugaacgagaagaucaaccagagccuggccuucauccggaaguccgacgagcuccugcacaacgugaacgucggcaagagcaccacgaacaucaugaucaccaccaucaucaucgugaucaucgugauccugcugcuccugaucgccgucgggcuguuccucuacugcaaggcccgcuccacccccgugacgcugagcaaggaccagcuguccgggaucaacaacaucgcguucagcaacugaggacuaguacuggcugcaucucccuuuccucuguccuccauccuucucccaggauggugaagggggaccugguacccagugauccccaccccaggauccuaaaucaugacuuaccugcuaauaaaaacucauuggaaaagugagaagaucuaaaaaaaaaaaaaaaaaaaaaaaaaaaaaaaaaaaaaaaaaaaaaaaaaaaaaaaaaaaaaaaaugcaucccccccccccccccccccccccccccccccaaaggcucuuuucagagccaccagaauu

SEQ ID NO: 14022 - RNA, 2010 nt, Artificial Sequence
  mRNA product Design b-5 comprising derived and/or modified sequence from HRSV(Memphis-37)__AIY60640.1__F_DSCav1_mut1 (opt1)
gggagacuccugucgggcggaaguaggaggaguagaguuuaaaaacaguacucuuuuuccgguucgggacguaguugaagcaacgacaagccggauaaccgcucuugagacaggaagcuuaccauggagcugcccauccucaagaccaacgccaucaccacgauccuggccgcggugacccugugcuucgccagcucccagaacaucaccgaggaguucuaccagagcacgugcuccgccgucagcaagggcuaccucggggcccugcgcaccggcugguacaccuccgugaucaccaucgagcugagcaacaucaaggagaacaagugcaacgggaccgacgccaaggugaagcucaucaagcaggagcuggacaaguacaagaacgcggucacggagcugcagcuccugaugcaguccaccccggccgccggcagcggguccgccaucugcagcggcaucgcggugugcaaggugcugcaccucgagggcgaggucaacaagaucaagaacgcccugcuguccaccaacaaggccguggugagccucuccaacggggucagcgugcugaccuucaaggugcuggaccucaagaacuacaucgacaagcagcugcugcccauccucaacaagcaguccugcagcauccccaacaucgagacggucaucgaguuccagcagaagaacaaccggcugcuggagaucacccgcgaguucuccgugaacgccggcgugaccacccccgucagcacguacaugcucaccaacuccgagcugcugagccucaucaacgacaugccgaucaccaacgaccagaagaagcugaugagcaacaacgugcagaucgugcggcagcaguccuacagcaucaugugcaucaucaaggaggagguccuggccuacguggugcagcucccccuguacggggucaucgacacccccugcuggaagcugcacacgagcccccucugcaccaccaacaccaaggagggcuccaacaucugccugacgcgcaccgaccgggggugguacugcgacaacgcgggcuccgugagcuucuucccgcaggccgagaccugcaaggugcaguccaaccgcgucuucugcgacaccaugaacagccugacgcuccccuccgaggugaaccugugcaacaucgacaucuucaaccccaaguacgacugcaagaucaugaccagcaagaccgacgucuccagcuccgugaucaccagccugggcgccaucguguccugcuacgggaagacgaagugcaccgccagcaacaagaaccggggcaucaucaagaccuucuccaacgggugcgacuacgucagcaacaagggcguggacaccguguccgucggcaacacgcucuacugcgugaacaagcaggaggggcagagccuguacgugaagggcgagcccaucaucaacuucuacgacccgcuggucuuccccagcgacgaguucgacgccuccaucagccaggugaacgagaagaucaaccagucccucgcguucauccgcaagagcgacgagcugcugcacaacgugaacgucgggaaguccaccaccaacaucaugaucaccaccaucaucaucgugaucaucgugauccuccugcugcucaucgccgucggccuguuccuguacugcaaggcccggagcacgcccgugacccuguccaaggaccagcucagcgggaucaacaacaucgccuucuccaacugaggacuaguacuggcugcaucucccuuuccucuguccuccauccuucucccaggauggugaagggggaccugguacccagugauccccaccccaggauccuaaaucaugacuuaccugcuaauaaaaacucauuggaaaagugagaagaucuaaaaaaaaaaaaaaaaaaaaaaaaaaaaaaaaaaaaaaaaaaaaaaaaaaaaaaaaaaaaaaaaugcaucccccccccccccccccccccccccccccccaaaggcucuuuucagagccaccagaauu

SEQ ID NO: 14023 - RNA, 2010 nt, Artificial Sequence
  mRNA product Design b-5 comprising derived and/or modified sequence from HRSV(Memphis-37)__AIY60640.1__F_DSCav1_mut1 (opt2)
gggagacuccugucgggcggaaguaggaggaguagaguuuaaaaacaguacucuuuuuccgguucgggacguaguugaagcaacgacaagccggauaaccgcucuugagacaggaagcuuaccauggagcuccccauccucaagaccaacgccaucaccaccauccucgccgccgucacccucugcuucgccuccucccagaacaucaccgaggaguucuaccaguccaccugcuccgccgucuccaagggcuaccucggcgcccuccgcaccggcugguacaccuccgucaucaccaucgagcucuccaacaucaaggagaacaagugcaacggcaccgacgccaaggucaagcucaucaagcaggagcucgacaaguacaagaacgccgucaccgagcuccagcuccucaugcaguccacccccgccgccggcuccggcuccgccaucugcuccggcaucgccgucugcaagguccuccaccucgagggcgaggucaacaagaucaagaacgcccuccucuccaccaacaaggccgucgucucccucuccaacggcgucuccguccucaccuucaagguccucgaccucaagaacuacaucgacaagcagcuccuccccauccucaacaagcaguccugcuccauccccaacaucgagaccgucaucgaguuccagcagaagaacaaccgccuccucgagaucacccgcgaguucuccgucaacgccggcgucaccacccccgucuccaccuacaugcucaccaacuccgagcuccucucccucaucaacgacaugcccaucaccaacgaccagaagaagcucauguccaacaacguccagaucguccgccagcaguccuacuccaucaugugcaucaucaaggaggagguccucgccuacgucguccagcucccccucuacggcgucaucgacacccccugcuggaagcuccacaccuccccccucugcaccaccaacaccaaggagggcuccaacaucugccucacccgcaccgaccgcggcugguacugcgacaacgccggcuccgucuccuucuucccccaggccgagaccugcaagguccaguccaaccgcgucuucugcgacaccaugaacucccucacccuccccuccgaggucaaccucugcaacaucgacaucuucaaccccaaguacgacugcaagaucaugaccuccaagaccgacgucuccuccuccgucaucaccucccucggcgccaucgucuccugcuacggcaagaccaagugcaccgccuccaacaagaaccgcggcaucaucaagaccuucuccaacggcugcgacuacgucuccaacaagggcgucgacaccgucuccgucggcaacacccucuacugcgucaacaagcaggagggccagucccucuacgucaagggcgagcccaucaucaacuucuacgacccccucgucuuccccuccgacgaguucgacgccuccaucucccaggucaacgagaagaucaaccagucccucgccuucauccgcaaguccgacgagcuccuccacaacgucaacgucggcaaguccaccaccaacaucaugaucaccaccaucaucaucgucaucaucgucauccuccuccuccucaucgccgucggccucuuccucuacugcaaggcccgcuccacccccgucacccucuccaaggaccagcucuccggcaucaacaacaucgccuucuccaacugaggacuaguacuggcugcaucucccuuuccucuguccuccauccuucucccaggauggugaagggggaccugguacccagugauccccaccccaggauccuaaaucaugacuuaccugcuaauaaaaacucauuggaaaagugagaagaucuaaaaaaaaaaaaaaaaaaaaaaaaaaaaaaaaaaaaaaaaaaaaaaaaaaaaaaaaaaaaaaaaugcaucccccccccccccccccccccccccccccccaaaggcucuuuucagagccaccagaauu

SEQ ID NO: 14024 - RNA, 2010 nt, Artificial Sequence
  mRNA product Design b-5 comprising derived and/or modified sequence from HRSV(Memphis-37)__AIY60640.1__F_DSCav1_mut1 (opt3)
gggagacuccugucgggcggaaguaggaggaguagaguuuaaaaacaguacucuuuuuccgguucgggacguaguugaagcaacgacaagccggauaaccgcucuugagacaggaagcuuaccauggagcugcccauccucaagaccaacgccauuacaacuauacuugcugcagugacgcugugcuucgccagcucccagaauaucaccgaagaguuuuaccaaucuacauguucagcggucaguaaaggcuauuugggggcuuuaagaacuggaugguacaccagcguuauuacaaucgaacuguccaacauuaaggagaauaaaugcaacgguaccgacgccaaggugaaacuaaucaagcaggaacucgauaaguauaaaaaugcaguaacugagcugcagcuucugaugcagucuacuccugccgcuggcucggggucagcaauauguagcggaaucgccgugugcaaggucuugcaccucgagggcgaagugaacaaaauuaagaaugcucugcugaguaccaacaaagccguugugucccucucuaauggugucagcguguuaacguucaagguacuggaccuuaagaacuacaucgauaaacaauugcugccaauucuaaauaagcaguccuguucaaucccgaacauagagacuguuauugaauuucagcagaaaaauaacaggcuccuggagaucacccgggaguucagugugaaugcgggggucacaacucccgugagcaccuauaugcuuacaaacucugaacuguugucccucauuaacgacaugccuaucaccaaugaucaaaagaaacugaugucaaacaaugugcagaucguccgccagcagagcuacaguauuaugugcauaaucaaggaggaaguuuuagcauaugugguacaacugccacucuacggagugauugacacgcccuguuggaaacuucauacuucuccucugugcacaaccaacacuaaggagggcuccaauaucuguuugacacgaaccgaucguggcugguacugcgacaacgccgggagcgucucguuuuucccacaggcugaaacguguaaggugcagucuaauagaguguuuugcgauaccaugaacucccuaacacugcccucagagguuaaucucugcaacauagacauuuucaauccuaaauaugauuguaagaucaugacaaguaaaaccgacgucagcuccucugugaucacaagccugggagccauuguaucaugcuacgguaagacuaaauguaccgcaaguaacaagaauaggggcaucauuaagacauuuuccaacgggugcgauuauguuagcaauaaaggaguggacaccgucucugugggcaacacucuuuacugugucaacaagcaagagggucagucacuguaugugaaaggggaaccaauaaucaauuucuacgacccguugguuuuucccagugaugaguucgacgcuagcauuucccaggugaacgaaaagaucaaucagucucucgccuuuauccggaaaucggaugagcuguuacacaacguaaaugucggaaagagcacgacaaacauuaugauaaccacuaucauuaucgugauuaucguuauacugcuacuccugaucgcggugggccuuuucuuguauugcaaggcccgcuccaccccugucacacugucaaaagaccaacucaguggcauuaauaacaucgcauucucuaauugaggacuaguacuggcugcaucucccuuuccucuguccuccauccuucucccaggauggugaagggggaccugguacccagugauccccaccccaggauccuaaaucaugacuuaccugcuaauaaaaacucauuggaaaagugagaagaucuaaaaaaaaaaaaaaaaaaaaaaaaaaaaaaaaaaaaaaaaaaaaaaaaaaaaaaaaaaaaaaaaugcaucccccccccccccccccccccccccccccccaaaggcucuuuucagagccaccagaauu

SEQ ID NO: 14025 - RNA, 2010 nt, Artificial Sequence
  mRNA product Design b-5 comprising derived and/or modified sequence from HRSV(Memphis-37)__AIY60640.1__F_DSCav1_mut1 (opt4)
gggagacuccugucgggcggaaguaggaggaguagaguuuaaaaacaguacucuuuuuccgguucgggacguaguugaagcaacgacaagccggauaaccgcucuugagacaggaagcuuaccauggagcugcccauccugaagaccaacgccaucaccaccauccuggccgccgugacccugugcuucgccagcagccagaacaucaccgaggaguucuaccagagcaccugcagcgccgugagcaagggcuaccugggcgcccugagaaccggcugguacaccagcgugaucaccaucgagcugagcaacaucaaggagaacaagugcaacggcaccgacgccaaggugaagcugaucaagcaggagcuggacaaguacaagaacgccgugaccgagcugcagcugcugaugcagagcacccccgccgccggcagcggcagcgccaucugcagcggcaucgccgugugcaaggugcugcaccuggagggcgaggugaacaagaucaagaacgcccugcugagcaccaacaaggccguggugagccugagcaacggcgugagcgugcugaccuucaaggugcuggaccugaagaacuacaucgacaagcagcugcugcccauccugaacaagcagagcugcagcauccccaacaucgagaccgugaucgaguuccagcagaagaacaacagacugcuggagaucaccagagaguucagcgugaacgccggcgugaccacccccgugagcaccuacaugcugaccaacagcgagcugcugagccugaucaacgacaugcccaucaccaacgaccagaagaagcugaugagcaacaacgugcagaucgugagacagcagagcuacagcaucaugugcaucaucaaggaggaggugcuggccuacguggugcagcugccccuguacggcgugaucgacacccccugcuggaagcugcacaccagcccccugugcaccaccaacaccaaggagggcagcaacaucugccugaccagaaccgacagaggcugguacugcgacaacgccggcagcgugagcuucuucccccaggccgagaccugcaaggugcagagcaacagaguguucugcgacaccaugaacagccugacccugcccagcgaggugaaccugugcaacaucgacaucuucaaccccaaguacgacugcaagaucaugaccagcaagaccgacgugagcagcagcgugaucaccagccugggcgccaucgugagcugcuacggcaagaccaagugcaccgccagcaacaagaacagaggcaucaucaagaccuucagcaacggcugcgacuacgugagcaacaagggcguggacaccgugagcgugggcaacacccuguacugcgugaacaagcaggagggccagagccuguacgugaagggcgagcccaucaucaacuucuacgacccccugguguuccccagcgacgaguucgacgccagcaucagccaggugaacgagaagaucaaccagagccuggccuucaucagaaagagcgacgagcugcugcacaacgugaacgugggcaagagcaccaccaacaucaugaucaccaccaucaucaucgugaucaucgugauccugcugcugcugaucgccgugggccuguuccuguacugcaaggccagaagcacccccgugacccugagcaaggaccagcugagcggcaucaacaacaucgccuucagcaacugaggacuaguacuggcugcaucucccuuuccucuguccuccauccuucucccaggauggugaagggggaccugguacccagugauccccaccccaggauccuaaaucaugacuuaccugcuaauaaaaacucauuggaaaagugagaagaucuaaaaaaaaaaaaaaaaaaaaaaaaaaaaaaaaaaaaaaaaaaaaaaaaaaaaaaaaaaaaaaaaugcaucccccccccccccccccccccccccccccccaaaggcucuuuucagagccaccagaauu

SEQ ID NO: 14026 - RNA, 2010 nt, Artificial Sequence
  mRNA product Design b-5 comprising derived and/or modified sequence from HRSV(Memphis-37)__AIY60640.1__F_DSCav1_mut1 (opt5)
gggagacuccugucgggcggaaguaggaggaguagaguuuaaaaacaguacucuuuuuccgguucgggacguaguugaagcaacgacaagccggauaaccgcucuugagacaggaagcuuaccauggagcugcccauccucaagaccaacgccauuacaacgauccuggcugccgugacccuuugcuucgcgagcucccagaauauuacagaagaguuuuaccaaucuaccuguagcgcugucuccaaaggcuaucugggggcccucagaacaggaugguacaccucuguuaucacaauugaacugagcaacaucaaggagaauaaaugcaacggcaccgacgccaaggugaaacuuaucaagcaggaacuggauaaguauaaaaaugcugugacggagcuccagcugcugaugcaguccaccccugccgcugggucuggaagcgccauuuguuccggcaucgcggucugcaaggugcuccaccuggagggggaaguuaacaaaauuaagaaugcccuucugagcacaaacaaagcuguggucucucucuccaauggagugagcguucugaccuucaaggugcuugaccugaagaacuacaucgauaaacaacuccugccgauucugaauaagcagucuuguuccauccccaacauugagacagucaucgaauuucagcagaaaaauaaccggcuccuggagaucacccgcgaguucagcgugaaugccggcgugacgacaccugucucuaccuauaugcuuacaaacuccgaacugcucagccugauuaacgacaugcccaucaccaaugaucaaaagaaacuuauguccaacaauguucagauugugagacagcagucuuacagcaucaugugcauuaucaaggaggaagugcuggcuuaugucgugcaacucccucuguacggcguuaucgacacccccuguuggaaacugcauacauccccucucugcacgaccaacacaaaggaggggagcaauauuugucugacccggacagaucgcggaugguacugcgacaacgccggcucuguguccuuuuucccgcaggcggaaaccuguaagguccagagcaauagaguguuuugcgauacgaugaacucucuuacacugcccagcgagguuaaucucugcaacaucgacauuuucaauccuaaauaugauuguaagaucaugaccuccaaaaccgacgugucuagcuccgucauuacaagccugggggccaucgugucuugcuacggaaagaccaaauguacagcuuccaacaagaaucggggcaucauuaagacguuuagcaacgggugcgauuaugucucuaauaaaggaguggacaccguuuccgugggcaacacacuuuacugugucaacaagcaagagggccagagccuguaugugaaaggggaacccaucauuaauuucuacgacccucucguuuuucccuccgaugaguucgacgccucuaucagccaggugaacgaaaagauuaaucagucccuggcuuuuauccgcaaaucugaugagcugcuccacaacgucaaugugggaaagagcaccacaaacauuaugaucaccacgaucauuaucgugauuaucguuauucugcuucugcucaucgccgucggccuguuccuguauugcaaggccagauccaccccggugacacuuagcaaagaccaacucucugggaucaauaacauugcuuucuccaauugaggacuaguacuggcugcaucucccuuuccucuguccuccauccuucucccaggauggugaagggggaccugguacccagugauccccaccccaggauccuaaaucaugacuuaccugcuaauaaaaacucauuggaaaagugagaagaucuaaaaaaaaaaaaaaaaaaaaaaaaaaaaaaaaaaaaaaaaaaaaaaaaaaaaaaaaaaaaaaaaugcaucccccccccccccccccccccccccccccccaaaggcucuuuucagagccaccagaauu

SEQ ID NO: 14027 - RNA, 2010 nt, Artificial Sequence
  mRNA product Design b-5 comprising derived and/or modified sequence from HRSV(Memphis-37)__AIY60640.1__F_DSCav1_mut1 (opt6)
gggagacuccugucgggcggaaguaggaggaguagaguuuaaaaacaguacucuuuuuccgguucgggacguaguugaagcaacgacaagccggauaaccgcucuugagacaggaagcuuaccauggaacuuccaauucuaaaaaccaaugcuauaacaacaauauuagcagcaguuacauuaugcuucgccucaucacaaaauaucacagaagaauuuuaccaauccacaugcucagcaguaucuaaaggguaccuaggagcccuacgaacaggaugguacacaucaguaauaacaauagaacucucaaacaucaaagaaaacaaaugcaauggaacagacgcuaaaguaaaauuaauaaaacaagaacuagacaaauacaaaaacgccgucaccgaacuucaguuacucaugcaaagcacaccugcagcaggaucagguucagcaauaugcucaggaauagcaguuugcaaaguauuacaccuagaaggugaagucaacaaaauaaaaaacgcacuucuaaguacuaacaaagcuguaguaucauuaucaaacggaguauccguacuaaccuuuaaaguccuagaccuaaaaaacuacauagacaaacaacuacucccaauacucaauaaacaauccugcucaauucccaacaucgaaacaguaauagaauuucaacaaaaaaacaaucgccuucuagaaauaacaagagaauuuucagucaacgccggaguaacaacaccaguaucaacauauaugcuaacaaacagugaacuauuauccuuaauaaacgacaugccaauaacaaaugaccaaaaaaaacuaauguccaauaauguccaaauaguaagacaacaaagcuauucaauuauguguauaauaaaagaagaaguauuagcauacguaguucaacuaccacuauauggcguuauagacacaccaugcuggaaauuacacacaagcccacuaugcacaacaaauacaaaagaaggauccaacauuugcuuaacuagaacugacagaggaugguacugcgacaacgcuggaucagucucuuucuucccacaagcagaaaccuguaaaguacaaucaaauagagucuucugcgacacaaugaacucacuaacucucccaucugaaguaaacuuaugcaacaucgauauauuuaacccaaaauacgauuguaaaauaaugacauccaaaacagacguuucaucaagcguaaucaccucccucggagcaaucguaagcugcuacgguaaaacaaaaugcacagcauccaacaaaaacagaggcaucauaaaaacauucucaaacggaugugacuauguaucaaacaaaggaguagacacaguuucaguaggcaauaccuuauacugugucaauaaacaagaaggacaaucacuauauguaaaaggagaaccuauaauaaacuucuacgacccccucgucuucccuagcgaugaauuugacgcaucaauaucgcaaguaaacgaaaaaauaaaccaaucauuagccuuuauaagaaaaucagacgaauuauuacacaacguaaacguggggaaaagcacaacuaacaucaugauaacaacuaucauaauuguaaucaucgucauccuauuacuccuaaucgcaguaggacuauuccuauacugcaaagcuagaucaacaccagucacccuaucgaaagaucaauugucaggaauaaacaauauagccuuuucaaauuaaggacuaguacuggcugcaucucccuuuccucuguccuccauccuucucccaggauggugaagggggaccugguacccagugauccccaccccaggauccuaaaucaugacuuaccugcuaauaaaaacucauuggaaaagugagaagaucuaaaaaaaaaaaaaaaaaaaaaaaaaaaaaaaaaaaaaaaaaaaaaaaaaaaaaaaaaaaaaaaaugcaucccccccccccccccccccccccccccccccaaaggcucuuuucagagccaccagaauu

SEQ ID NO: 14028 - RNA, 2010 nt, Artificial Sequence
  mRNA product Design b-5 comprising derived and/or modified sequence from HRSV(Memphis-37)__AIY60640.1__F_DSCav1_mut1 (opt11)
gggagacuccugucgggcggaaguaggaggaguagaguuuaaaaacaguacucuuuuuccgguucgggacguaguugaagcaacgacaagccggauaaccgcucuugagacaggaagcuuaccauggaacuccccauccucaaaacgaacgccaucacaaccauccucgccgccgucacccucugcuucgcgucaucccaaaacauaacugaagaguucuaucaaucaaccugcuccgcagucucaaaaggcuaccucggcgcccuacggaccggcugguacacaagcgucaucacaauagaacuuuccaacaucaaagaaaacaaauguaacggcaccgacgcaaaagucaaacucauaaaacaagaacuagacaaauauaaaaacgccguaacugaacuacaacuccucaugcaaucaacuccugcagccgguagcggcuccgcaaucugcucaggcaucgcagucugcaaagucuuacaccuagaaggcgaagucaacaaaaucaagaacgcccuacuauccacaaacaaagcaguagucucucuauccaacggagucuccguccucacauucaaaguacucgaccuaaagaacuacaucgacaaacaacuacuaccaaucuuaaacaaacaauccugcucaaucccuaacauugaaaccgucauagaguuccaacagaaaaacaaccgccuccucgaaauaaccagagaguucucagucaacgccggcgucaccaccccggucucaaccuacaugcuaaccaacucugaacuucucagccuaaucaacgacaugcccauuaccaacgaccaaaagaaacucauguccaauaacguccaaaucguucgacaacaauccuacucaaucaugugcaucauaaaagaagaaguccuagcauacgucguccaacucccacuauacggcguaaucgacacccccugcuggaaacuccacaccuccccucucuguaccaccaacaccaaagaaggguccaacaucugccucacgcgcaccgaccgaggcugguauugcgacaaugcaggcucugucuccuucuucccccaagccgaaaccugcaaaguccaaucuaaccgcgucuucugcgacaccaugaacagucuuacccucccgucagaagucaaccucugcaacauagauaucuucaacccaaaauacgacugcaaaaucaugaccucaaaaaccgacguuuccucauccguuaucaccucccucggcgcaaucgucagcugcuacggcaagacaaagugcacggcuucaaacaaaaaccgcggaaucaucaagacauucagcaacggcugcgacuacguauccaacaaaggaguggacacagucuccguuggaaacacccucuacugcguaaacaaacaagaaggccaaucacucuacgucaaaggcgaacccaucaucaacuucuacgacccacucgucuuccccuccgacgaguucgacgccucaaucagccaagucaacgagaaaauuaaccagucacucgccuucauacgcaaauccgacgaacuucuacacaacguaaacgucggaaaaucaaccacaaacaucaugauuaccacaauuaucauagucaucauaguaauccuccugcuacucauagcagucggacucuuccuauacugcaaagcccgcuccaccccugucacccuauccaaagaccaacuuuccggcaucaacaacauagccuuuuccaacuaaggacuaguacuggcugcaucucccuuuccucuguccuccauccuucucccaggauggugaagggggaccugguacccagugauccccaccccaggauccuaaaucaugacuuaccugcuaauaaaaacucauuggaaaagugagaagaucuaaaaaaaaaaaaaaaaaaaaaaaaaaaaaaaaaaaaaaaaaaaaaaaaaaaaaaaaaaaaaaaaugcaucccccccccccccccccccccccccccccccaaaggcucuuuucagagccaccagaauu

SEQ ID NO: 14029 - RNA, 1916 nt, Artificial Sequence
  mRNA product Design c-1 comprising derived and/or modified sequence from HRSV(Memphis-37)__AIY60640.1__F_DSCav1_mut1 (opt1)
gggagaguccgcucagccagguugcagaagcggcuuagcguguguccuaaucuucucucugcguguagguaggccugugccgcaaacaagcuuaccauggagcugcccauccucaagaccaacgccaucaccacgauccuggccgcggugacccugugcuucgccagcucccagaacaucaccgaggaguucuaccagagcacgugcuccgccgucagcaagggcuaccucggcgcccugcgcaccgggugguacaccagcgugaucaccaucgagcuguccaacaucaaggagaacaagugcaacggcaccgacgccaaggugaagcucaucaagcaggagcuggacaaguacaagaacgcggucacggagcugcagcuccugaugcagagcaccccggccgccggcuccgggagcgcgaucugcuccggcaucgccgucugcaaggugcugcaccucgagggcgaggugaacaagaucaagaacgcccugcuguccaccaacaaggccgucgugagccucuccaacggggugagcguccugaccuucaaggugcuggaccucaagaacuacaucgacaagcagcugcugcccauccugaacaagcagagcugcuccauccccaacaucgagaccgucaucgaguuccagcagaagaacaaccgccuccuggagaucacgcgggaguucagcgugaacgcgggcgugaccacccccgucuccaccuacaugcugacgaacagcgagcuccugucccugaucaacgacaugccgaucaccaacgaccagaagaagcucaugagcaacaacgugcagaucgugcgccagcaguccuacagcaucaugugcaucaucaaggaggagguccuggccuacguggugcagcugccccucuacggggucaucgacacccccugcuggaagcugcacaccagcccccugugcacgaccaacaccaaggagggcuccaacaucugccucacccggacggaccgcgggugguacugcgacaacgccggcagcguguccuucuucccgcaggccgagaccugcaagguccagagcaaccggguguucugcgacaccaugaacucccugacccugcccagcgaggugaaccucugcaacaucgacaucuucaaccccaaguacgacugcaagaucaugacguccaagaccgacgucagcuccagcgugaucaccucccugggcgccaucgugagcugcuacgggaagaccaagugcacggcgagcaacaagaaccgcggcaucaucaagaccuucuccaacgggugcgacuacgucagcaacaagggcguggacaccguguccgucggcaacacccuguacugcgugaacaagcaggagggccagagccucuacgugaagggggagcccaucaucaacuucuacgacccgcuggucuuccccuccgacgaguucgacgccagcaucucccaggugaacgagaagaucaaccagagccuggccuucauccggaaguccgacgagcuccugcacaacgugaacgucggcaagagcaccacgaacaucaugaucaccaccaucaucaucgugaucaucgugauccugcugcuccugaucgccgucgggcuguuccucuacugcaaggcccgcuccacccccgugacgcugagcaaggaccagcuguccgggaucaacaacaucgcguucagcaacugaggacuaguguccaccugucccuccugggcugcuggauugucucguuuuccugccaaauaaacaggaucagcgcuuuacagaucuaaaaaaaaaaaaaaaaaaaaaaaaaaaaaaaaaaaaaaaaaaaaaaaaaaaaaaaaaaaaaaaaugcaucccccccccccccccccccccccccccccccaaaggcucuuuucagagccaccagaauu

SEQ ID NO: 14030 - RNA, 1916 nt, Artificial Sequence
  mRNA product Design c-1 comprising derived and/or modified sequence from HRSV(Memphis-37)__AIY60640.1__F_DSCav1_mut1 (opt1)
gggagaguccgcucagccagguugcagaagcggcuuagcguguguccuaaucuucucucugcguguagguaggccugugccgcaaacaagcuuaccauggagcugcccauccucaagaccaacgccaucaccacgauccuggccgcggugacccugugcuucgccagcucccagaacaucaccgaggaguucuaccagagcacgugcuccgccgucagcaagggcuaccucggggcccugcgcaccggcugguacaccuccgugaucaccaucgagcugagcaacaucaaggagaacaagugcaacgggaccgacgccaaggugaagcucaucaagcaggagcuggacaaguacaagaacgcggucacggagcugcagcuccugaugcaguccaccccggccgccggcagcggguccgccaucugcagcggcaucgcggugugcaaggugcugcaccucgagggcgaggucaacaagaucaagaacgcccugcuguccaccaacaaggccguggugagccucuccaacggggucagcgugcugaccuucaaggugcuggaccucaagaacuacaucgacaagcagcugcugcccauccucaacaagcaguccugcagcauccccaacaucgagacggucaucgaguuccagcagaagaacaaccggcugcuggagaucacccgcgaguucuccgugaacgccggcgugaccacccccgucagcacguacaugcucaccaacuccgagcugcugagccucaucaacgacaugccgaucaccaacgaccagaagaagcugaugagcaacaacgugcagaucgugcggcagcaguccuacagcaucaugugcaucaucaaggaggagguccuggccuacguggugcagcucccccuguacggggucaucgacacccccugcuggaagcugcacacgagcccccucugcaccaccaacaccaaggagggcuccaacaucugccugacgcgcaccgaccgggggugguacugcgacaacgcgggcuccgugagcuucuucccgcaggccgagaccugcaaggugcaguccaaccgcgucuucugcgacaccaugaacagccugacgcuccccuccgaggugaaccugugcaacaucgacaucuucaaccccaaguacgacugcaagaucaugaccagcaagaccgacgucuccagcuccgugaucaccagccugggcgccaucguguccugcuacgggaagacgaagugcaccgccagcaacaagaaccggggcaucaucaagaccuucuccaacgggugcgacuacgucagcaacaagggcguggacaccguguccgucggcaacacgcucuacugcgugaacaagcaggaggggcagagccuguacgugaagggcgagcccaucaucaacuucuacgacccgcuggucuuccccagcgacgaguucgacgccuccaucagccaggugaacgagaagaucaaccagucccucgcguucauccgcaagagcgacgagcugcugcacaacgugaacgucgggaaguccaccaccaacaucaugaucaccaccaucaucaucgugaucaucgugauccuccugcugcucaucgccgucggccuguuccuguacugcaaggcccggagcacgcccgugacccuguccaaggaccagcucagcgggaucaacaacaucgccuucuccaacugaggacuaguguccaccugucccuccugggcugcuggauugucucguuuuccugccaaauaaacaggaucagcgcuuuacagaucuaaaaaaaaaaaaaaaaaaaaaaaaaaaaaaaaaaaaaaaaaaaaaaaaaaaaaaaaaaaaaaaaugcaucccccccccccccccccccccccccccccccaaaggcucuuuucagagccaccagaauu

SEQ ID NO: 14031 - RNA, 1916 nt, Artificial Sequence
  mRNA product Design c-1 comprising derived and/or modified sequence from HRSV(Memphis-37)__AIY60640.1__F_DSCav1_mut1 (opt2)
gggagaguccgcucagccagguugcagaagcggcuuagcguguguccuaaucuucucucugcguguagguaggccugugccgcaaacaagcuuaccauggagcuccccauccucaagaccaacgccaucaccaccauccucgccgccgucacccucugcuucgccuccucccagaacaucaccgaggaguucuaccaguccaccugcuccgccgucuccaagggcuaccucggcgcccuccgcaccggcugguacaccuccgucaucaccaucgagcucuccaacaucaaggagaacaagugcaacggcaccgacgccaaggucaagcucaucaagcaggagcucgacaaguacaagaacgccgucaccgagcuccagcuccucaugcaguccacccccgccgccggcuccggcuccgccaucugcuccggcaucgccgucugcaagguccuccaccucgagggcgaggucaacaagaucaagaacgcccuccucuccaccaacaaggccgucgucucccucuccaacggcgucuccguccucaccuucaagguccucgaccucaagaacuacaucgacaagcagcuccuccccauccucaacaagcaguccugcuccauccccaacaucgagaccgucaucgaguuccagcagaagaacaaccgccuccucgagaucacccgcgaguucuccgucaacgccggcgucaccacccccgucuccaccuacaugcucaccaacuccgagcuccucucccucaucaacgacaugcccaucaccaacgaccagaagaagcucauguccaacaacguccagaucguccgccagcaguccuacuccaucaugugcaucaucaaggaggagguccucgccuacgucguccagcucccccucuacggcgucaucgacacccccugcuggaagcuccacaccuccccccucugcaccaccaacaccaaggagggcuccaacaucugccucacccgcaccgaccgcggcugguacugcgacaacgccggcuccgucuccuucuucccccaggccgagaccugcaagguccaguccaaccgcgucuucugcgacaccaugaacucccucacccuccccuccgaggucaaccucugcaacaucgacaucuucaaccccaaguacgacugcaagaucaugaccuccaagaccgacgucuccuccuccgucaucaccucccucggcgccaucgucuccugcuacggcaagaccaagugcaccgccuccaacaagaaccgcggcaucaucaagaccuucuccaacggcugcgacuacgucuccaacaagggcgucgacaccgucuccgucggcaacacccucuacugcgucaacaagcaggagggccagucccucuacgucaagggcgagcccaucaucaacuucuacgacccccucgucuuccccuccgacgaguucgacgccuccaucucccaggucaacgagaagaucaaccagucccucgccuucauccgcaaguccgacgagcuccuccacaacgucaacgucggcaaguccaccaccaacaucaugaucaccaccaucaucaucgucaucaucgucauccuccuccuccucaucgccgucggccucuuccucuacugcaaggcccgcuccacccccgucacccucuccaaggaccagcucuccggcaucaacaacaucgccuucuccaacugaggacuaguguccaccugucccuccugggcugcuggauugucucguuuuccugccaaauaaacaggaucagcgcuuuacagaucuaaaaaaaaaaaaaaaaaaaaaaaaaaaaaaaaaaaaaaaaaaaaaaaaaaaaaaaaaaaaaaaaugcaucccccccccccccccccccccccccccccccaaaggcucuuuucagagccaccagaauu

SEQ ID NO: 14032 - RNA, 1916 nt, Artificial Sequence
  mRNA product Design c-1 comprising derived and/or modified sequence from HRSV(Memphis-37)__AIY60640.1__F_DSCav1_mut1 (opt3)
gggagaguccgcucagccagguugcagaagcggcuuagcguguguccuaaucuucucucugcguguagguaggccugugccgcaaacaagcuuaccauggagcugcccauccucaagaccaacgccauuacaacuauacuugcugcagugacgcugugcuucgccagcucccagaauaucaccgaagaguuuuaccaaucuacauguucagcggucaguaaaggcuauuugggggcuuuaagaacuggaugguacaccagcguuauuacaaucgaacuguccaacauuaaggagaauaaaugcaacgguaccgacgccaaggugaaacuaaucaagcaggaacucgauaaguauaaaaaugcaguaacugagcugcagcuucugaugcagucuacuccugccgcuggcucggggucagcaauauguagcggaaucgccgugugcaaggucuugcaccucgagggcgaagugaacaaaauuaagaaugcucugcugaguaccaacaaagccguugugucccucucuaauggugucagcguguuaacguucaagguacuggaccuuaagaacuacaucgauaaacaauugcugccaauucuaaauaagcaguccuguucaaucccgaacauagagacuguuauugaauuucagcagaaaaauaacaggcuccuggagaucacccgggaguucagugugaaugcgggggucacaacucccgugagcaccuauaugcuuacaaacucugaacuguugucccucauuaacgacaugccuaucaccaaugaucaaaagaaacugaugucaaacaaugugcagaucguccgccagcagagcuacaguauuaugugcauaaucaaggaggaaguuuuagcauaugugguacaacugccacucuacggagugauugacacgcccuguuggaaacuucauacuucuccucugugcacaaccaacacuaaggagggcuccaauaucuguuugacacgaaccgaucguggcugguacugcgacaacgccgggagcgucucguuuuucccacaggcugaaacguguaaggugcagucuaauagaguguuuugcgauaccaugaacucccuaacacugcccucagagguuaaucucugcaacauagacauuuucaauccuaaauaugauuguaagaucaugacaaguaaaaccgacgucagcuccucugugaucacaagccugggagccauuguaucaugcuacgguaagacuaaauguaccgcaaguaacaagaauaggggcaucauuaagacauuuuccaacgggugcgauuauguuagcaauaaaggaguggacaccgucucugugggcaacacucuuuacugugucaacaagcaagagggucagucacuguaugugaaaggggaaccaauaaucaauuucuacgacccguugguuuuucccagugaugaguucgacgcuagcauuucccaggugaacgaaaagaucaaucagucucucgccuuuauccggaaaucggaugagcuguuacacaacguaaaugucggaaagagcacgacaaacauuaugauaaccacuaucauuaucgugauuaucguuauacugcuacuccugaucgcggugggccuuuucuuguauugcaaggcccgcuccaccccugucacacugucaaaagaccaacucaguggcauuaauaacaucgcauucucuaauugaggacuaguguccaccugucccuccugggcugcuggauugucucguuuuccugccaaauaaacaggaucagcgcuuuacagaucuaaaaaaaaaaaaaaaaaaaaaaaaaaaaaaaaaaaaaaaaaaaaaaaaaaaaaaaaaaaaaaaaugcaucccccccccccccccccccccccccccccccaaaggcucuuuucagagccaccagaauu

SEQ ID NO: 14033 - RNA, 1916 nt, Artificial Sequence
  mRNA product Design c-1 comprising derived and/or modified sequence from HRSV(Memphis-37)__AIY60640.1__F_DSCav1_mut1 (opt4)
gggagaguccgcucagccagguugcagaagcggcuuagcguguguccuaaucuucucucugcguguagguaggccugugccgcaaacaagcuuaccauggagcugcccauccugaagaccaacgccaucaccaccauccuggccgccgugacccugugcuucgccagcagccagaacaucaccgaggaguucuaccagagcaccugcagcgccgugagcaagggcuaccugggcgcccugagaaccggcugguacaccagcgugaucaccaucgagcugagcaacaucaaggagaacaagugcaacggcaccgacgccaaggugaagcugaucaagcaggagcuggacaaguacaagaacgccgugaccgagcugcagcugcugaugcagagcacccccgccgccggcagcggcagcgccaucugcagcggcaucgccgugugcaaggugcugcaccuggagggcgaggugaacaagaucaagaacgcccugcugagcaccaacaaggccguggugagccugagcaacggcgugagcgugcugaccuucaaggugcuggaccugaagaacuacaucgacaagcagcugcugcccauccugaacaagcagagcugcagcauccccaacaucgagaccgugaucgaguuccagcagaagaacaacagacugcuggagaucaccagagaguucagcgugaacgccggcgugaccacccccgugagcaccuacaugcugaccaacagcgagcugcugagccugaucaacgacaugcccaucaccaacgaccagaagaagcugaugagcaacaacgugcagaucgugagacagcagagcuacagcaucaugugcaucaucaaggaggaggugcuggccuacguggugcagcugccccuguacggcgugaucgacacccccugcuggaagcugcacaccagcccccugugcaccaccaacaccaaggagggcagcaacaucugccugaccagaaccgacagaggcugguacugcgacaacgccggcagcgugagcuucuucccccaggccgagaccugcaaggugcagagcaacagaguguucugcgacaccaugaacagccugacccugcccagcgaggugaaccugugcaacaucgacaucuucaaccccaaguacgacugcaagaucaugaccagcaagaccgacgugagcagcagcgugaucaccagccugggcgccaucgugagcugcuacggcaagaccaagugcaccgccagcaacaagaacagaggcaucaucaagaccuucagcaacggcugcgacuacgugagcaacaagggcguggacaccgugagcgugggcaacacccuguacugcgugaacaagcaggagggccagagccuguacgugaagggcgagcccaucaucaacuucuacgacccccugguguuccccagcgacgaguucgacgccagcaucagccaggugaacgagaagaucaaccagagccuggccuucaucagaaagagcgacgagcugcugcacaacgugaacgugggcaagagcaccaccaacaucaugaucaccaccaucaucaucgugaucaucgugauccugcugcugcugaucgccgugggccuguuccuguacugcaaggccagaagcacccccgugacccugagcaaggaccagcugagcggcaucaacaacaucgccuucagcaacugaggacuaguguccaccugucccuccugggcugcuggauugucucguuuuccugccaaauaaacaggaucagcgcuuuacagaucuaaaaaaaaaaaaaaaaaaaaaaaaaaaaaaaaaaaaaaaaaaaaaaaaaaaaaaaaaaaaaaaaugcaucccccccccccccccccccccccccccccccaaaggcucuuuucagagccaccagaauu

SEQ ID NO: 14034 - RNA, 1916 nt, Artificial Sequence
  mRNA product Design c-1 comprising derived and/or modified sequence from HRSV(Memphis-37)__AIY60640.1__F_DSCav1_mut1 (opt5)
gggagaguccgcucagccagguugcagaagcggcuuagcguguguccuaaucuucucucugcguguagguaggccugugccgcaaacaagcuuaccauggagcugcccauccucaagaccaacgccauuacaacgauccuggcugccgugacccuuugcuucgcgagcucccagaauauuacagaagaguuuuaccaaucuaccuguagcgcugucuccaaaggcuaucugggggcccucagaacaggaugguacaccucuguuaucacaauugaacugagcaacaucaaggagaauaaaugcaacggcaccgacgccaaggugaaacuuaucaagcaggaacuggauaaguauaaaaaugcugugacggagcuccagcugcugaugcaguccaccccugccgcugggucuggaagcgccauuuguuccggcaucgcggucugcaaggugcuccaccuggagggggaaguuaacaaaauuaagaaugcccuucugagcacaaacaaagcuguggucucucucuccaauggagugagcguucugaccuucaaggugcuugaccugaagaacuacaucgauaaacaacuccugccgauucugaauaagcagucuuguuccauccccaacauugagacagucaucgaauuucagcagaaaaauaaccggcuccuggagaucacccgcgaguucagcgugaaugccggcgugacgacaccugucucuaccuauaugcuuacaaacuccgaacugcucagccugauuaacgacaugcccaucaccaaugaucaaaagaaacuuauguccaacaauguucagauugugagacagcagucuuacagcaucaugugcauuaucaaggaggaagugcuggcuuaugucgugcaacucccucuguacggcguuaucgacacccccuguuggaaacugcauacauccccucucugcacgaccaacacaaaggaggggagcaauauuugucugacccggacagaucgcggaugguacugcgacaacgccggcucuguguccuuuuucccgcaggcggaaaccuguaagguccagagcaauagaguguuuugcgauacgaugaacucucuuacacugcccagcgagguuaaucucugcaacaucgacauuuucaauccuaaauaugauuguaagaucaugaccuccaaaaccgacgugucuagcuccgucauuacaagccugggggccaucgugucuugcuacggaaagaccaaauguacagcuuccaacaagaaucggggcaucauuaagacguuuagcaacgggugcgauuaugucucuaauaaaggaguggacaccguuuccgugggcaacacacuuuacugugucaacaagcaagagggccagagccuguaugugaaaggggaacccaucauuaauuucuacgacccucucguuuuucccuccgaugaguucgacgccucuaucagccaggugaacgaaaagauuaaucagucccuggcuuuuauccgcaaaucugaugagcugcuccacaacgucaaugugggaaagagcaccacaaacauuaugaucaccacgaucauuaucgugauuaucguuauucugcuucugcucaucgccgucggccuguuccuguauugcaaggccagauccaccccggugacacuuagcaaagaccaacucucugggaucaauaacauugcuuucuccaauugaggacuaguguccaccugucccuccugggcugcuggauugucucguuuuccugccaaauaaacaggaucagcgcuuuacagaucuaaaaaaaaaaaaaaaaaaaaaaaaaaaaaaaaaaaaaaaaaaaaaaaaaaaaaaaaaaaaaaaaugcaucccccccccccccccccccccccccccccccaaaggcucuuuucagagccaccagaauu

SEQ ID NO: 14035 - RNA, 1916 nt, Artificial Sequence
  mRNA product Design c-1 comprising derived and/or modified sequence from HRSV(Memphis-37)__AIY60640.1__F_DSCav1_mut1 (opt6)
gggagaguccgcucagccagguugcagaagcggcuuagcguguguccuaaucuucucucugcguguagguaggccugugccgcaaacaagcuuaccauggaacuuccaauucuaaaaaccaaugcuauaacaacaauauuagcagcaguuacauuaugcuucgccucaucacaaaauaucacagaagaauuuuaccaauccacaugcucagcaguaucuaaaggguaccuaggagcccuacgaacaggaugguacacaucaguaauaacaauagaacucucaaacaucaaagaaaacaaaugcaauggaacagacgcuaaaguaaaauuaauaaaacaagaacuagacaaauacaaaaacgccgucaccgaacuucaguuacucaugcaaagcacaccugcagcaggaucagguucagcaauaugcucaggaauagcaguuugcaaaguauuacaccuagaaggugaagucaacaaaauaaaaaacgcacuucuaaguacuaacaaagcuguaguaucauuaucaaacggaguauccguacuaaccuuuaaaguccuagaccuaaaaaacuacauagacaaacaacuacucccaauacucaauaaacaauccugcucaauucccaacaucgaaacaguaauagaauuucaacaaaaaaacaaucgccuucuagaaauaacaagagaauuuucagucaacgccggaguaacaacaccaguaucaacauauaugcuaacaaacagugaacuauuauccuuaauaaacgacaugccaauaacaaaugaccaaaaaaaacuaauguccaauaauguccaaauaguaagacaacaaagcuauucaauuauguguauaauaaaagaagaaguauuagcauacguaguucaacuaccacuauauggcguuauagacacaccaugcuggaaauuacacacaagcccacuaugcacaacaaauacaaaagaaggauccaacauuugcuuaacuagaacugacagaggaugguacugcgacaacgcuggaucagucucuuucuucccacaagcagaaaccuguaaaguacaaucaaauagagucuucugcgacacaaugaacucacuaacucucccaucugaaguaaacuuaugcaacaucgauauauuuaacccaaaauacgauuguaaaauaaugacauccaaaacagacguuucaucaagcguaaucaccucccucggagcaaucguaagcugcuacgguaaaacaaaaugcacagcauccaacaaaaacagaggcaucauaaaaacauucucaaacggaugugacuauguaucaaacaaaggaguagacacaguuucaguaggcaauaccuuauacugugucaauaaacaagaaggacaaucacuauauguaaaaggagaaccuauaauaaacuucuacgacccccucgucuucccuagcgaugaauuugacgcaucaauaucgcaaguaaacgaaaaaauaaaccaaucauuagccuuuauaagaaaaucagacgaauuauuacacaacguaaacguggggaaaagcacaacuaacaucaugauaacaacuaucauaauuguaaucaucgucauccuauuacuccuaaucgcaguaggacuauuccuauacugcaaagcuagaucaacaccagucacccuaucgaaagaucaauugucaggaauaaacaauauagccuuuucaaauuaaggacuaguguccaccugucccuccugggcugcuggauugucucguuuuccugccaaauaaacaggaucagcgcuuuacagaucuaaaaaaaaaaaaaaaaaaaaaaaaaaaaaaaaaaaaaaaaaaaaaaaaaaaaaaaaaaaaaaaaugcaucccccccccccccccccccccccccccccccaaaggcucuuuucagagccaccagaauu

SEQ ID NO: 14036 - RNA, 1916 nt, Artificial Sequence
  mRNA product Design c-1 comprising derived and/or modified sequence from HRSV(Memphis-37)__AIY60640.1__F_DSCav1_mut1 (opt11)
gggagaguccgcucagccagguugcagaagcggcuuagcguguguccuaaucuucucucugcguguagguaggccugugccgcaaacaagcuuaccauggaacuccccauccucaaaacgaacgccaucacaaccauccucgccgccgucacccucugcuucgcgucaucccaaaacauaacugaagaguucuaucaaucaaccugcuccgcagucucaaaaggcuaccucggcgcccuacggaccggcugguacacaagcgucaucacaauagaacuuuccaacaucaaagaaaacaaauguaacggcaccgacgcaaaagucaaacucauaaaacaagaacuagacaaauauaaaaacgccguaacugaacuacaacuccucaugcaaucaacuccugcagccgguagcggcuccgcaaucugcucaggcaucgcagucugcaaagucuuacaccuagaaggcgaagucaacaaaaucaagaacgcccuacuauccacaaacaaagcaguagucucucuauccaacggagucuccguccucacauucaaaguacucgaccuaaagaacuacaucgacaaacaacuacuaccaaucuuaaacaaacaauccugcucaaucccuaacauugaaaccgucauagaguuccaacagaaaaacaaccgccuccucgaaauaaccagagaguucucagucaacgccggcgucaccaccccggucucaaccuacaugcuaaccaacucugaacuucucagccuaaucaacgacaugcccauuaccaacgaccaaaagaaacucauguccaauaacguccaaaucguucgacaacaauccuacucaaucaugugcaucauaaaagaagaaguccuagcauacgucguccaacucccacuauacggcguaaucgacacccccugcuggaaacuccacaccuccccucucuguaccaccaacaccaaagaaggguccaacaucugccucacgcgcaccgaccgaggcugguauugcgacaaugcaggcucugucuccuucuucccccaagccgaaaccugcaaaguccaaucuaaccgcgucuucugcgacaccaugaacagucuuacccucccgucagaagucaaccucugcaacauagauaucuucaacccaaaauacgacugcaaaaucaugaccucaaaaaccgacguuuccucauccguuaucaccucccucggcgcaaucgucagcugcuacggcaagacaaagugcacggcuucaaacaaaaaccgcggaaucaucaagacauucagcaacggcugcgacuacguauccaacaaaggaguggacacagucuccguuggaaacacccucuacugcguaaacaaacaagaaggccaaucacucuacgucaaaggcgaacccaucaucaacuucuacgacccacucgucuuccccuccgacgaguucgacgccucaaucagccaagucaacgagaaaauuaaccagucacucgccuucauacgcaaauccgacgaacuucuacacaacguaaacgucggaaaaucaaccacaaacaucaugauuaccacaauuaucauagucaucauaguaauccuccugcuacucauagcagucggacucuuccuauacugcaaagcccgcuccaccccugucacccuauccaaagaccaacuuuccggcaucaacaacauagccuuuuccaacuaaggacuaguguccaccugucccuccugggcugcuggauugucucguuuuccugccaaauaaacaggaucagcgcuuuacagaucuaaaaaaaaaaaaaaaaaaaaaaaaaaaaaaaaaaaaaaaaaaaaaaaaaaaaaaaaaaaaaaaaugcaucccccccccccccccccccccccccccccccaaaggcucuuuucagagccaccagaauu

SEQ ID NO: 14037 - RNA, 2006 nt, Artificial Sequence
  mRNA product Design c-2 comprising derived and/or modified sequence from HRSV(Memphis-37)__AIY60640.1__F_DSCav1_mut1 (opt1)
gggagacuccugucgggcggaaguaggaggaguagaguuuaaaaacaguacucuuuuuccgguucgggacguaguugaagcaacgacaagccggauaaccgcucuugagacaggaagcuuaccauggagcugcccauccucaagaccaacgccaucaccacgauccuggccgcggugacccugugcuucgccagcucccagaacaucaccgaggaguucuaccagagcacgugcuccgccgucagcaagggcuaccucggcgcccugcgcaccgggugguacaccagcgugaucaccaucgagcuguccaacaucaaggagaacaagugcaacggcaccgacgccaaggugaagcucaucaagcaggagcuggacaaguacaagaacgcggucacggagcugcagcuccugaugcagagcaccccggccgccggcuccgggagcgcgaucugcuccggcaucgccgucugcaaggugcugcaccucgagggcgaggugaacaagaucaagaacgcccugcuguccaccaacaaggccgucgugagccucuccaacggggugagcguccugaccuucaaggugcuggaccucaagaacuacaucgacaagcagcugcugcccauccugaacaagcagagcugcuccauccccaacaucgagaccgucaucgaguuccagcagaagaacaaccgccuccuggagaucacgcgggaguucagcgugaacgcgggcgugaccacccccgucuccaccuacaugcugacgaacagcgagcuccugucccugaucaacgacaugccgaucaccaacgaccagaagaagcucaugagcaacaacgugcagaucgugcgccagcaguccuacagcaucaugugcaucaucaaggaggagguccuggccuacguggugcagcugccccucuacggggucaucgacacccccugcuggaagcugcacaccagcccccugugcacgaccaacaccaaggagggcuccaacaucugccucacccggacggaccgcgggugguacugcgacaacgccggcagcguguccuucuucccgcaggccgagaccugcaagguccagagcaaccggguguucugcgacaccaugaacucccugacccugcccagcgaggugaaccucugcaacaucgacaucuucaaccccaaguacgacugcaagaucaugacguccaagaccgacgucagcuccagcgugaucaccucccugggcgccaucgugagcugcuacgggaagaccaagugcacggcgagcaacaagaaccgcggcaucaucaagaccuucuccaacgggugcgacuacgucagcaacaagggcguggacaccguguccgucggcaacacccuguacugcgugaacaagcaggagggccagagccucuacgugaagggggagcccaucaucaacuucuacgacccgcuggucuuccccuccgacgaguucgacgccagcaucucccaggugaacgagaagaucaaccagagccuggccuucauccggaaguccgacgagcuccugcacaacgugaacgucggcaagagcaccacgaacaucaugaucaccaccaucaucaucgugaucaucgugauccugcugcuccugaucgccgucgggcuguuccucuacugcaaggcccgcuccacccccgugacgcugagcaaggaccagcuguccgggaucaacaacaucgcguucagcaacugaggacuaguggaagcauuuuccuggcugauuaaaagaaauuacucagcuauggucaucuguuccuguuagaaggcuaugcagcauauuauauacuaugcgcauguuaugaaaugcauaauaaaaaauuuuaaaaaaucuaaaagaucuaaaaaaaaaaaaaaaaaaaaaaaaaaaaaaaaaaaaaaaaaaaaaaaaaaaaaaaaaaaaaaaaugcaucccccccccccccccccccccccccccccccaaaggcucuuuucagagccaccagaauu

SEQ ID NO: 14038 - RNA, 2006 nt, Artificial Sequence
  mRNA product Design c-2 comprising derived and/or modified sequence from HRSV(Memphis-37)__AIY60640.1__F_DSCav1_mut1 (opt1)
gggagacuccugucgggcggaaguaggaggaguagaguuuaaaaacaguacucuuuuuccgguucgggacguaguugaagcaacgacaagccggauaaccgcucuugagacaggaagcuuaccauggagcugcccauccucaagaccaacgccaucaccacgauccuggccgcggugacccugugcuucgccagcucccagaacaucaccgaggaguucuaccagagcacgugcuccgccgucagcaagggcuaccucggggcccugcgcaccggcugguacaccuccgugaucaccaucgagcugagcaacaucaaggagaacaagugcaacgggaccgacgccaaggugaagcucaucaagcaggagcuggacaaguacaagaacgcggucacggagcugcagcuccugaugcaguccaccccggccgccggcagcggguccgccaucugcagcggcaucgcggugugcaaggugcugcaccucgagggcgaggucaacaagaucaagaacgcccugcuguccaccaacaaggccguggugagccucuccaacggggucagcgugcugaccuucaaggugcuggaccucaagaacuacaucgacaagcagcugcugcccauccucaacaagcaguccugcagcauccccaacaucgagacggucaucgaguuccagcagaagaacaaccggcugcuggagaucacccgcgaguucuccgugaacgccggcgugaccacccccgucagcacguacaugcucaccaacuccgagcugcugagccucaucaacgacaugccgaucaccaacgaccagaagaagcugaugagcaacaacgugcagaucgugcggcagcaguccuacagcaucaugugcaucaucaaggaggagguccuggccuacguggugcagcucccccuguacggggucaucgacacccccugcuggaagcugcacacgagcccccucugcaccaccaacaccaaggagggcuccaacaucugccugacgcgcaccgaccgggggugguacugcgacaacgcgggcuccgugagcuucuucccgcaggccgagaccugcaaggugcaguccaaccgcgucuucugcgacaccaugaacagccugacgcuccccuccgaggugaaccugugcaacaucgacaucuucaaccccaaguacgacugcaagaucaugaccagcaagaccgacgucuccagcuccgugaucaccagccugggcgccaucguguccugcuacgggaagacgaagugcaccgccagcaacaagaaccggggcaucaucaagaccuucuccaacgggugcgacuacgucagcaacaagggcguggacaccguguccgucggcaacacgcucuacugcgugaacaagcaggaggggcagagccuguacgugaagggcgagcccaucaucaacuucuacgacccgcuggucuuccccagcgacgaguucgacgccuccaucagccaggugaacgagaagaucaaccagucccucgcguucauccgcaagagcgacgagcugcugcacaacgugaacgucgggaaguccaccaccaacaucaugaucaccaccaucaucaucgugaucaucgugauccuccugcugcucaucgccgucggccuguuccuguacugcaaggcccggagcacgcccgugacccuguccaaggaccagcucagcgggaucaacaacaucgccuucuccaacugaggacuaguggaagcauuuuccuggcugauuaaaagaaauuacucagcuauggucaucuguuccuguuagaaggcuaugcagcauauuauauacuaugcgcauguuaugaaaugcauaauaaaaaauuuuaaaaaaucuaaaagaucuaaaaaaaaaaaaaaaaaaaaaaaaaaaaaaaaaaaaaaaaaaaaaaaaaaaaaaaaaaaaaaaaugcaucccccccccccccccccccccccccccccccaaaggcucuuuucagagccaccagaauu

SEQ ID NO: 14039 - RNA, 2006 nt, Artificial Sequence
  mRNA product Design c-2 comprising derived and/or modified sequence from HRSV(Memphis-37)__AIY60640.1__F_DSCav1_mut1 (opt2)
gggagacuccugucgggcggaaguaggaggaguagaguuuaaaaacaguacucuuuuuccgguucgggacguaguugaagcaacgacaagccggauaaccgcucuugagacaggaagcuuaccauggagcuccccauccucaagaccaacgccaucaccaccauccucgccgccgucacccucugcuucgccuccucccagaacaucaccgaggaguucuaccaguccaccugcuccgccgucuccaagggcuaccucggcgcccuccgcaccggcugguacaccuccgucaucaccaucgagcucuccaacaucaaggagaacaagugcaacggcaccgacgccaaggucaagcucaucaagcaggagcucgacaaguacaagaacgccgucaccgagcuccagcuccucaugcaguccacccccgccgccggcuccggcuccgccaucugcuccggcaucgccgucugcaagguccuccaccucgagggcgaggucaacaagaucaagaacgcccuccucuccaccaacaaggccgucgucucccucuccaacggcgucuccguccucaccuucaagguccucgaccucaagaacuacaucgacaagcagcuccuccccauccucaacaagcaguccugcuccauccccaacaucgagaccgucaucgaguuccagcagaagaacaaccgccuccucgagaucacccgcgaguucuccgucaacgccggcgucaccacccccgucuccaccuacaugcucaccaacuccgagcuccucucccucaucaacgacaugcccaucaccaacgaccagaagaagcucauguccaacaacguccagaucguccgccagcaguccuacuccaucaugugcaucaucaaggaggagguccucgccuacgucguccagcucccccucuacggcgucaucgacacccccugcuggaagcuccacaccuccccccucugcaccaccaacaccaaggagggcuccaacaucugccucacccgcaccgaccgcggcugguacugcgacaacgccggcuccgucuccuucuucccccaggccgagaccugcaagguccaguccaaccgcgucuucugcgacaccaugaacucccucacccuccccuccgaggucaaccucugcaacaucgacaucuucaaccccaaguacgacugcaagaucaugaccuccaagaccgacgucuccuccuccgucaucaccucccucggcgccaucgucuccugcuacggcaagaccaagugcaccgccuccaacaagaaccgcggcaucaucaagaccuucuccaacggcugcgacuacgucuccaacaagggcgucgacaccgucuccgucggcaacacccucuacugcgucaacaagcaggagggccagucccucuacgucaagggcgagcccaucaucaacuucuacgacccccucgucuuccccuccgacgaguucgacgccuccaucucccaggucaacgagaagaucaaccagucccucgccuucauccgcaaguccgacgagcuccuccacaacgucaacgucggcaaguccaccaccaacaucaugaucaccaccaucaucaucgucaucaucgucauccuccuccuccucaucgccgucggccucuuccucuacugcaaggcccgcuccacccccgucacccucuccaaggaccagcucuccggcaucaacaacaucgccuucuccaacugaggacuaguggaagcauuuuccuggcugauuaaaagaaauuacucagcuauggucaucuguuccuguuagaaggcuaugcagcauauuauauacuaugcgcauguuaugaaaugcauaauaaaaaauuuuaaaaaaucuaaaagaucuaaaaaaaaaaaaaaaaaaaaaaaaaaaaaaaaaaaaaaaaaaaaaaaaaaaaaaaaaaaaaaaaugcaucccccccccccccccccccccccccccccccaaaggcucuuuucagagccaccagaauu

SEQ ID NO: 14040 - RNA, 2006 nt, Artificial Sequence
  mRNA product Design c-2 comprising derived and/or modified sequence from HRSV(Memphis-37)__AIY60640.1__F_DSCav1_mut1 (opt3)
gggagacuccugucgggcggaaguaggaggaguagaguuuaaaaacaguacucuuuuuccgguucgggacguaguugaagcaacgacaagccggauaaccgcucuugagacaggaagcuuaccauggagcugcccauccucaagaccaacgccauuacaacuauacuugcugcagugacgcugugcuucgccagcucccagaauaucaccgaagaguuuuaccaaucuacauguucagcggucaguaaaggcuauuugggggcuuuaagaacuggaugguacaccagcguuauuacaaucgaacuguccaacauuaaggagaauaaaugcaacgguaccgacgccaaggugaaacuaaucaagcaggaacucgauaaguauaaaaaugcaguaacugagcugcagcuucugaugcagucuacuccugccgcuggcucggggucagcaauauguagcggaaucgccgugugcaaggucuugcaccucgagggcgaagugaacaaaauuaagaaugcucugcugaguaccaacaaagccguugugucccucucuaauggugucagcguguuaacguucaagguacuggaccuuaagaacuacaucgauaaacaauugcugccaauucuaaauaagcaguccuguucaaucccgaacauagagacuguuauugaauuucagcagaaaaauaacaggcuccuggagaucacccgggaguucagugugaaugcgggggucacaacucccgugagcaccuauaugcuuacaaacucugaacuguugucccucauuaacgacaugccuaucaccaaugaucaaaagaaacugaugucaaacaaugugcagaucguccgccagcagagcuacaguauuaugugcauaaucaaggaggaaguuuuagcauaugugguacaacugccacucuacggagugauugacacgcccuguuggaaacuucauacuucuccucugugcacaaccaacacuaaggagggcuccaauaucuguuugacacgaaccgaucguggcugguacugcgacaacgccgggagcgucucguuuuucccacaggcugaaacguguaaggugcagucuaauagaguguuuugcgauaccaugaacucccuaacacugcccucagagguuaaucucugcaacauagacauuuucaauccuaaauaugauuguaagaucaugacaaguaaaaccgacgucagcuccucugugaucacaagccugggagccauuguaucaugcuacgguaagacuaaauguaccgcaaguaacaagaauaggggcaucauuaagacauuuuccaacgggugcgauuauguuagcaauaaaggaguggacaccgucucugugggcaacacucuuuacugugucaacaagcaagagggucagucacuguaugugaaaggggaaccaauaaucaauuucuacgacccguugguuuuucccagugaugaguucgacgcuagcauuucccaggugaacgaaaagaucaaucagucucucgccuuuauccggaaaucggaugagcuguuacacaacguaaaugucggaaagagcacgacaaacauuaugauaaccacuaucauuaucgugauuaucguuauacugcuacuccugaucgcggugggccuuuucuuguauugcaaggcccgcuccaccccugucacacugucaaaagaccaacucaguggcauuaauaacaucgcauucucuaauugaggacuaguggaagcauuuuccuggcugauuaaaagaaauuacucagcuauggucaucuguuccuguuagaaggcuaugcagcauauuauauacuaugcgcauguuaugaaaugcauaauaaaaaauuuuaaaaaaucuaaaagaucuaaaaaaaaaaaaaaaaaaaaaaaaaaaaaaaaaaaaaaaaaaaaaaaaaaaaaaaaaaaaaaaaugcaucccccccccccccccccccccccccccccccaaaggcucuuuucagagccaccagaauu

SEQ ID NO: 14041 - RNA, 2006 nt, Artificial Sequence
  mRNA product Design c-2 comprising derived and/or modified sequence from HRSV(Memphis-37)__AIY60640.1__F_DSCav1_mut1 (opt4)
gggagacuccugucgggcggaaguaggaggaguagaguuuaaaaacaguacucuuuuuccgguucgggacguaguugaagcaacgacaagccggauaaccgcucuugagacaggaagcuuaccauggagcugcccauccugaagaccaacgccaucaccaccauccuggccgccgugacccugugcuucgccagcagccagaacaucaccgaggaguucuaccagagcaccugcagcgccgugagcaagggcuaccugggcgcccugagaaccggcugguacaccagcgugaucaccaucgagcugagcaacaucaaggagaacaagugcaacggcaccgacgccaaggugaagcugaucaagcaggagcuggacaaguacaagaacgccgugaccgagcugcagcugcugaugcagagcacccccgccgccggcagcggcagcgccaucugcagcggcaucgccgugugcaaggugcugcaccuggagggcgaggugaacaagaucaagaacgcccugcugagcaccaacaaggccguggugagccugagcaacggcgugagcgugcugaccuucaaggugcuggaccugaagaacuacaucgacaagcagcugcugcccauccugaacaagcagagcugcagcauccccaacaucgagaccgugaucgaguuccagcagaagaacaacagacugcuggagaucaccagagaguucagcgugaacgccggcgugaccacccccgugagcaccuacaugcugaccaacagcgagcugcugagccugaucaacgacaugcccaucaccaacgaccagaagaagcugaugagcaacaacgugcagaucgugagacagcagagcuacagcaucaugugcaucaucaaggaggaggugcuggccuacguggugcagcugccccuguacggcgugaucgacacccccugcuggaagcugcacaccagcccccugugcaccaccaacaccaaggagggcagcaacaucugccugaccagaaccgacagaggcugguacugcgacaacgccggcagcgugagcuucuucccccaggccgagaccugcaaggugcagagcaacagaguguucugcgacaccaugaacagccugacccugcccagcgaggugaaccugugcaacaucgacaucuucaaccccaaguacgacugcaagaucaugaccagcaagaccgacgugagcagcagcgugaucaccagccugggcgccaucgugagcugcuacggcaagaccaagugcaccgccagcaacaagaacagaggcaucaucaagaccuucagcaacggcugcgacuacgugagcaacaagggcguggacaccgugagcgugggcaacacccuguacugcgugaacaagcaggagggccagagccuguacgugaagggcgagcccaucaucaacuucuacgacccccugguguuccccagcgacgaguucgacgccagcaucagccaggugaacgagaagaucaaccagagccuggccuucaucagaaagagcgacgagcugcugcacaacgugaacgugggcaagagcaccaccaacaucaugaucaccaccaucaucaucgugaucaucgugauccugcugcugcugaucgccgugggccuguuccuguacugcaaggccagaagcacccccgugacccugagcaaggaccagcugagcggcaucaacaacaucgccuucagcaacugaggacuaguggaagcauuuuccuggcugauuaaaagaaauuacucagcuauggucaucuguuccuguuagaaggcuaugcagcauauuauauacuaugcgcauguuaugaaaugcauaauaaaaaauuuuaaaaaaucuaaaagaucuaaaaaaaaaaaaaaaaaaaaaaaaaaaaaaaaaaaaaaaaaaaaaaaaaaaaaaaaaaaaaaaaugcaucccccccccccccccccccccccccccccccaaaggcucuuuucagagccaccagaauu

SEQ ID NO: 14042 - RNA, 2006 nt, Artificial Sequence
  mRNA product Design c-2 comprising derived and/or modified sequence from HRSV(Memphis-37)__AIY60640.1__F_DSCav1_mut1 (opt5)
gggagacuccugucgggcggaaguaggaggaguagaguuuaaaaacaguacucuuuuuccgguucgggacguaguugaagcaacgacaagccggauaaccgcucuugagacaggaagcuuaccauggagcugcccauccucaagaccaacgccauuacaacgauccuggcugccgugacccuuugcuucgcgagcucccagaauauuacagaagaguuuuaccaaucuaccuguagcgcugucuccaaaggcuaucugggggcccucagaacaggaugguacaccucuguuaucacaauugaacugagcaacaucaaggagaauaaaugcaacggcaccgacgccaaggugaaacuuaucaagcaggaacuggauaaguauaaaaaugcugugacggagcuccagcugcugaugcaguccaccccugccgcugggucuggaagcgccauuuguuccggcaucgcggucugcaaggugcuccaccuggagggggaaguuaacaaaauuaagaaugcccuucugagcacaaacaaagcuguggucucucucuccaauggagugagcguucugaccuucaaggugcuugaccugaagaacuacaucgauaaacaacuccugccgauucugaauaagcagucuuguuccauccccaacauugagacagucaucgaauuucagcagaaaaauaaccggcuccuggagaucacccgcgaguucagcgugaaugccggcgugacgacaccugucucuaccuauaugcuuacaaacuccgaacugcucagccugauuaacgacaugcccaucaccaaugaucaaaagaaacuuauguccaacaauguucagauugugagacagcagucuuacagcaucaugugcauuaucaaggaggaagugcuggcuuaugucgugcaacucccucuguacggcguuaucgacacccccuguuggaaacugcauacauccccucucugcacgaccaacacaaaggaggggagcaauauuugucugacccggacagaucgcggaugguacugcgacaacgccggcucuguguccuuuuucccgcaggcggaaaccuguaagguccagagcaauagaguguuuugcgauacgaugaacucucuuacacugcccagcgagguuaaucucugcaacaucgacauuuucaauccuaaauaugauuguaagaucaugaccuccaaaaccgacgugucuagcuccgucauuacaagccugggggccaucgugucuugcuacggaaagaccaaauguacagcuuccaacaagaaucggggcaucauuaagacguuuagcaacgggugcgauuaugucucuaauaaaggaguggacaccguuuccgugggcaacacacuuuacugugucaacaagcaagagggccagagccuguaugugaaaggggaacccaucauuaauuucuacgacccucucguuuuucccuccgaugaguucgacgccucuaucagccaggugaacgaaaagauuaaucagucccuggcuuuuauccgcaaaucugaugagcugcuccacaacgucaaugugggaaagagcaccacaaacauuaugaucaccacgaucauuaucgugauuaucguuauucugcuucugcucaucgccgucggccuguuccuguauugcaaggccagauccaccccggugacacuuagcaaagaccaacucucugggaucaauaacauugcuuucuccaauugaggacuaguggaagcauuuuccuggcugauuaaaagaaauuacucagcuauggucaucuguuccuguuagaaggcuaugcagcauauuauauacuaugcgcauguuaugaaaugcauaauaaaaaauuuuaaaaaaucuaaaagaucuaaaaaaaaaaaaaaaaaaaaaaaaaaaaaaaaaaaaaaaaaaaaaaaaaaaaaaaaaaaaaaaaugcaucccccccccccccccccccccccccccccccaaaggcucuuuucagagccaccagaauu

SEQ ID NO: 14043 - RNA, 2006 nt, Artificial Sequence
  mRNA product Design c-2 comprising derived and/or modified sequence from HRSV(Memphis-37)__AIY60640.1__F_DSCav1_mut1 (opt6)
gggagacuccugucgggcggaaguaggaggaguagaguuuaaaaacaguacucuuuuuccgguucgggacguaguugaagcaacgacaagccggauaaccgcucuugagacaggaagcuuaccauggaacuuccaauucuaaaaaccaaugcuauaacaacaauauuagcagcaguuacauuaugcuucgccucaucacaaaauaucacagaagaauuuuaccaauccacaugcucagcaguaucuaaaggguaccuaggagcccuacgaacaggaugguacacaucaguaauaacaauagaacucucaaacaucaaagaaaacaaaugcaauggaacagacgcuaaaguaaaauuaauaaaacaagaacuagacaaauacaaaaacgccgucaccgaacuucaguuacucaugcaaagcacaccugcagcaggaucagguucagcaauaugcucaggaauagcaguuugcaaaguauuacaccuagaaggugaagucaacaaaauaaaaaacgcacuucuaaguacuaacaaagcuguaguaucauuaucaaacggaguauccguacuaaccuuuaaaguccuagaccuaaaaaacuacauagacaaacaacuacucccaauacucaauaaacaauccugcucaauucccaacaucgaaacaguaauagaauuucaacaaaaaaacaaucgccuucuagaaauaacaagagaauuuucagucaacgccggaguaacaacaccaguaucaacauauaugcuaacaaacagugaacuauuauccuuaauaaacgacaugccaauaacaaaugaccaaaaaaaacuaauguccaauaauguccaaauaguaagacaacaaagcuauucaauuauguguauaauaaaagaagaaguauuagcauacguaguucaacuaccacuauauggcguuauagacacaccaugcuggaaauuacacacaagcccacuaugcacaacaaauacaaaagaaggauccaacauuugcuuaacuagaacugacagaggaugguacugcgacaacgcuggaucagucucuuucuucccacaagcagaaaccuguaaaguacaaucaaauagagucuucugcgacacaaugaacucacuaacucucccaucugaaguaaacuuaugcaacaucgauauauuuaacccaaaauacgauuguaaaauaaugacauccaaaacagacguuucaucaagcguaaucaccucccucggagcaaucguaagcugcuacgguaaaacaaaaugcacagcauccaacaaaaacagaggcaucauaaaaacauucucaaacggaugugacuauguaucaaacaaaggaguagacacaguuucaguaggcaauaccuuauacugugucaauaaacaagaaggacaaucacuauauguaaaaggagaaccuauaauaaacuucuacgacccccucgucuucccuagcgaugaauuugacgcaucaauaucgcaaguaaacgaaaaaauaaaccaaucauuagccuuuauaagaaaaucagacgaauuauuacacaacguaaacguggggaaaagcacaacuaacaucaugauaacaacuaucauaauuguaaucaucgucauccuauuacuccuaaucgcaguaggacuauuccuauacugcaaagcuagaucaacaccagucacccuaucgaaagaucaauugucaggaauaaacaauauagccuuuucaaauuaaggacuaguggaagcauuuuccuggcugauuaaaagaaauuacucagcuauggucaucuguuccuguuagaaggcuaugcagcauauuauauacuaugcgcauguuaugaaaugcauaauaaaaaauuuuaaaaaaucuaaaagaucuaaaaaaaaaaaaaaaaaaaaaaaaaaaaaaaaaaaaaaaaaaaaaaaaaaaaaaaaaaaaaaaaugcaucccccccccccccccccccccccccccccccaaaggcucuuuucagagccaccagaauu

SEQ ID NO: 14044 - RNA, 2006 nt, Artificial Sequence
  mRNA product Design c-2 comprising derived and/or modified sequence from HRSV(Memphis-37)__AIY60640.1__F_DSCav1_mut1 (opt11)
gggagacuccugucgggcggaaguaggaggaguagaguuuaaaaacaguacucuuuuuccgguucgggacguaguugaagcaacgacaagccggauaaccgcucuugagacaggaagcuuaccauggaacuccccauccucaaaacgaacgccaucacaaccauccucgccgccgucacccucugcuucgcgucaucccaaaacauaacugaagaguucuaucaaucaaccugcuccgcagucucaaaaggcuaccucggcgcccuacggaccggcugguacacaagcgucaucacaauagaacuuuccaacaucaaagaaaacaaauguaacggcaccgacgcaaaagucaaacucauaaaacaagaacuagacaaauauaaaaacgccguaacugaacuacaacuccucaugcaaucaacuccugcagccgguagcggcuccgcaaucugcucaggcaucgcagucugcaaagucuuacaccuagaaggcgaagucaacaaaaucaagaacgcccuacuauccacaaacaaagcaguagucucucuauccaacggagucuccguccucacauucaaaguacucgaccuaaagaacuacaucgacaaacaacuacuaccaaucuuaaacaaacaauccugcucaaucccuaacauugaaaccgucauagaguuccaacagaaaaacaaccgccuccucgaaauaaccagagaguucucagucaacgccggcgucaccaccccggucucaaccuacaugcuaaccaacucugaacuucucagccuaaucaacgacaugcccauuaccaacgaccaaaagaaacucauguccaauaacguccaaaucguucgacaacaauccuacucaaucaugugcaucauaaaagaagaaguccuagcauacgucguccaacucccacuauacggcguaaucgacacccccugcuggaaacuccacaccuccccucucuguaccaccaacaccaaagaaggguccaacaucugccucacgcgcaccgaccgaggcugguauugcgacaaugcaggcucugucuccuucuucccccaagccgaaaccugcaaaguccaaucuaaccgcgucuucugcgacaccaugaacagucuuacccucccgucagaagucaaccucugcaacauagauaucuucaacccaaaauacgacugcaaaaucaugaccucaaaaaccgacguuuccucauccguuaucaccucccucggcgcaaucgucagcugcuacggcaagacaaagugcacggcuucaaacaaaaaccgcggaaucaucaagacauucagcaacggcugcgacuacguauccaacaaaggaguggacacagucuccguuggaaacacccucuacugcguaaacaaacaagaaggccaaucacucuacgucaaaggcgaacccaucaucaacuucuacgacccacucgucuuccccuccgacgaguucgacgccucaaucagccaagucaacgagaaaauuaaccagucacucgccuucauacgcaaauccgacgaacuucuacacaacguaaacgucggaaaaucaaccacaaacaucaugauuaccacaauuaucauagucaucauaguaauccuccugcuacucauagcagucggacucuuccuauacugcaaagcccgcuccaccccugucacccuauccaaagaccaacuuuccggcaucaacaacauagccuuuuccaacuaaggacuaguggaagcauuuuccuggcugauuaaaagaaauuacucagcuauggucaucuguuccuguuagaaggcuaugcagcauauuauauacuaugcgcauguuaugaaaugcauaauaaaaaauuuuaaaaaaucuaaaagaucuaaaaaaaaaaaaaaaaaaaaaaaaaaaaaaaaaaaaaaaaaaaaaaaaaaaaaaaaaaaaaaaaugcaucccccccccccccccccccccccccccccccaaaggcucuuuucagagccaccagaauu

SEQ ID NO: 14045 - RNA, 1983 nt, Artificial Sequence
  mRNA product Design c-3 comprising derived and/or modified sequence from HRSV(Memphis-37)__AIY60640.1__F_DSCav1_mut1 (opt1)
gggagaguccgcucagccagguugcagaagcggcuuagcguguguccuaaucuucucucugcguguagguaggccugugccgcaaacaagcuuaccauggagcugcccauccucaagaccaacgccaucaccacgauccuggccgcggugacccugugcuucgccagcucccagaacaucaccgaggaguucuaccagagcacgugcuccgccgucagcaagggcuaccucggcgcccugcgcaccgggugguacaccagcgugaucaccaucgagcuguccaacaucaaggagaacaagugcaacggcaccgacgccaaggugaagcucaucaagcaggagcuggacaaguacaagaacgcggucacggagcugcagcuccugaugcagagcaccccggccgccggcuccgggagcgcgaucugcuccggcaucgccgucugcaaggugcugcaccucgagggcgaggugaacaagaucaagaacgcccugcuguccaccaacaaggccgucgugagccucuccaacggggugagcguccugaccuucaaggugcuggaccucaagaacuacaucgacaagcagcugcugcccauccugaacaagcagagcugcuccauccccaacaucgagaccgucaucgaguuccagcagaagaacaaccgccuccuggagaucacgcgggaguucagcgugaacgcgggcgugaccacccccgucuccaccuacaugcugacgaacagcgagcuccugucccugaucaacgacaugccgaucaccaacgaccagaagaagcucaugagcaacaacgugcagaucgugcgccagcaguccuacagcaucaugugcaucaucaaggaggagguccuggccuacguggugcagcugccccucuacggggucaucgacacccccugcuggaagcugcacaccagcccccugugcacgaccaacaccaaggagggcuccaacaucugccucacccggacggaccgcgggugguacugcgacaacgccggcagcguguccuucuucccgcaggccgagaccugcaagguccagagcaaccggguguucugcgacaccaugaacucccugacccugcccagcgaggugaaccucugcaacaucgacaucuucaaccccaaguacgacugcaagaucaugacguccaagaccgacgucagcuccagcgugaucaccucccugggcgccaucgugagcugcuacgggaagaccaagugcacggcgagcaacaagaaccgcggcaucaucaagaccuucuccaacgggugcgacuacgucagcaacaagggcguggacaccguguccgucggcaacacccuguacugcgugaacaagcaggagggccagagccucuacgugaagggggagcccaucaucaacuucuacgacccgcuggucuuccccuccgacgaguucgacgccagcaucucccaggugaacgagaagaucaaccagagccuggccuucauccggaaguccgacgagcuccugcacaacgugaacgucggcaagagcaccacgaacaucaugaucaccaccaucaucaucgugaucaucgugauccugcugcuccugaucgccgucgggcuguuccucuacugcaaggcccgcuccacccccgugacgcugagcaaggaccagcuguccgggaucaacaacaucgcguucagcaacugaggacuaguacuggcugcaucucccuuuccucuguccuccauccuucucccaggauggugaagggggaccugguacccagugauccccaccccaggauccuaaaucaugacuuaccugcuaauaaaaacucauuggaaaagugagaagaucuaaaaaaaaaaaaaaaaaaaaaaaaaaaaaaaaaaaaaaaaaaaaaaaaaaaaaaaaaaaaaaaaugcaucccccccccccccccccccccccccccccccaaaggcucuuuucagagccaccagaauu

SEQ ID NO: 14046 - RNA, 1983 nt, Artificial Sequence
  mRNA product Design c-3 comprising derived and/or modified sequence from HRSV(Memphis-37)__AIY60640.1__F_DSCav1_mut1 (opt1)
gggagaguccgcucagccagguugcagaagcggcuuagcguguguccuaaucuucucucugcguguagguaggccugugccgcaaacaagcuuaccauggagcugcccauccucaagaccaacgccaucaccacgauccuggccgcggugacccugugcuucgccagcucccagaacaucaccgaggaguucuaccagagcacgugcuccgccgucagcaagggcuaccucggggcccugcgcaccggcugguacaccuccgugaucaccaucgagcugagcaacaucaaggagaacaagugcaacgggaccgacgccaaggugaagcucaucaagcaggagcuggacaaguacaagaacgcggucacggagcugcagcuccugaugcaguccaccccggccgccggcagcggguccgccaucugcagcggcaucgcggugugcaaggugcugcaccucgagggcgaggucaacaagaucaagaacgcccugcuguccaccaacaaggccguggugagccucuccaacggggucagcgugcugaccuucaaggugcuggaccucaagaacuacaucgacaagcagcugcugcccauccucaacaagcaguccugcagcauccccaacaucgagacggucaucgaguuccagcagaagaacaaccggcugcuggagaucacccgcgaguucuccgugaacgccggcgugaccacccccgucagcacguacaugcucaccaacuccgagcugcugagccucaucaacgacaugccgaucaccaacgaccagaagaagcugaugagcaacaacgugcagaucgugcggcagcaguccuacagcaucaugugcaucaucaaggaggagguccuggccuacguggugcagcucccccuguacggggucaucgacacccccugcuggaagcugcacacgagcccccucugcaccaccaacaccaaggagggcuccaacaucugccugacgcgcaccgaccgggggugguacugcgacaacgcgggcuccgugagcuucuucccgcaggccgagaccugcaaggugcaguccaaccgcgucuucugcgacaccaugaacagccugacgcuccccuccgaggugaaccugugcaacaucgacaucuucaaccccaaguacgacugcaagaucaugaccagcaagaccgacgucuccagcuccgugaucaccagccugggcgccaucguguccugcuacgggaagacgaagugcaccgccagcaacaagaaccggggcaucaucaagaccuucuccaacgggugcgacuacgucagcaacaagggcguggacaccguguccgucggcaacacgcucuacugcgugaacaagcaggaggggcagagccuguacgugaagggcgagcccaucaucaacuucuacgacccgcuggucuuccccagcgacgaguucgacgccuccaucagccaggugaacgagaagaucaaccagucccucgcguucauccgcaagagcgacgagcugcugcacaacgugaacgucgggaaguccaccaccaacaucaugaucaccaccaucaucaucgugaucaucgugauccuccugcugcucaucgccgucggccuguuccuguacugcaaggcccggagcacgcccgugacccuguccaaggaccagcucagcgggaucaacaacaucgccuucuccaacugaggacuaguacuggcugcaucucccuuuccucuguccuccauccuucucccaggauggugaagggggaccugguacccagugauccccaccccaggauccuaaaucaugacuuaccugcuaauaaaaacucauuggaaaagugagaagaucuaaaaaaaaaaaaaaaaaaaaaaaaaaaaaaaaaaaaaaaaaaaaaaaaaaaaaaaaaaaaaaaaugcaucccccccccccccccccccccccccccccccaaaggcucuuuucagagccaccagaauu

SEQ ID NO: 14047 - RNA, 1983 nt, Artificial Sequence
  mRNA product Design c-3 comprising derived and/or modified sequence from HRSV(Memphis-37)__AIY60640.1__F_DSCav1_mut1 (opt2)
gggagaguccgcucagccagguugcagaagcggcuuagcguguguccuaaucuucucucugcguguagguaggccugugccgcaaacaagcuuaccauggagcuccccauccucaagaccaacgccaucaccaccauccucgccgccgucacccucugcuucgccuccucccagaacaucaccgaggaguucuaccaguccaccugcuccgccgucuccaagggcuaccucggcgcccuccgcaccggcugguacaccuccgucaucaccaucgagcucuccaacaucaaggagaacaagugcaacggcaccgacgccaaggucaagcucaucaagcaggagcucgacaaguacaagaacgccgucaccgagcuccagcuccucaugcaguccacccccgccgccggcuccggcuccgccaucugcuccggcaucgccgucugcaagguccuccaccucgagggcgaggucaacaagaucaagaacgcccuccucuccaccaacaaggccgucgucucccucuccaacggcgucuccguccucaccuucaagguccucgaccucaagaacuacaucgacaagcagcuccuccccauccucaacaagcaguccugcuccauccccaacaucgagaccgucaucgaguuccagcagaagaacaaccgccuccucgagaucacccgcgaguucuccgucaacgccggcgucaccacccccgucuccaccuacaugcucaccaacuccgagcuccucucccucaucaacgacaugcccaucaccaacgaccagaagaagcucauguccaacaacguccagaucguccgccagcaguccuacuccaucaugugcaucaucaaggaggagguccucgccuacgucguccagcucccccucuacggcgucaucgacacccccugcuggaagcuccacaccuccccccucugcaccaccaacaccaaggagggcuccaacaucugccucacccgcaccgaccgcggcugguacugcgacaacgccggcuccgucuccuucuucccccaggccgagaccugcaagguccaguccaaccgcgucuucugcgacaccaugaacucccucacccuccccuccgaggucaaccucugcaacaucgacaucuucaaccccaaguacgacugcaagaucaugaccuccaagaccgacgucuccuccuccgucaucaccucccucggcgccaucgucuccugcuacggcaagaccaagugcaccgccuccaacaagaaccgcggcaucaucaagaccuucuccaacggcugcgacuacgucuccaacaagggcgucgacaccgucuccgucggcaacacccucuacugcgucaacaagcaggagggccagucccucuacgucaagggcgagcccaucaucaacuucuacgacccccucgucuuccccuccgacgaguucgacgccuccaucucccaggucaacgagaagaucaaccagucccucgccuucauccgcaaguccgacgagcuccuccacaacgucaacgucggcaaguccaccaccaacaucaugaucaccaccaucaucaucgucaucaucgucauccuccuccuccucaucgccgucggccucuuccucuacugcaaggcccgcuccacccccgucacccucuccaaggaccagcucuccggcaucaacaacaucgccuucuccaacugaggacuaguacuggcugcaucucccuuuccucuguccuccauccuucucccaggauggugaagggggaccugguacccagugauccccaccccaggauccuaaaucaugacuuaccugcuaauaaaaacucauuggaaaagugagaagaucuaaaaaaaaaaaaaaaaaaaaaaaaaaaaaaaaaaaaaaaaaaaaaaaaaaaaaaaaaaaaaaaaugcaucccccccccccccccccccccccccccccccaaaggcucuuuucagagccaccagaauu

SEQ ID NO: 14048 - RNA, 1983 nt, Artificial Sequence
  mRNA product Design c-3 comprising derived and/or modified sequence from HRSV(Memphis-37)__AIY60640.1__F_DSCav1_mut1 (opt3)
gggagaguccgcucagccagguugcagaagcggcuuagcguguguccuaaucuucucucugcguguagguaggccugugccgcaaacaagcuuaccauggagcugcccauccucaagaccaacgccauuacaacuauacuugcugcagugacgcugugcuucgccagcucccagaauaucaccgaagaguuuuaccaaucuacauguucagcggucaguaaaggcuauuugggggcuuuaagaacuggaugguacaccagcguuauuacaaucgaacuguccaacauuaaggagaauaaaugcaacgguaccgacgccaaggugaaacuaaucaagcaggaacucgauaaguauaaaaaugcaguaacugagcugcagcuucugaugcagucuacuccugccgcuggcucggggucagcaauauguagcggaaucgccgugugcaaggucuugcaccucgagggcgaagugaacaaaauuaagaaugcucugcugaguaccaacaaagccguugugucccucucuaauggugucagcguguuaacguucaagguacuggaccuuaagaacuacaucgauaaacaauugcugccaauucuaaauaagcaguccuguucaaucccgaacauagagacuguuauugaauuucagcagaaaaauaacaggcuccuggagaucacccgggaguucagugugaaugcgggggucacaacucccgugagcaccuauaugcuuacaaacucugaacuguugucccucauuaacgacaugccuaucaccaaugaucaaaagaaacugaugucaaacaaugugcagaucguccgccagcagagcuacaguauuaugugcauaaucaaggaggaaguuuuagcauaugugguacaacugccacucuacggagugauugacacgcccuguuggaaacuucauacuucuccucugugcacaaccaacacuaaggagggcuccaauaucuguuugacacgaaccgaucguggcugguacugcgacaacgccgggagcgucucguuuuucccacaggcugaaacguguaaggugcagucuaauagaguguuuugcgauaccaugaacucccuaacacugcccucagagguuaaucucugcaacauagacauuuucaauccuaaauaugauuguaagaucaugacaaguaaaaccgacgucagcuccucugugaucacaagccugggagccauuguaucaugcuacgguaagacuaaauguaccgcaaguaacaagaauaggggcaucauuaagacauuuuccaacgggugcgauuauguuagcaauaaaggaguggacaccgucucugugggcaacacucuuuacugugucaacaagcaagagggucagucacuguaugugaaaggggaaccaauaaucaauuucuacgacccguugguuuuucccagugaugaguucgacgcuagcauuucccaggugaacgaaaagaucaaucagucucucgccuuuauccggaaaucggaugagcuguuacacaacguaaaugucggaaagagcacgacaaacauuaugauaaccacuaucauuaucgugauuaucguuauacugcuacuccugaucgcggugggccuuuucuuguauugcaaggcccgcuccaccccugucacacugucaaaagaccaacucaguggcauuaauaacaucgcauucucuaauugaggacuaguacuggcugcaucucccuuuccucuguccuccauccuucucccaggauggugaagggggaccugguacccagugauccccaccccaggauccuaaaucaugacuuaccugcuaauaaaaacucauuggaaaagugagaagaucuaaaaaaaaaaaaaaaaaaaaaaaaaaaaaaaaaaaaaaaaaaaaaaaaaaaaaaaaaaaaaaaaugcaucccccccccccccccccccccccccccccccaaaggcucuuuucagagccaccagaauu

SEQ ID NO: 14049 - RNA, 1983 nt, Artificial Sequence
  mRNA product Design c-3 comprising derived and/or modified sequence from HRSV(Memphis-37)__AIY60640.1__F_DSCav1_mut1 (opt4)
gggagaguccgcucagccagguugcagaagcggcuuagcguguguccuaaucuucucucugcguguagguaggccugugccgcaaacaagcuuaccauggagcugcccauccugaagaccaacgccaucaccaccauccuggccgccgugacccugugcuucgccagcagccagaacaucaccgaggaguucuaccagagcaccugcagcgccgugagcaagggcuaccugggcgcccugagaaccggcugguacaccagcgugaucaccaucgagcugagcaacaucaaggagaacaagugcaacggcaccgacgccaaggugaagcugaucaagcaggagcuggacaaguacaagaacgccgugaccgagcugcagcugcugaugcagagcacccccgccgccggcagcggcagcgccaucugcagcggcaucgccgugugcaaggugcugcaccuggagggcgaggugaacaagaucaagaacgcccugcugagcaccaacaaggccguggugagccugagcaacggcgugagcgugcugaccuucaaggugcuggaccugaagaacuacaucgacaagcagcugcugcccauccugaacaagcagagcugcagcauccccaacaucgagaccgugaucgaguuccagcagaagaacaacagacugcuggagaucaccagagaguucagcgugaacgccggcgugaccacccccgugagcaccuacaugcugaccaacagcgagcugcugagccugaucaacgacaugcccaucaccaacgaccagaagaagcugaugagcaacaacgugcagaucgugagacagcagagcuacagcaucaugugcaucaucaaggaggaggugcuggccuacguggugcagcugccccuguacggcgugaucgacacccccugcuggaagcugcacaccagcccccugugcaccaccaacaccaaggagggcagcaacaucugccugaccagaaccgacagaggcugguacugcgacaacgccggcagcgugagcuucuucccccaggccgagaccugcaaggugcagagcaacagaguguucugcgacaccaugaacagccugacccugcccagcgaggugaaccugugcaacaucgacaucuucaaccccaaguacgacugcaagaucaugaccagcaagaccgacgugagcagcagcgugaucaccagccugggcgccaucgugagcugcuacggcaagaccaagugcaccgccagcaacaagaacagaggcaucaucaagaccuucagcaacggcugcgacuacgugagcaacaagggcguggacaccgugagcgugggcaacacccuguacugcgugaacaagcaggagggccagagccuguacgugaagggcgagcccaucaucaacuucuacgacccccugguguuccccagcgacgaguucgacgccagcaucagccaggugaacgagaagaucaaccagagccuggccuucaucagaaagagcgacgagcugcugcacaacgugaacgugggcaagagcaccaccaacaucaugaucaccaccaucaucaucgugaucaucgugauccugcugcugcugaucgccgugggccuguuccuguacugcaaggccagaagcacccccgugacccugagcaaggaccagcugagcggcaucaacaacaucgccuucagcaacugaggacuaguacuggcugcaucucccuuuccucuguccuccauccuucucccaggauggugaagggggaccugguacccagugauccccaccccaggauccuaaaucaugacuuaccugcuaauaaaaacucauuggaaaagugagaagaucuaaaaaaaaaaaaaaaaaaaaaaaaaaaaaaaaaaaaaaaaaaaaaaaaaaaaaaaaaaaaaaaaugcaucccccccccccccccccccccccccccccccaaaggcucuuuucagagccaccagaauu

SEQ ID NO: 14050 - RNA, 1983 nt, Artificial Sequence
  mRNA product Design c-3 comprising derived and/or modified sequence from HRSV(Memphis-37)__AIY60640.1__F_DSCav1_mut1 (opt5)
gggagaguccgcucagccagguugcagaagcggcuuagcguguguccuaaucuucucucugcguguagguaggccugugccgcaaacaagcuuaccauggagcugcccauccucaagaccaacgccauuacaacgauccuggcugccgugacccuuugcuucgcgagcucccagaauauuacagaagaguuuuaccaaucuaccuguagcgcugucuccaaaggcuaucugggggcccucagaacaggaugguacaccucuguuaucacaauugaacugagcaacaucaaggagaauaaaugcaacggcaccgacgccaaggugaaacuuaucaagcaggaacuggauaaguauaaaaaugcugugacggagcuccagcugcugaugcaguccaccccugccgcugggucuggaagcgccauuuguuccggcaucgcggucugcaaggugcuccaccuggagggggaaguuaacaaaauuaagaaugcccuucugagcacaaacaaagcuguggucucucucuccaauggagugagcguucugaccuucaaggugcuugaccugaagaacuacaucgauaaacaacuccugccgauucugaauaagcagucuuguuccauccccaacauugagacagucaucgaauuucagcagaaaaauaaccggcuccuggagaucacccgcgaguucagcgugaaugccggcgugacgacaccugucucuaccuauaugcuuacaaacuccgaacugcucagccugauuaacgacaugcccaucaccaaugaucaaaagaaacuuauguccaacaauguucagauugugagacagcagucuuacagcaucaugugcauuaucaaggaggaagugcuggcuuaugucgugcaacucccucuguacggcguuaucgacacccccuguuggaaacugcauacauccccucucugcacgaccaacacaaaggaggggagcaauauuugucugacccggacagaucgcggaugguacugcgacaacgccggcucuguguccuuuuucccgcaggcggaaaccuguaagguccagagcaauagaguguuuugcgauacgaugaacucucuuacacugcccagcgagguuaaucucugcaacaucgacauuuucaauccuaaauaugauuguaagaucaugaccuccaaaaccgacgugucuagcuccgucauuacaagccugggggccaucgugucuugcuacggaaagaccaaauguacagcuuccaacaagaaucggggcaucauuaagacguuuagcaacgggugcgauuaugucucuaauaaaggaguggacaccguuuccgugggcaacacacuuuacugugucaacaagcaagagggccagagccuguaugugaaaggggaacccaucauuaauuucuacgacccucucguuuuucccuccgaugaguucgacgccucuaucagccaggugaacgaaaagauuaaucagucccuggcuuuuauccgcaaaucugaugagcugcuccacaacgucaaugugggaaagagcaccacaaacauuaugaucaccacgaucauuaucgugauuaucguuauucugcuucugcucaucgccgucggccuguuccuguauugcaaggccagauccaccccggugacacuuagcaaagaccaacucucugggaucaauaacauugcuuucuccaauugaggacuaguacuggcugcaucucccuuuccucuguccuccauccuucucccaggauggugaagggggaccugguacccagugauccccaccccaggauccuaaaucaugacuuaccugcuaauaaaaacucauuggaaaagugagaagaucuaaaaaaaaaaaaaaaaaaaaaaaaaaaaaaaaaaaaaaaaaaaaaaaaaaaaaaaaaaaaaaaaugcaucccccccccccccccccccccccccccccccaaaggcucuuuucagagccaccagaauu

SEQ ID NO: 14051 - RNA, 1983 nt, Artificial Sequence
  mRNA product Design c-3 comprising derived and/or modified sequence from HRSV(Memphis-37)__AIY60640.1__F_DSCav1_mut1 (opt6)
gggagaguccgcucagccagguugcagaagcggcuuagcguguguccuaaucuucucucugcguguagguaggccugugccgcaaacaagcuuaccauggaacuuccaauucuaaaaaccaaugcuauaacaacaauauuagcagcaguuacauuaugcuucgccucaucacaaaauaucacagaagaauuuuaccaauccacaugcucagcaguaucuaaaggguaccuaggagcccuacgaacaggaugguacacaucaguaauaacaauagaacucucaaacaucaaagaaaacaaaugcaauggaacagacgcuaaaguaaaauuaauaaaacaagaacuagacaaauacaaaaacgccgucaccgaacuucaguuacucaugcaaagcacaccugcagcaggaucagguucagcaauaugcucaggaauagcaguuugcaaaguauuacaccuagaaggugaagucaacaaaauaaaaaacgcacuucuaaguacuaacaaagcuguaguaucauuaucaaacggaguauccguacuaaccuuuaaaguccuagaccuaaaaaacuacauagacaaacaacuacucccaauacucaauaaacaauccugcucaauucccaacaucgaaacaguaauagaauuucaacaaaaaaacaaucgccuucuagaaauaacaagagaauuuucagucaacgccggaguaacaacaccaguaucaacauauaugcuaacaaacagugaacuauuauccuuaauaaacgacaugccaauaacaaaugaccaaaaaaaacuaauguccaauaauguccaaauaguaagacaacaaagcuauucaauuauguguauaauaaaagaagaaguauuagcauacguaguucaacuaccacuauauggcguuauagacacaccaugcuggaaauuacacacaagcccacuaugcacaacaaauacaaaagaaggauccaacauuugcuuaacuagaacugacagaggaugguacugcgacaacgcuggaucagucucuuucuucccacaagcagaaaccuguaaaguacaaucaaauagagucuucugcgacacaaugaacucacuaacucucccaucugaaguaaacuuaugcaacaucgauauauuuaacccaaaauacgauuguaaaauaaugacauccaaaacagacguuucaucaagcguaaucaccucccucggagcaaucguaagcugcuacgguaaaacaaaaugcacagcauccaacaaaaacagaggcaucauaaaaacauucucaaacggaugugacuauguaucaaacaaaggaguagacacaguuucaguaggcaauaccuuauacugugucaauaaacaagaaggacaaucacuauauguaaaaggagaaccuauaauaaacuucuacgacccccucgucuucccuagcgaugaauuugacgcaucaauaucgcaaguaaacgaaaaaauaaaccaaucauuagccuuuauaagaaaaucagacgaauuauuacacaacguaaacguggggaaaagcacaacuaacaucaugauaacaacuaucauaauuguaaucaucgucauccuauuacuccuaaucgcaguaggacuauuccuauacugcaaagcuagaucaacaccagucacccuaucgaaagaucaauugucaggaauaaacaauauagccuuuucaaauuaaggacuaguacuggcugcaucucccuuuccucuguccuccauccuucucccaggauggugaagggggaccugguacccagugauccccaccccaggauccuaaaucaugacuuaccugcuaauaaaaacucauuggaaaagugagaagaucuaaaaaaaaaaaaaaaaaaaaaaaaaaaaaaaaaaaaaaaaaaaaaaaaaaaaaaaaaaaaaaaaugcaucccccccccccccccccccccccccccccccaaaggcucuuuucagagccaccagaauu

SEQ ID NO: 14052 - RNA, 1983 nt, Artificial Sequence
  mRNA product Design c-3 comprising derived and/or modified sequence from HRSV(Memphis-37)__AIY60640.1__F_DSCav1_mut1 (opt11)
gggagaguccgcucagccagguugcagaagcggcuuagcguguguccuaaucuucucucugcguguagguaggccugugccgcaaacaagcuuaccauggaacuccccauccucaaaacgaacgccaucacaaccauccucgccgccgucacccucugcuucgcgucaucccaaaacauaacugaagaguucuaucaaucaaccugcuccgcagucucaaaaggcuaccucggcgcccuacggaccggcugguacacaagcgucaucacaauagaacuuuccaacaucaaagaaaacaaauguaacggcaccgacgcaaaagucaaacucauaaaacaagaacuagacaaauauaaaaacgccguaacugaacuacaacuccucaugcaaucaacuccugcagccgguagcggcuccgcaaucugcucaggcaucgcagucugcaaagucuuacaccuagaaggcgaagucaacaaaaucaagaacgcccuacuauccacaaacaaagcaguagucucucuauccaacggagucuccguccucacauucaaaguacucgaccuaaagaacuacaucgacaaacaacuacuaccaaucuuaaacaaacaauccugcucaaucccuaacauugaaaccgucauagaguuccaacagaaaaacaaccgccuccucgaaauaaccagagaguucucagucaacgccggcgucaccaccccggucucaaccuacaugcuaaccaacucugaacuucucagccuaaucaacgacaugcccauuaccaacgaccaaaagaaacucauguccaauaacguccaaaucguucgacaacaauccuacucaaucaugugcaucauaaaagaagaaguccuagcauacgucguccaacucccacuauacggcguaaucgacacccccugcuggaaacuccacaccuccccucucuguaccaccaacaccaaagaaggguccaacaucugccucacgcgcaccgaccgaggcugguauugcgacaaugcaggcucugucuccuucuucccccaagccgaaaccugcaaaguccaaucuaaccgcgucuucugcgacaccaugaacagucuuacccucccgucagaagucaaccucugcaacauagauaucuucaacccaaaauacgacugcaaaaucaugaccucaaaaaccgacguuuccucauccguuaucaccucccucggcgcaaucgucagcugcuacggcaagacaaagugcacggcuucaaacaaaaaccgcggaaucaucaagacauucagcaacggcugcgacuacguauccaacaaaggaguggacacagucuccguuggaaacacccucuacugcguaaacaaacaagaaggccaaucacucuacgucaaaggcgaacccaucaucaacuucuacgacccacucgucuuccccuccgacgaguucgacgccucaaucagccaagucaacgagaaaauuaaccagucacucgccuucauacgcaaauccgacgaacuucuacacaacguaaacgucggaaaaucaaccacaaacaucaugauuaccacaauuaucauagucaucauaguaauccuccugcuacucauagcagucggacucuuccuauacugcaaagcccgcuccaccccugucacccuauccaaagaccaacuuuccggcaucaacaacauagccuuuuccaacuaaggacuaguacuggcugcaucucccuuuccucuguccuccauccuucucccaggauggugaagggggaccugguacccagugauccccaccccaggauccuaaaucaugacuuaccugcuaauaaaaacucauuggaaaagugagaagaucuaaaaaaaaaaaaaaaaaaaaaaaaaaaaaaaaaaaaaaaaaaaaaaaaaaaaaaaaaaaaaaaaugcaucccccccccccccccccccccccccccccccaaaggcucuuuucagagccaccagaauu

SEQ ID NO: 14053 - RNA, 1979 nt, Artificial Sequence
  mRNA product Design c-4 comprising derived and/or modified sequence from HRSV(Memphis-37)__AIY60640.1__F_DSCav1_mut1 (opt1)
gggagaguccgcucagccagguugcagaagcggcuuagcguguguccuaaucuucucucugcguguagguaggccugugccgcaaacaagcuuaccauggagcugcccauccucaagaccaacgccaucaccacgauccuggccgcggugacccugugcuucgccagcucccagaacaucaccgaggaguucuaccagagcacgugcuccgccgucagcaagggcuaccucggcgcccugcgcaccgggugguacaccagcgugaucaccaucgagcuguccaacaucaaggagaacaagugcaacggcaccgacgccaaggugaagcucaucaagcaggagcuggacaaguacaagaacgcggucacggagcugcagcuccugaugcagagcaccccggccgccggcuccgggagcgcgaucugcuccggcaucgccgucugcaaggugcugcaccucgagggcgaggugaacaagaucaagaacgcccugcuguccaccaacaaggccgucgugagccucuccaacggggugagcguccugaccuucaaggugcuggaccucaagaacuacaucgacaagcagcugcugcccauccugaacaagcagagcugcuccauccccaacaucgagaccgucaucgaguuccagcagaagaacaaccgccuccuggagaucacgcgggaguucagcgugaacgcgggcgugaccacccccgucuccaccuacaugcugacgaacagcgagcuccugucccugaucaacgacaugccgaucaccaacgaccagaagaagcucaugagcaacaacgugcagaucgugcgccagcaguccuacagcaucaugugcaucaucaaggaggagguccuggccuacguggugcagcugccccucuacggggucaucgacacccccugcuggaagcugcacaccagcccccugugcacgaccaacaccaaggagggcuccaacaucugccucacccggacggaccgcgggugguacugcgacaacgccggcagcguguccuucuucccgcaggccgagaccugcaagguccagagcaaccggguguucugcgacaccaugaacucccugacccugcccagcgaggugaaccucugcaacaucgacaucuucaaccccaaguacgacugcaagaucaugacguccaagaccgacgucagcuccagcgugaucaccucccugggcgccaucgugagcugcuacgggaagaccaagugcacggcgagcaacaagaaccgcggcaucaucaagaccuucuccaacgggugcgacuacgucagcaacaagggcguggacaccguguccgucggcaacacccuguacugcgugaacaagcaggagggccagagccucuacgugaagggggagcccaucaucaacuucuacgacccgcuggucuuccccuccgacgaguucgacgccagcaucucccaggugaacgagaagaucaaccagagccuggccuucauccggaaguccgacgagcuccugcacaacgugaacgucggcaagagcaccacgaacaucaugaucaccaccaucaucaucgugaucaucgugauccugcugcuccugaucgccgucgggcuguuccucuacugcaaggcccgcuccacccccgugacgcugagcaaggaccagcuguccgggaucaacaacaucgcguucagcaacugaggacuaguggaagcauuuuccuggcugauuaaaagaaauuacucagcuauggucaucuguuccuguuagaaggcuaugcagcauauuauauacuaugcgcauguuaugaaaugcauaauaaaaaauuuuaaaaaaucuaaaagaucuaaaaaaaaaaaaaaaaaaaaaaaaaaaaaaaaaaaaaaaaaaaaaaaaaaaaaaaaaaaaaaaaugcaucccccccccccccccccccccccccccccccaaaggcucuuuucagagccaccagaauu

SEQ ID NO: 14054 - RNA, 1979 nt, Artificial Sequence
  mRNA product Design c-4 comprising derived and/or modified sequence from HRSV(Memphis-37)__AIY60640.1__F_DSCav1_mut1 (opt1)
gggagaguccgcucagccagguugcagaagcggcuuagcguguguccuaaucuucucucugcguguagguaggccugugccgcaaacaagcuuaccauggagcugcccauccucaagaccaacgccaucaccacgauccuggccgcggugacccugugcuucgccagcucccagaacaucaccgaggaguucuaccagagcacgugcuccgccgucagcaagggcuaccucggggcccugcgcaccggcugguacaccuccgugaucaccaucgagcugagcaacaucaaggagaacaagugcaacgggaccgacgccaaggugaagcucaucaagcaggagcuggacaaguacaagaacgcggucacggagcugcagcuccugaugcaguccaccccggccgccggcagcggguccgccaucugcagcggcaucgcggugugcaaggugcugcaccucgagggcgaggucaacaagaucaagaacgcccugcuguccaccaacaaggccguggugagccucuccaacggggucagcgugcugaccuucaaggugcuggaccucaagaacuacaucgacaagcagcugcugcccauccucaacaagcaguccugcagcauccccaacaucgagacggucaucgaguuccagcagaagaacaaccggcugcuggagaucacccgcgaguucuccgugaacgccggcgugaccacccccgucagcacguacaugcucaccaacuccgagcugcugagccucaucaacgacaugccgaucaccaacgaccagaagaagcugaugagcaacaacgugcagaucgugcggcagcaguccuacagcaucaugugcaucaucaaggaggagguccuggccuacguggugcagcucccccuguacggggucaucgacacccccugcuggaagcugcacacgagcccccucugcaccaccaacaccaaggagggcuccaacaucugccugacgcgcaccgaccgggggugguacugcgacaacgcgggcuccgugagcuucuucccgcaggccgagaccugcaaggugcaguccaaccgcgucuucugcgacaccaugaacagccugacgcuccccuccgaggugaaccugugcaacaucgacaucuucaaccccaaguacgacugcaagaucaugaccagcaagaccgacgucuccagcuccgugaucaccagccugggcgccaucguguccugcuacgggaagacgaagugcaccgccagcaacaagaaccggggcaucaucaagaccuucuccaacgggugcgacuacgucagcaacaagggcguggacaccguguccgucggcaacacgcucuacugcgugaacaagcaggaggggcagagccuguacgugaagggcgagcccaucaucaacuucuacgacccgcuggucuuccccagcgacgaguucgacgccuccaucagccaggugaacgagaagaucaaccagucccucgcguucauccgcaagagcgacgagcugcugcacaacgugaacgucgggaaguccaccaccaacaucaugaucaccaccaucaucaucgugaucaucgugauccuccugcugcucaucgccgucggccuguuccuguacugcaaggcccggagcacgcccgugacccuguccaaggaccagcucagcgggaucaacaacaucgccuucuccaacugaggacuaguggaagcauuuuccuggcugauuaaaagaaauuacucagcuauggucaucuguuccuguuagaaggcuaugcagcauauuauauacuaugcgcauguuaugaaaugcauaauaaaaaauuuuaaaaaaucuaaaagaucuaaaaaaaaaaaaaaaaaaaaaaaaaaaaaaaaaaaaaaaaaaaaaaaaaaaaaaaaaaaaaaaaugcaucccccccccccccccccccccccccccccccaaaggcucuuuucagagccaccagaauu

SEQ ID NO: 14055 - RNA, 1979 nt, Artificial Sequence
  mRNA product Design c-4 comprising derived and/or modified sequence from HRSV(Memphis-37)__AIY60640.1__F_DSCav1_mut1 (opt2)
gggagaguccgcucagccagguugcagaagcggcuuagcguguguccuaaucuucucucugcguguagguaggccugugccgcaaacaagcuuaccauggagcuccccauccucaagaccaacgccaucaccaccauccucgccgccgucacccucugcuucgccuccucccagaacaucaccgaggaguucuaccaguccaccugcuccgccgucuccaagggcuaccucggcgcccuccgcaccggcugguacaccuccgucaucaccaucgagcucuccaacaucaaggagaacaagugcaacggcaccgacgccaaggucaagcucaucaagcaggagcucgacaaguacaagaacgccgucaccgagcuccagcuccucaugcaguccacccccgccgccggcuccggcuccgccaucugcuccggcaucgccgucugcaagguccuccaccucgagggcgaggucaacaagaucaagaacgcccuccucuccaccaacaaggccgucgucucccucuccaacggcgucuccguccucaccuucaagguccucgaccucaagaacuacaucgacaagcagcuccuccccauccucaacaagcaguccugcuccauccccaacaucgagaccgucaucgaguuccagcagaagaacaaccgccuccucgagaucacccgcgaguucuccgucaacgccggcgucaccacccccgucuccaccuacaugcucaccaacuccgagcuccucucccucaucaacgacaugcccaucaccaacgaccagaagaagcucauguccaacaacguccagaucguccgccagcaguccuacuccaucaugugcaucaucaaggaggagguccucgccuacgucguccagcucccccucuacggcgucaucgacacccccugcuggaagcuccacaccuccccccucugcaccaccaacaccaaggagggcuccaacaucugccucacccgcaccgaccgcggcugguacugcgacaacgccggcuccgucuccuucuucccccaggccgagaccugcaagguccaguccaaccgcgucuucugcgacaccaugaacucccucacccuccccuccgaggucaaccucugcaacaucgacaucuucaaccccaaguacgacugcaagaucaugaccuccaagaccgacgucuccuccuccgucaucaccucccucggcgccaucgucuccugcuacggcaagaccaagugcaccgccuccaacaagaaccgcggcaucaucaagaccuucuccaacggcugcgacuacgucuccaacaagggcgucgacaccgucuccgucggcaacacccucuacugcgucaacaagcaggagggccagucccucuacgucaagggcgagcccaucaucaacuucuacgacccccucgucuuccccuccgacgaguucgacgccuccaucucccaggucaacgagaagaucaaccagucccucgccuucauccgcaaguccgacgagcuccuccacaacgucaacgucggcaaguccaccaccaacaucaugaucaccaccaucaucaucgucaucaucgucauccuccuccuccucaucgccgucggccucuuccucuacugcaaggcccgcuccacccccgucacccucuccaaggaccagcucuccggcaucaacaacaucgccuucuccaacugaggacuaguggaagcauuuuccuggcugauuaaaagaaauuacucagcuauggucaucuguuccuguuagaaggcuaugcagcauauuauauacuaugcgcauguuaugaaaugcauaauaaaaaauuuuaaaaaaucuaaaagaucuaaaaaaaaaaaaaaaaaaaaaaaaaaaaaaaaaaaaaaaaaaaaaaaaaaaaaaaaaaaaaaaaugcaucccccccccccccccccccccccccccccccaaaggcucuuuucagagccaccagaauu

SEQ ID NO: 14056 - RNA, 1979 nt, Artificial Sequence
  mRNA product Design c-4 comprising derived and/or modified sequence from HRSV(Memphis-37)__AIY60640.1__F_DSCav1_mut1 (opt3)
gggagaguccgcucagccagguugcagaagcggcuuagcguguguccuaaucuucucucugcguguagguaggccugugccgcaaacaagcuuaccauggagcugcccauccucaagaccaacgccauuacaacuauacuugcugcagugacgcugugcuucgccagcucccagaauaucaccgaagaguuuuaccaaucuacauguucagcggucaguaaaggcuauuugggggcuuuaagaacuggaugguacaccagcguuauuacaaucgaacuguccaacauuaaggagaauaaaugcaacgguaccgacgccaaggugaaacuaaucaagcaggaacucgauaaguauaaaaaugcaguaacugagcugcagcuucugaugcagucuacuccugccgcuggcucggggucagcaauauguagcggaaucgccgugugcaaggucuugcaccucgagggcgaagugaacaaaauuaagaaugcucugcugaguaccaacaaagccguugugucccucucuaauggugucagcguguuaacguucaagguacuggaccuuaagaacuacaucgauaaacaauugcugccaauucuaaauaagcaguccuguucaaucccgaacauagagacuguuauugaauuucagcagaaaaauaacaggcuccuggagaucacccgggaguucagugugaaugcgggggucacaacucccgugagcaccuauaugcuuacaaacucugaacuguugucccucauuaacgacaugccuaucaccaaugaucaaaagaaacugaugucaaacaaugugcagaucguccgccagcagagcuacaguauuaugugcauaaucaaggaggaaguuuuagcauaugugguacaacugccacucuacggagugauugacacgcccuguuggaaacuucauacuucuccucugugcacaaccaacacuaaggagggcuccaauaucuguuugacacgaaccgaucguggcugguacugcgacaacgccgggagcgucucguuuuucccacaggcugaaacguguaaggugcagucuaauagaguguuuugcgauaccaugaacucccuaacacugcccucagagguuaaucucugcaacauagacauuuucaauccuaaauaugauuguaagaucaugacaaguaaaaccgacgucagcuccucugugaucacaagccugggagccauuguaucaugcuacgguaagacuaaauguaccgcaaguaacaagaauaggggcaucauuaagacauuuuccaacgggugcgauuauguuagcaauaaaggaguggacaccgucucugugggcaacacucuuuacugugucaacaagcaagagggucagucacuguaugugaaaggggaaccaauaaucaauuucuacgacccguugguuuuucccagugaugaguucgacgcuagcauuucccaggugaacgaaaagaucaaucagucucucgccuuuauccggaaaucggaugagcuguuacacaacguaaaugucggaaagagcacgacaaacauuaugauaaccacuaucauuaucgugauuaucguuauacugcuacuccugaucgcggugggccuuuucuuguauugcaaggcccgcuccaccccugucacacugucaaaagaccaacucaguggcauuaauaacaucgcauucucuaauugaggacuaguggaagcauuuuccuggcugauuaaaagaaauuacucagcuauggucaucuguuccuguuagaaggcuaugcagcauauuauauacuaugcgcauguuaugaaaugcauaauaaaaaauuuuaaaaaaucuaaaagaucuaaaaaaaaaaaaaaaaaaaaaaaaaaaaaaaaaaaaaaaaaaaaaaaaaaaaaaaaaaaaaaaaugcaucccccccccccccccccccccccccccccccaaaggcucuuuucagagccaccagaauu

SEQ ID NO: 14057 - RNA, 1979 nt, Artificial Sequence
  mRNA product Design c-4 comprising derived and/or modified sequence from HRSV(Memphis-37)__AIY60640.1__F_DSCav1_mut1 (opt4)
gggagaguccgcucagccagguugcagaagcggcuuagcguguguccuaaucuucucucugcguguagguaggccugugccgcaaacaagcuuaccauggagcugcccauccugaagaccaacgccaucaccaccauccuggccgccgugacccugugcuucgccagcagccagaacaucaccgaggaguucuaccagagcaccugcagcgccgugagcaagggcuaccugggcgcccugagaaccggcugguacaccagcgugaucaccaucgagcugagcaacaucaaggagaacaagugcaacggcaccgacgccaaggugaagcugaucaagcaggagcuggacaaguacaagaacgccgugaccgagcugcagcugcugaugcagagcacccccgccgccggcagcggcagcgccaucugcagcggcaucgccgugugcaaggugcugcaccuggagggcgaggugaacaagaucaagaacgcccugcugagcaccaacaaggccguggugagccugagcaacggcgugagcgugcugaccuucaaggugcuggaccugaagaacuacaucgacaagcagcugcugcccauccugaacaagcagagcugcagcauccccaacaucgagaccgugaucgaguuccagcagaagaacaacagacugcuggagaucaccagagaguucagcgugaacgccggcgugaccacccccgugagcaccuacaugcugaccaacagcgagcugcugagccugaucaacgacaugcccaucaccaacgaccagaagaagcugaugagcaacaacgugcagaucgugagacagcagagcuacagcaucaugugcaucaucaaggaggaggugcuggccuacguggugcagcugccccuguacggcgugaucgacacccccugcuggaagcugcacaccagcccccugugcaccaccaacaccaaggagggcagcaacaucugccugaccagaaccgacagaggcugguacugcgacaacgccggcagcgugagcuucuucccccaggccgagaccugcaaggugcagagcaacagaguguucugcgacaccaugaacagccugacccugcccagcgaggugaaccugugcaacaucgacaucuucaaccccaaguacgacugcaagaucaugaccagcaagaccgacgugagcagcagcgugaucaccagccugggcgccaucgugagcugcuacggcaagaccaagugcaccgccagcaacaagaacagaggcaucaucaagaccuucagcaacggcugcgacuacgugagcaacaagggcguggacaccgugagcgugggcaacacccuguacugcgugaacaagcaggagggccagagccuguacgugaagggcgagcccaucaucaacuucuacgacccccugguguuccccagcgacgaguucgacgccagcaucagccaggugaacgagaagaucaaccagagccuggccuucaucagaaagagcgacgagcugcugcacaacgugaacgugggcaagagcaccaccaacaucaugaucaccaccaucaucaucgugaucaucgugauccugcugcugcugaucgccgugggccuguuccuguacugcaaggccagaagcacccccgugacccugagcaaggaccagcugagcggcaucaacaacaucgccuucagcaacugaggacuaguggaagcauuuuccuggcugauuaaaagaaauuacucagcuauggucaucuguuccuguuagaaggcuaugcagcauauuauauacuaugcgcauguuaugaaaugcauaauaaaaaauuuuaaaaaaucuaaaagaucuaaaaaaaaaaaaaaaaaaaaaaaaaaaaaaaaaaaaaaaaaaaaaaaaaaaaaaaaaaaaaaaaugcaucccccccccccccccccccccccccccccccaaaggcucuuuucagagccaccagaauu

SEQ ID NO: 14058 - RNA, 1979 nt, Artificial Sequence
  mRNA product Design c-4 comprising derived and/or modified sequence from HRSV(Memphis-37)__AIY60640.1__F_DSCav1_mut1 (opt5)
gggagaguccgcucagccagguugcagaagcggcuuagcguguguccuaaucuucucucugcguguagguaggccugugccgcaaacaagcuuaccauggagcugcccauccucaagaccaacgccauuacaacgauccuggcugccgugacccuuugcuucgcgagcucccagaauauuacagaagaguuuuaccaaucuaccuguagcgcugucuccaaaggcuaucugggggcccucagaacaggaugguacaccucuguuaucacaauugaacugagcaacaucaaggagaauaaaugcaacggcaccgacgccaaggugaaacuuaucaagcaggaacuggauaaguauaaaaaugcugugacggagcuccagcugcugaugcaguccaccccugccgcugggucuggaagcgccauuuguuccggcaucgcggucugcaaggugcuccaccuggagggggaaguuaacaaaauuaagaaugcccuucugagcacaaacaaagcuguggucucucucuccaauggagugagcguucugaccuucaaggugcuugaccugaagaacuacaucgauaaacaacuccugccgauucugaauaagcagucuuguuccauccccaacauugagacagucaucgaauuucagcagaaaaauaaccggcuccuggagaucacccgcgaguucagcgugaaugccggcgugacgacaccugucucuaccuauaugcuuacaaacuccgaacugcucagccugauuaacgacaugcccaucaccaaugaucaaaagaaacuuauguccaacaauguucagauugugagacagcagucuuacagcaucaugugcauuaucaaggaggaagugcuggcuuaugucgugcaacucccucuguacggcguuaucgacacccccuguuggaaacugcauacauccccucucugcacgaccaacacaaaggaggggagcaauauuugucugacccggacagaucgcggaugguacugcgacaacgccggcucuguguccuuuuucccgcaggcggaaaccuguaagguccagagcaauagaguguuuugcgauacgaugaacucucuuacacugcccagcgagguuaaucucugcaacaucgacauuuucaauccuaaauaugauuguaagaucaugaccuccaaaaccgacgugucuagcuccgucauuacaagccugggggccaucgugucuugcuacggaaagaccaaauguacagcuuccaacaagaaucggggcaucauuaagacguuuagcaacgggugcgauuaugucucuaauaaaggaguggacaccguuuccgugggcaacacacuuuacugugucaacaagcaagagggccagagccuguaugugaaaggggaacccaucauuaauuucuacgacccucucguuuuucccuccgaugaguucgacgccucuaucagccaggugaacgaaaagauuaaucagucccuggcuuuuauccgcaaaucugaugagcugcuccacaacgucaaugugggaaagagcaccacaaacauuaugaucaccacgaucauuaucgugauuaucguuauucugcuucugcucaucgccgucggccuguuccuguauugcaaggccagauccaccccggugacacuuagcaaagaccaacucucugggaucaauaacauugcuuucuccaauugaggacuaguggaagcauuuuccuggcugauuaaaagaaauuacucagcuauggucaucuguuccuguuagaaggcuaugcagcauauuauauacuaugcgcauguuaugaaaugcauaauaaaaaauuuuaaaaaaucuaaaagaucuaaaaaaaaaaaaaaaaaaaaaaaaaaaaaaaaaaaaaaaaaaaaaaaaaaaaaaaaaaaaaaaaugcaucccccccccccccccccccccccccccccccaaaggcucuuuucagagccaccagaauu

SEQ ID NO: 14059 - RNA, 1979 nt, Artificial Sequence
  mRNA product Design c-4 comprising derived and/or modified sequence from HRSV(Memphis-37)__AIY60640.1__F_DSCav1_mut1 (opt6)
gggagaguccgcucagccagguugcagaagcggcuuagcguguguccuaaucuucucucugcguguagguaggccugugccgcaaacaagcuuaccauggaacuuccaauucuaaaaaccaaugcuauaacaacaauauuagcagcaguuacauuaugcuucgccucaucacaaaauaucacagaagaauuuuaccaauccacaugcucagcaguaucuaaaggguaccuaggagcccuacgaacaggaugguacacaucaguaauaacaauagaacucucaaacaucaaagaaaacaaaugcaauggaacagacgcuaaaguaaaauuaauaaaacaagaacuagacaaauacaaaaacgccgucaccgaacuucaguuacucaugcaaagcacaccugcagcaggaucagguucagcaauaugcucaggaauagcaguuugcaaaguauuacaccuagaaggugaagucaacaaaauaaaaaacgcacuucuaaguacuaacaaagcuguaguaucauuaucaaacggaguauccguacuaaccuuuaaaguccuagaccuaaaaaacuacauagacaaacaacuacucccaauacucaauaaacaauccugcucaauucccaacaucgaaacaguaauagaauuucaacaaaaaaacaaucgccuucuagaaauaacaagagaauuuucagucaacgccggaguaacaacaccaguaucaacauauaugcuaacaaacagugaacuauuauccuuaauaaacgacaugccaauaacaaaugaccaaaaaaaacuaauguccaauaauguccaaauaguaagacaacaaagcuauucaauuauguguauaauaaaagaagaaguauuagcauacguaguucaacuaccacuauauggcguuauagacacaccaugcuggaaauuacacacaagcccacuaugcacaacaaauacaaaagaaggauccaacauuugcuuaacuagaacugacagaggaugguacugcgacaacgcuggaucagucucuuucuucccacaagcagaaaccuguaaaguacaaucaaauagagucuucugcgacacaaugaacucacuaacucucccaucugaaguaaacuuaugcaacaucgauauauuuaacccaaaauacgauuguaaaauaaugacauccaaaacagacguuucaucaagcguaaucaccucccucggagcaaucguaagcugcuacgguaaaacaaaaugcacagcauccaacaaaaacagaggcaucauaaaaacauucucaaacggaugugacuauguaucaaacaaaggaguagacacaguuucaguaggcaauaccuuauacugugucaauaaacaagaaggacaaucacuauauguaaaaggagaaccuauaauaaacuucuacgacccccucgucuucccuagcgaugaauuugacgcaucaauaucgcaaguaaacgaaaaaauaaaccaaucauuagccuuuauaagaaaaucagacgaauuauuacacaacguaaacguggggaaaagcacaacuaacaucaugauaacaacuaucauaauuguaaucaucgucauccuauuacuccuaaucgcaguaggacuauuccuauacugcaaagcuagaucaacaccagucacccuaucgaaagaucaauugucaggaauaaacaauauagccuuuucaaauuaaggacuaguggaagcauuuuccuggcugauuaaaagaaauuacucagcuauggucaucuguuccuguuagaaggcuaugcagcauauuauauacuaugcgcauguuaugaaaugcauaauaaaaaauuuuaaaaaaucuaaaagaucuaaaaaaaaaaaaaaaaaaaaaaaaaaaaaaaaaaaaaaaaaaaaaaaaaaaaaaaaaaaaaaaaugcaucccccccccccccccccccccccccccccccaaaggcucuuuucagagccaccagaauu

SEQ ID NO: 14060 - RNA, 1979 nt, Artificial Sequence
  mRNA product Design c-4 comprising derived and/or modified sequence from HRSV(Memphis-37)__AIY60640.1__F_DSCav1_mut1 (opt11)
gggagaguccgcucagccagguugcagaagcggcuuagcguguguccuaaucuucucucugcguguagguaggccugugccgcaaacaagcuuaccauggaacuccccauccucaaaacgaacgccaucacaaccauccucgccgccgucacccucugcuucgcgucaucccaaaacauaacugaagaguucuaucaaucaaccugcuccgcagucucaaaaggcuaccucggcgcccuacggaccggcugguacacaagcgucaucacaauagaacuuuccaacaucaaagaaaacaaauguaacggcaccgacgcaaaagucaaacucauaaaacaagaacuagacaaauauaaaaacgccguaacugaacuacaacuccucaugcaaucaacuccugcagccgguagcggcuccgcaaucugcucaggcaucgcagucugcaaagucuuacaccuagaaggcgaagucaacaaaaucaagaacgcccuacuauccacaaacaaagcaguagucucucuauccaacggagucuccguccucacauucaaaguacucgaccuaaagaacuacaucgacaaacaacuacuaccaaucuuaaacaaacaauccugcucaaucccuaacauugaaaccgucauagaguuccaacagaaaaacaaccgccuccucgaaauaaccagagaguucucagucaacgccggcgucaccaccccggucucaaccuacaugcuaaccaacucugaacuucucagccuaaucaacgacaugcccauuaccaacgaccaaaagaaacucauguccaauaacguccaaaucguucgacaacaauccuacucaaucaugugcaucauaaaagaagaaguccuagcauacgucguccaacucccacuauacggcguaaucgacacccccugcuggaaacuccacaccuccccucucuguaccaccaacaccaaagaaggguccaacaucugccucacgcgcaccgaccgaggcugguauugcgacaaugcaggcucugucuccuucuucccccaagccgaaaccugcaaaguccaaucuaaccgcgucuucugcgacaccaugaacagucuuacccucccgucagaagucaaccucugcaacauagauaucuucaacccaaaauacgacugcaaaaucaugaccucaaaaaccgacguuuccucauccguuaucaccucccucggcgcaaucgucagcugcuacggcaagacaaagugcacggcuucaaacaaaaaccgcggaaucaucaagacauucagcaacggcugcgacuacguauccaacaaaggaguggacacagucuccguuggaaacacccucuacugcguaaacaaacaagaaggccaaucacucuacgucaaaggcgaacccaucaucaacuucuacgacccacucgucuuccccuccgacgaguucgacgccucaaucagccaagucaacgagaaaauuaaccagucacucgccuucauacgcaaauccgacgaacuucuacacaacguaaacgucggaaaaucaaccacaaacaucaugauuaccacaauuaucauagucaucauaguaauccuccugcuacucauagcagucggacucuuccuauacugcaaagcccgcuccaccccugucacccuauccaaagaccaacuuuccggcaucaacaacauagccuuuuccaacuaaggacuaguggaagcauuuuccuggcugauuaaaagaaauuacucagcuauggucaucuguuccuguuagaaggcuaugcagcauauuauauacuaugcgcauguuaugaaaugcauaauaaaaaauuuuaaaaaaucuaaaagaucuaaaaaaaaaaaaaaaaaaaaaaaaaaaaaaaaaaaaaaaaaaaaaaaaaaaaaaaaaaaaaaaaugcaucccccccccccccccccccccccccccccccaaaggcucuuuucagagccaccagaauu

SEQ ID NO: 14061 - RNA, 1897 nt, Artificial Sequence
  mRNA product Design c-5 comprising derived and/or modified sequence from HRSV(Memphis-37)__AIY60640.1__F_DSCav1_mut1 (opt1)
gggagagcggcucggccauuuugucccagucaguccggaggcugcggcugcagaaguaccgccugcggaguaacugcaaagaagcuuaccauggagcugcccauccucaagaccaacgccaucaccacgauccuggccgcggugacccugugcuucgccagcucccagaacaucaccgaggaguucuaccagagcacgugcuccgccgucagcaagggcuaccucggcgcccugcgcaccgggugguacaccagcgugaucaccaucgagcuguccaacaucaaggagaacaagugcaacggcaccgacgccaaggugaagcucaucaagcaggagcuggacaaguacaagaacgcggucacggagcugcagcuccugaugcagagcaccccggccgccggcuccgggagcgcgaucugcuccggcaucgccgucugcaaggugcugcaccucgagggcgaggugaacaagaucaagaacgcccugcuguccaccaacaaggccgucgugagccucuccaacggggugagcguccugaccuucaaggugcuggaccucaagaacuacaucgacaagcagcugcugcccauccugaacaagcagagcugcuccauccccaacaucgagaccgucaucgaguuccagcagaagaacaaccgccuccuggagaucacgcgggaguucagcgugaacgcgggcgugaccacccccgucuccaccuacaugcugacgaacagcgagcuccugucccugaucaacgacaugccgaucaccaacgaccagaagaagcucaugagcaacaacgugcagaucgugcgccagcaguccuacagcaucaugugcaucaucaaggaggagguccuggccuacguggugcagcugccccucuacggggucaucgacacccccugcuggaagcugcacaccagcccccugugcacgaccaacaccaaggagggcuccaacaucugccucacccggacggaccgcgggugguacugcgacaacgccggcagcguguccuucuucccgcaggccgagaccugcaagguccagagcaaccggguguucugcgacaccaugaacucccugacccugcccagcgaggugaaccucugcaacaucgacaucuucaaccccaaguacgacugcaagaucaugacguccaagaccgacgucagcuccagcgugaucaccucccugggcgccaucgugagcugcuacgggaagaccaagugcacggcgagcaacaagaaccgcggcaucaucaagaccuucuccaacgggugcgacuacgucagcaacaagggcguggacaccguguccgucggcaacacccuguacugcgugaacaagcaggagggccagagccucuacgugaagggggagcccaucaucaacuucuacgacccgcuggucuuccccuccgacgaguucgacgccagcaucucccaggugaacgagaagaucaaccagagccuggccuucauccggaaguccgacgagcuccugcacaacgugaacgucggcaagagcaccacgaacaucaugaucaccaccaucaucaucgugaucaucgugauccugcugcuccugaucgccgucgggcuguuccucuacugcaaggcccgcuccacccccgugacgcugagcaaggaccagcuguccgggaucaacaacaucgcguucagcaacugaggacuagucccuguucccagagcccacuuuuuuuucuuuuuuugaaauaaaauagccugucuuucagaucuaaaaaaaaaaaaaaaaaaaaaaaaaaaaaaaaaaaaaaaaaaaaaaaaaaaaaaaaaaaaaaaaugcaucccccccccccccccccccccccccccccccaaaggcucuuuucagagccaccagaauu

SEQ ID NO: 14062 - RNA, 1897 nt, Artificial Sequence
  mRNA product Design c-5 comprising derived and/or modified sequence from HRSV(Memphis-37)__AIY60640.1__F_DSCav1_mut1 (opt1)
gggagagcggcucggccauuuugucccagucaguccggaggcugcggcugcagaaguaccgccugcggaguaacugcaaagaagcuuaccauggagcugcccauccucaagaccaacgccaucaccacgauccuggccgcggugacccugugcuucgccagcucccagaacaucaccgaggaguucuaccagagcacgugcuccgccgucagcaagggcuaccucggggcccugcgcaccggcugguacaccuccgugaucaccaucgagcugagcaacaucaaggagaacaagugcaacgggaccgacgccaaggugaagcucaucaagcaggagcuggacaaguacaagaacgcggucacggagcugcagcuccugaugcaguccaccccggccgccggcagcggguccgccaucugcagcggcaucgcggugugcaaggugcugcaccucgagggcgaggucaacaagaucaagaacgcccugcuguccaccaacaaggccguggugagccucuccaacggggucagcgugcugaccuucaaggugcuggaccucaagaacuacaucgacaagcagcugcugcccauccucaacaagcaguccugcagcauccccaacaucgagacggucaucgaguuccagcagaagaacaaccggcugcuggagaucacccgcgaguucuccgugaacgccggcgugaccacccccgucagcacguacaugcucaccaacuccgagcugcugagccucaucaacgacaugccgaucaccaacgaccagaagaagcugaugagcaacaacgugcagaucgugcggcagcaguccuacagcaucaugugcaucaucaaggaggagguccuggccuacguggugcagcucccccuguacggggucaucgacacccccugcuggaagcugcacacgagcccccucugcaccaccaacaccaaggagggcuccaacaucugccugacgcgcaccgaccgggggugguacugcgacaacgcgggcuccgugagcuucuucccgcaggccgagaccugcaaggugcaguccaaccgcgucuucugcgacaccaugaacagccugacgcuccccuccgaggugaaccugugcaacaucgacaucuucaaccccaaguacgacugcaagaucaugaccagcaagaccgacgucuccagcuccgugaucaccagccugggcgccaucguguccugcuacgggaagacgaagugcaccgccagcaacaagaaccggggcaucaucaagaccuucuccaacgggugcgacuacgucagcaacaagggcguggacaccguguccgucggcaacacgcucuacugcgugaacaagcaggaggggcagagccuguacgugaagggcgagcccaucaucaacuucuacgacccgcuggucuuccccagcgacgaguucgacgccuccaucagccaggugaacgagaagaucaaccagucccucgcguucauccgcaagagcgacgagcugcugcacaacgugaacgucgggaaguccaccaccaacaucaugaucaccaccaucaucaucgugaucaucgugauccuccugcugcucaucgccgucggccuguuccuguacugcaaggcccggagcacgcccgugacccuguccaaggaccagcucagcgggaucaacaacaucgccuucuccaacugaggacuagucccuguucccagagcccacuuuuuuuucuuuuuuugaaauaaaauagccugucuuucagaucuaaaaaaaaaaaaaaaaaaaaaaaaaaaaaaaaaaaaaaaaaaaaaaaaaaaaaaaaaaaaaaaaugcaucccccccccccccccccccccccccccccccaaaggcucuuuucagagccaccagaauu

SEQ ID NO: 14063 - RNA, 1897 nt, Artificial Sequence
  mRNA product Design c-5 comprising derived and/or modified sequence from HRSV(Memphis-37)__AIY60640.1__F_DSCav1_mut1 (opt2)
gggagagcggcucggccauuuugucccagucaguccggaggcugcggcugcagaaguaccgccugcggaguaacugcaaagaagcuuaccauggagcuccccauccucaagaccaacgccaucaccaccauccucgccgccgucacccucugcuucgccuccucccagaacaucaccgaggaguucuaccaguccaccugcuccgccgucuccaagggcuaccucggcgcccuccgcaccggcugguacaccuccgucaucaccaucgagcucuccaacaucaaggagaacaagugcaacggcaccgacgccaaggucaagcucaucaagcaggagcucgacaaguacaagaacgccgucaccgagcuccagcuccucaugcaguccacccccgccgccggcuccggcuccgccaucugcuccggcaucgccgucugcaagguccuccaccucgagggcgaggucaacaagaucaagaacgcccuccucuccaccaacaaggccgucgucucccucuccaacggcgucuccguccucaccuucaagguccucgaccucaagaacuacaucgacaagcagcuccuccccauccucaacaagcaguccugcuccauccccaacaucgagaccgucaucgaguuccagcagaagaacaaccgccuccucgagaucacccgcgaguucuccgucaacgccggcgucaccacccccgucuccaccuacaugcucaccaacuccgagcuccucucccucaucaacgacaugcccaucaccaacgaccagaagaagcucauguccaacaacguccagaucguccgccagcaguccuacuccaucaugugcaucaucaaggaggagguccucgccuacgucguccagcucccccucuacggcgucaucgacacccccugcuggaagcuccacaccuccccccucugcaccaccaacaccaaggagggcuccaacaucugccucacccgcaccgaccgcggcugguacugcgacaacgccggcuccgucuccuucuucccccaggccgagaccugcaagguccaguccaaccgcgucuucugcgacaccaugaacucccucacccuccccuccgaggucaaccucugcaacaucgacaucuucaaccccaaguacgacugcaagaucaugaccuccaagaccgacgucuccuccuccgucaucaccucccucggcgccaucgucuccugcuacggcaagaccaagugcaccgccuccaacaagaaccgcggcaucaucaagaccuucuccaacggcugcgacuacgucuccaacaagggcgucgacaccgucuccgucggcaacacccucuacugcgucaacaagcaggagggccagucccucuacgucaagggcgagcccaucaucaacuucuacgacccccucgucuuccccuccgacgaguucgacgccuccaucucccaggucaacgagaagaucaaccagucccucgccuucauccgcaaguccgacgagcuccuccacaacgucaacgucggcaaguccaccaccaacaucaugaucaccaccaucaucaucgucaucaucgucauccuccuccuccucaucgccgucggccucuuccucuacugcaaggcccgcuccacccccgucacccucuccaaggaccagcucuccggcaucaacaacaucgccuucuccaacugaggacuagucccuguucccagagcccacuuuuuuuucuuuuuuugaaauaaaauagccugucuuucagaucuaaaaaaaaaaaaaaaaaaaaaaaaaaaaaaaaaaaaaaaaaaaaaaaaaaaaaaaaaaaaaaaaugcaucccccccccccccccccccccccccccccccaaaggcucuuuucagagccaccagaauu

SEQ ID NO: 14064 - RNA, 1897 nt, Artificial Sequence
  mRNA product Design c-5 comprising derived and/or modified sequence from HRSV(Memphis-37)__AIY60640.1__F_DSCav1_mut1 (opt3)
gggagagcggcucggccauuuugucccagucaguccggaggcugcggcugcagaaguaccgccugcggaguaacugcaaagaagcuuaccauggagcugcccauccucaagaccaacgccauuacaacuauacuugcugcagugacgcugugcuucgccagcucccagaauaucaccgaagaguuuuaccaaucuacauguucagcggucaguaaaggcuauuugggggcuuuaagaacuggaugguacaccagcguuauuacaaucgaacuguccaacauuaaggagaauaaaugcaacgguaccgacgccaaggugaaacuaaucaagcaggaacucgauaaguauaaaaaugcaguaacugagcugcagcuucugaugcagucuacuccugccgcuggcucggggucagcaauauguagcggaaucgccgugugcaaggucuugcaccucgagggcgaagugaacaaaauuaagaaugcucugcugaguaccaacaaagccguugugucccucucuaauggugucagcguguuaacguucaagguacuggaccuuaagaacuacaucgauaaacaauugcugccaauucuaaauaagcaguccuguucaaucccgaacauagagacuguuauugaauuucagcagaaaaauaacaggcuccuggagaucacccgggaguucagugugaaugcgggggucacaacucccgugagcaccuauaugcuuacaaacucugaacuguugucccucauuaacgacaugccuaucaccaaugaucaaaagaaacugaugucaaacaaugugcagaucguccgccagcagagcuacaguauuaugugcauaaucaaggaggaaguuuuagcauaugugguacaacugccacucuacggagugauugacacgcccuguuggaaacuucauacuucuccucugugcacaaccaacacuaaggagggcuccaauaucuguuugacacgaaccgaucguggcugguacugcgacaacgccgggagcgucucguuuuucccacaggcugaaacguguaaggugcagucuaauagaguguuuugcgauaccaugaacucccuaacacugcccucagagguuaaucucugcaacauagacauuuucaauccuaaauaugauuguaagaucaugacaaguaaaaccgacgucagcuccucugugaucacaagccugggagccauuguaucaugcuacgguaagacuaaauguaccgcaaguaacaagaauaggggcaucauuaagacauuuuccaacgggugcgauuauguuagcaauaaaggaguggacaccgucucugugggcaacacucuuuacugugucaacaagcaagagggucagucacuguaugugaaaggggaaccaauaaucaauuucuacgacccguugguuuuucccagugaugaguucgacgcuagcauuucccaggugaacgaaaagaucaaucagucucucgccuuuauccggaaaucggaugagcuguuacacaacguaaaugucggaaagagcacgacaaacauuaugauaaccacuaucauuaucgugauuaucguuauacugcuacuccugaucgcggugggccuuuucuuguauugcaaggcccgcuccaccccugucacacugucaaaagaccaacucaguggcauuaauaacaucgcauucucuaauugaggacuagucccuguucccagagcccacuuuuuuuucuuuuuuugaaauaaaauagccugucuuucagaucuaaaaaaaaaaaaaaaaaaaaaaaaaaaaaaaaaaaaaaaaaaaaaaaaaaaaaaaaaaaaaaaaugcaucccccccccccccccccccccccccccccccaaaggcucuuuucagagccaccagaauu

SEQ ID NO: 14065 - RNA, 1897 nt, Artificial Sequence
  mRNA product Design c-5 comprising derived and/or modified sequence from HRSV(Memphis-37)__AIY60640.1__F_DSCav1_mut1 (opt4)
gggagagcggcucggccauuuugucccagucaguccggaggcugcggcugcagaaguaccgccugcggaguaacugcaaagaagcuuaccauggagcugcccauccugaagaccaacgccaucaccaccauccuggccgccgugacccugugcuucgccagcagccagaacaucaccgaggaguucuaccagagcaccugcagcgccgugagcaagggcuaccugggcgcccugagaaccggcugguacaccagcgugaucaccaucgagcugagcaacaucaaggagaacaagugcaacggcaccgacgccaaggugaagcugaucaagcaggagcuggacaaguacaagaacgccgugaccgagcugcagcugcugaugcagagcacccccgccgccggcagcggcagcgccaucugcagcggcaucgccgugugcaaggugcugcaccuggagggcgaggugaacaagaucaagaacgcccugcugagcaccaacaaggccguggugagccugagcaacggcgugagcgugcugaccuucaaggugcuggaccugaagaacuacaucgacaagcagcugcugcccauccugaacaagcagagcugcagcauccccaacaucgagaccgugaucgaguuccagcagaagaacaacagacugcuggagaucaccagagaguucagcgugaacgccggcgugaccacccccgugagcaccuacaugcugaccaacagcgagcugcugagccugaucaacgacaugcccaucaccaacgaccagaagaagcugaugagcaacaacgugcagaucgugagacagcagagcuacagcaucaugugcaucaucaaggaggaggugcuggccuacguggugcagcugccccuguacggcgugaucgacacccccugcuggaagcugcacaccagcccccugugcaccaccaacaccaaggagggcagcaacaucugccugaccagaaccgacagaggcugguacugcgacaacgccggcagcgugagcuucuucccccaggccgagaccugcaaggugcagagcaacagaguguucugcgacaccaugaacagccugacccugcccagcgaggugaaccugugcaacaucgacaucuucaaccccaaguacgacugcaagaucaugaccagcaagaccgacgugagcagcagcgugaucaccagccugggcgccaucgugagcugcuacggcaagaccaagugcaccgccagcaacaagaacagaggcaucaucaagaccuucagcaacggcugcgacuacgugagcaacaagggcguggacaccgugagcgugggcaacacccuguacugcgugaacaagcaggagggccagagccuguacgugaagggcgagcccaucaucaacuucuacgacccccugguguuccccagcgacgaguucgacgccagcaucagccaggugaacgagaagaucaaccagagccuggccuucaucagaaagagcgacgagcugcugcacaacgugaacgugggcaagagcaccaccaacaucaugaucaccaccaucaucaucgugaucaucgugauccugcugcugcugaucgccgugggccuguuccuguacugcaaggccagaagcacccccgugacccugagcaaggaccagcugagcggcaucaacaacaucgccuucagcaacugaggacuagucccuguucccagagcccacuuuuuuuucuuuuuuugaaauaaaauagccugucuuucagaucuaaaaaaaaaaaaaaaaaaaaaaaaaaaaaaaaaaaaaaaaaaaaaaaaaaaaaaaaaaaaaaaaugcaucccccccccccccccccccccccccccccccaaaggcucuuuucagagccaccagaauu

SEQ ID NO: 14066 - RNA, 1897 nt, Artificial Sequence
  mRNA product Design c-5 comprising derived and/or modified sequence from HRSV(Memphis-37)__AIY60640.1__F_DSCav1_mut1 (opt5)
gggagagcggcucggccauuuugucccagucaguccggaggcugcggcugcagaaguaccgccugcggaguaacugcaaagaagcuuaccauggagcugcccauccucaagaccaacgccauuacaacgauccuggcugccgugacccuuugcuucgcgagcucccagaauauuacagaagaguuuuaccaaucuaccuguagcgcugucuccaaaggcuaucugggggcccucagaacaggaugguacaccucuguuaucacaauugaacugagcaacaucaaggagaauaaaugcaacggcaccgacgccaaggugaaacuuaucaagcaggaacuggauaaguauaaaaaugcugugacggagcuccagcugcugaugcaguccaccccugccgcugggucuggaagcgccauuuguuccggcaucgcggucugcaaggugcuccaccuggagggggaaguuaacaaaauuaagaaugcccuucugagcacaaacaaagcuguggucucucucuccaauggagugagcguucugaccuucaaggugcuugaccugaagaacuacaucgauaaacaacuccugccgauucugaauaagcagucuuguuccauccccaacauugagacagucaucgaauuucagcagaaaaauaaccggcuccuggagaucacccgcgaguucagcgugaaugccggcgugacgacaccugucucuaccuauaugcuuacaaacuccgaacugcucagccugauuaacgacaugcccaucaccaaugaucaaaagaaacuuauguccaacaauguucagauugugagacagcagucuuacagcaucaugugcauuaucaaggaggaagugcuggcuuaugucgugcaacucccucuguacggcguuaucgacacccccuguuggaaacugcauacauccccucucugcacgaccaacacaaaggaggggagcaauauuugucugacccggacagaucgcggaugguacugcgacaacgccggcucuguguccuuuuucccgcaggcggaaaccuguaagguccagagcaauagaguguuuugcgauacgaugaacucucuuacacugcccagcgagguuaaucucugcaacaucgacauuuucaauccuaaauaugauuguaagaucaugaccuccaaaaccgacgugucuagcuccgucauuacaagccugggggccaucgugucuugcuacggaaagaccaaauguacagcuuccaacaagaaucggggcaucauuaagacguuuagcaacgggugcgauuaugucucuaauaaaggaguggacaccguuuccgugggcaacacacuuuacugugucaacaagcaagagggccagagccuguaugugaaaggggaacccaucauuaauuucuacgacccucucguuuuucccuccgaugaguucgacgccucuaucagccaggugaacgaaaagauuaaucagucccuggcuuuuauccgcaaaucugaugagcugcuccacaacgucaaugugggaaagagcaccacaaacauuaugaucaccacgaucauuaucgugauuaucguuauucugcuucugcucaucgccgucggccuguuccuguauugcaaggccagauccaccccggugacacuuagcaaagaccaacucucugggaucaauaacauugcuuucuccaauugaggacuagucccuguucccagagcccacuuuuuuuucuuuuuuugaaauaaaauagccugucuuucagaucuaaaaaaaaaaaaaaaaaaaaaaaaaaaaaaaaaaaaaaaaaaaaaaaaaaaaaaaaaaaaaaaaugcaucccccccccccccccccccccccccccccccaaaggcucuuuucagagccaccagaauu

SEQ ID NO: 14067 - RNA, 1897 nt, Artificial Sequence
  mRNA product Design c-5 comprising derived and/or modified sequence from HRSV(Memphis-37)__AIY60640.1__F_DSCav1_mut1 (opt6)
gggagagcggcucggccauuuugucccagucaguccggaggcugcggcugcagaaguaccgccugcggaguaacugcaaagaagcuuaccauggaacuuccaauucuaaaaaccaaugcuauaacaacaauauuagcagcaguuacauuaugcuucgccucaucacaaaauaucacagaagaauuuuaccaauccacaugcucagcaguaucuaaaggguaccuaggagcccuacgaacaggaugguacacaucaguaauaacaauagaacucucaaacaucaaagaaaacaaaugcaauggaacagacgcuaaaguaaaauuaauaaaacaagaacuagacaaauacaaaaacgccgucaccgaacuucaguuacucaugcaaagcacaccugcagcaggaucagguucagcaauaugcucaggaauagcaguuugcaaaguauuacaccuagaaggugaagucaacaaaauaaaaaacgcacuucuaaguacuaacaaagcuguaguaucauuaucaaacggaguauccguacuaaccuuuaaaguccuagaccuaaaaaacuacauagacaaacaacuacucccaauacucaauaaacaauccugcucaauucccaacaucgaaacaguaauagaauuucaacaaaaaaacaaucgccuucuagaaauaacaagagaauuuucagucaacgccggaguaacaacaccaguaucaacauauaugcuaacaaacagugaacuauuauccuuaauaaacgacaugccaauaacaaaugaccaaaaaaaacuaauguccaauaauguccaaauaguaagacaacaaagcuauucaauuauguguauaauaaaagaagaaguauuagcauacguaguucaacuaccacuauauggcguuauagacacaccaugcuggaaauuacacacaagcccacuaugcacaacaaauacaaaagaaggauccaacauuugcuuaacuagaacugacagaggaugguacugcgacaacgcuggaucagucucuuucuucccacaagcagaaaccuguaaaguacaaucaaauagagucuucugcgacacaaugaacucacuaacucucccaucugaaguaaacuuaugcaacaucgauauauuuaacccaaaauacgauuguaaaauaaugacauccaaaacagacguuucaucaagcguaaucaccucccucggagcaaucguaagcugcuacgguaaaacaaaaugcacagcauccaacaaaaacagaggcaucauaaaaacauucucaaacggaugugacuauguaucaaacaaaggaguagacacaguuucaguaggcaauaccuuauacugugucaauaaacaagaaggacaaucacuauauguaaaaggagaaccuauaauaaacuucuacgacccccucgucuucccuagcgaugaauuugacgcaucaauaucgcaaguaaacgaaaaaauaaaccaaucauuagccuuuauaagaaaaucagacgaauuauuacacaacguaaacguggggaaaagcacaacuaacaucaugauaacaacuaucauaauuguaaucaucgucauccuauuacuccuaaucgcaguaggacuauuccuauacugcaaagcuagaucaacaccagucacccuaucgaaagaucaauugucaggaauaaacaauauagccuuuucaaauuaaggacuagucccuguucccagagcccacuuuuuuuucuuuuuuugaaauaaaauagccugucuuucagaucuaaaaaaaaaaaaaaaaaaaaaaaaaaaaaaaaaaaaaaaaaaaaaaaaaaaaaaaaaaaaaaaaugcaucccccccccccccccccccccccccccccccaaaggcucuuuucagagccaccagaauu

SEQ ID NO: 14068 - RNA, 1897 nt, Artificial Sequence
  mRNA product Design c-5 comprising derived and/or modified sequence from HRSV(Memphis-37)__AIY60640.1__F_DSCav1_mut1 (opt11)
gggagagcggcucggccauuuugucccagucaguccggaggcugcggcugcagaaguaccgccugcggaguaacugcaaagaagcuuaccauggaacuccccauccucaaaacgaacgccaucacaaccauccucgccgccgucacccucugcuucgcgucaucccaaaacauaacugaagaguucuaucaaucaaccugcuccgcagucucaaaaggcuaccucggcgcccuacggaccggcugguacacaagcgucaucacaauagaacuuuccaacaucaaagaaaacaaauguaacggcaccgacgcaaaagucaaacucauaaaacaagaacuagacaaauauaaaaacgccguaacugaacuacaacuccucaugcaaucaacuccugcagccgguagcggcuccgcaaucugcucaggcaucgcagucugcaaagucuuacaccuagaaggcgaagucaacaaaaucaagaacgcccuacuauccacaaacaaagcaguagucucucuauccaacggagucuccguccucacauucaaaguacucgaccuaaagaacuacaucgacaaacaacuacuaccaaucuuaaacaaacaauccugcucaaucccuaacauugaaaccgucauagaguuccaacagaaaaacaaccgccuccucgaaauaaccagagaguucucagucaacgccggcgucaccaccccggucucaaccuacaugcuaaccaacucugaacuucucagccuaaucaacgacaugcccauuaccaacgaccaaaagaaacucauguccaauaacguccaaaucguucgacaacaauccuacucaaucaugugcaucauaaaagaagaaguccuagcauacgucguccaacucccacuauacggcguaaucgacacccccugcuggaaacuccacaccuccccucucuguaccaccaacaccaaagaaggguccaacaucugccucacgcgcaccgaccgaggcugguauugcgacaaugcaggcucugucuccuucuucccccaagccgaaaccugcaaaguccaaucuaaccgcgucuucugcgacaccaugaacagucuuacccucccgucagaagucaaccucugcaacauagauaucuucaacccaaaauacgacugcaaaaucaugaccucaaaaaccgacguuuccucauccguuaucaccucccucggcgcaaucgucagcugcuacggcaagacaaagugcacggcuucaaacaaaaaccgcggaaucaucaagacauucagcaacggcugcgacuacguauccaacaaaggaguggacacagucuccguuggaaacacccucuacugcguaaacaaacaagaaggccaaucacucuacgucaaaggcgaacccaucaucaacuucuacgacccacucgucuuccccuccgacgaguucgacgccucaaucagccaagucaacgagaaaauuaaccagucacucgccuucauacgcaaauccgacgaacuucuacacaacguaaacgucggaaaaucaaccacaaacaucaugauuaccacaauuaucauagucaucauaguaauccuccugcuacucauagcagucggacucuuccuauacugcaaagcccgcuccaccccugucacccuauccaaagaccaacuuuccggcaucaacaacauagccuuuuccaacuaaggacuagucccuguucccagagcccacuuuuuuuucuuuuuuugaaauaaaauagccugucuuucagaucuaaaaaaaaaaaaaaaaaaaaaaaaaaaaaaaaaaaaaaaaaaaaaaaaaaaaaaaaaaaaaaaaugcaucccccccccccccccccccccccccccccccaaaggcucuuuucagagccaccagaauu

SEQ ID NO: 14069 - RNA, 1906 nt, Artificial Sequence
  mRNA product Design d-1 comprising derived and/or modified sequence from HRSV(Memphis-37)__AIY60640.1__F_DSCav1_mut1 (opt1)
gggagacccgugacccggaaguuguacggcuacgcgacuuucccucccacaaacccucgcgcccuuccuuuccuacuugggcccggcagaaagcuuaccauggagcugcccauccucaagaccaacgccaucaccacgauccuggccgcggugacccugugcuucgccagcucccagaacaucaccgaggaguucuaccagagcacgugcuccgccgucagcaagggcuaccucggcgcccugcgcaccgggugguacaccagcgugaucaccaucgagcuguccaacaucaaggagaacaagugcaacggcaccgacgccaaggugaagcucaucaagcaggagcuggacaaguacaagaacgcggucacggagcugcagcuccugaugcagagcaccccggccgccggcuccgggagcgcgaucugcuccggcaucgccgucugcaaggugcugcaccucgagggcgaggugaacaagaucaagaacgcccugcuguccaccaacaaggccgucgugagccucuccaacggggugagcguccugaccuucaaggugcuggaccucaagaacuacaucgacaagcagcugcugcccauccugaacaagcagagcugcuccauccccaacaucgagaccgucaucgaguuccagcagaagaacaaccgccuccuggagaucacgcgggaguucagcgugaacgcgggcgugaccacccccgucuccaccuacaugcugacgaacagcgagcuccugucccugaucaacgacaugccgaucaccaacgaccagaagaagcucaugagcaacaacgugcagaucgugcgccagcaguccuacagcaucaugugcaucaucaaggaggagguccuggccuacguggugcagcugccccucuacggggucaucgacacccccugcuggaagcugcacaccagcccccugugcacgaccaacaccaaggagggcuccaacaucugccucacccggacggaccgcgggugguacugcgacaacgccggcagcguguccuucuucccgcaggccgagaccugcaagguccagagcaaccggguguucugcgacaccaugaacucccugacccugcccagcgaggugaaccucugcaacaucgacaucuucaaccccaaguacgacugcaagaucaugacguccaagaccgacgucagcuccagcgugaucaccucccugggcgccaucgugagcugcuacgggaagaccaagugcacggcgagcaacaagaaccgcggcaucaucaagaccuucuccaacgggugcgacuacgucagcaacaagggcguggacaccguguccgucggcaacacccuguacugcgugaacaagcaggagggccagagccucuacgugaagggggagcccaucaucaacuucuacgacccgcuggucuuccccuccgacgaguucgacgccagcaucucccaggugaacgagaagaucaaccagagccuggccuucauccggaaguccgacgagcuccugcacaacgugaacgucggcaagagcaccacgaacaucaugaucaccaccaucaucaucgugaucaucgugauccugcugcuccugaucgccgucgggcuguuccucuacugcaaggcccgcuccacccccgugacgcugagcaaggaccagcuguccgggaucaacaacaucgcguucagcaacugaggacuagucccuguucccagagcccacuuuuuuuucuuuuuuugaaauaaaauagccugucuuucagaucuaaaaaaaaaaaaaaaaaaaaaaaaaaaaaaaaaaaaaaaaaaaaaaaaaaaaaaaaaaaaaaaaugcaucccccccccccccccccccccccccccccccaaaggcucuuuucagagccaccagaauu

SEQ ID NO: 14070 - RNA, 1906 nt, Artificial Sequence
  mRNA product Design d-1 comprising derived and/or modified sequence from HRSV(Memphis-37)__AIY60640.1__F_DSCav1_mut1 (opt1)
gggagacccgugacccggaaguuguacggcuacgcgacuuucccucccacaaacccucgcgcccuuccuuuccuacuugggcccggcagaaagcuuaccauggagcugcccauccucaagaccaacgccaucaccacgauccuggccgcggugacccugugcuucgccagcucccagaacaucaccgaggaguucuaccagagcacgugcuccgccgucagcaagggcuaccucggggcccugcgcaccggcugguacaccuccgugaucaccaucgagcugagcaacaucaaggagaacaagugcaacgggaccgacgccaaggugaagcucaucaagcaggagcuggacaaguacaagaacgcggucacggagcugcagcuccugaugcaguccaccccggccgccggcagcggguccgccaucugcagcggcaucgcggugugcaaggugcugcaccucgagggcgaggucaacaagaucaagaacgcccugcuguccaccaacaaggccguggugagccucuccaacggggucagcgugcugaccuucaaggugcuggaccucaagaacuacaucgacaagcagcugcugcccauccucaacaagcaguccugcagcauccccaacaucgagacggucaucgaguuccagcagaagaacaaccggcugcuggagaucacccgcgaguucuccgugaacgccggcgugaccacccccgucagcacguacaugcucaccaacuccgagcugcugagccucaucaacgacaugccgaucaccaacgaccagaagaagcugaugagcaacaacgugcagaucgugcggcagcaguccuacagcaucaugugcaucaucaaggaggagguccuggccuacguggugcagcucccccuguacggggucaucgacacccccugcuggaagcugcacacgagcccccucugcaccaccaacaccaaggagggcuccaacaucugccugacgcgcaccgaccgggggugguacugcgacaacgcgggcuccgugagcuucuucccgcaggccgagaccugcaaggugcaguccaaccgcgucuucugcgacaccaugaacagccugacgcuccccuccgaggugaaccugugcaacaucgacaucuucaaccccaaguacgacugcaagaucaugaccagcaagaccgacgucuccagcuccgugaucaccagccugggcgccaucguguccugcuacgggaagacgaagugcaccgccagcaacaagaaccggggcaucaucaagaccuucuccaacgggugcgacuacgucagcaacaagggcguggacaccguguccgucggcaacacgcucuacugcgugaacaagcaggaggggcagagccuguacgugaagggcgagcccaucaucaacuucuacgacccgcuggucuuccccagcgacgaguucgacgccuccaucagccaggugaacgagaagaucaaccagucccucgcguucauccgcaagagcgacgagcugcugcacaacgugaacgucgggaaguccaccaccaacaucaugaucaccaccaucaucaucgugaucaucgugauccuccugcugcucaucgccgucggccuguuccuguacugcaaggcccggagcacgcccgugacccuguccaaggaccagcucagcgggaucaacaacaucgccuucuccaacugaggacuagucccuguucccagagcccacuuuuuuuucuuuuuuugaaauaaaauagccugucuuucagaucuaaaaaaaaaaaaaaaaaaaaaaaaaaaaaaaaaaaaaaaaaaaaaaaaaaaaaaaaaaaaaaaaugcaucccccccccccccccccccccccccccccccaaaggcucuuuucagagccaccagaauu

SEQ ID NO: 14071 - RNA, 1906 nt, Artificial Sequence
  mRNA product Design d-1 comprising derived and/or modified sequence from HRSV(Memphis-37)__AIY60640.1__F_DSCav1_mut1 (opt2)
gggagacccgugacccggaaguuguacggcuacgcgacuuucccucccacaaacccucgcgcccuuccuuuccuacuugggcccggcagaaagcuuaccauggagcuccccauccucaagaccaacgccaucaccaccauccucgccgccgucacccucugcuucgccuccucccagaacaucaccgaggaguucuaccaguccaccugcuccgccgucuccaagggcuaccucggcgcccuccgcaccggcugguacaccuccgucaucaccaucgagcucuccaacaucaaggagaacaagugcaacggcaccgacgccaaggucaagcucaucaagcaggagcucgacaaguacaagaacgccgucaccgagcuccagcuccucaugcaguccacccccgccgccggcuccggcuccgccaucugcuccggcaucgccgucugcaagguccuccaccucgagggcgaggucaacaagaucaagaacgcccuccucuccaccaacaaggccgucgucucccucuccaacggcgucuccguccucaccuucaagguccucgaccucaagaacuacaucgacaagcagcuccuccccauccucaacaagcaguccugcuccauccccaacaucgagaccgucaucgaguuccagcagaagaacaaccgccuccucgagaucacccgcgaguucuccgucaacgccggcgucaccacccccgucuccaccuacaugcucaccaacuccgagcuccucucccucaucaacgacaugcccaucaccaacgaccagaagaagcucauguccaacaacguccagaucguccgccagcaguccuacuccaucaugugcaucaucaaggaggagguccucgccuacgucguccagcucccccucuacggcgucaucgacacccccugcuggaagcuccacaccuccccccucugcaccaccaacaccaaggagggcuccaacaucugccucacccgcaccgaccgcggcugguacugcgacaacgccggcuccgucuccuucuucccccaggccgagaccugcaagguccaguccaaccgcgucuucugcgacaccaugaacucccucacccuccccuccgaggucaaccucugcaacaucgacaucuucaaccccaaguacgacugcaagaucaugaccuccaagaccgacgucuccuccuccgucaucaccucccucggcgccaucgucuccugcuacggcaagaccaagugcaccgccuccaacaagaaccgcggcaucaucaagaccuucuccaacggcugcgacuacgucuccaacaagggcgucgacaccgucuccgucggcaacacccucuacugcgucaacaagcaggagggccagucccucuacgucaagggcgagcccaucaucaacuucuacgacccccucgucuuccccuccgacgaguucgacgccuccaucucccaggucaacgagaagaucaaccagucccucgccuucauccgcaaguccgacgagcuccuccacaacgucaacgucggcaaguccaccaccaacaucaugaucaccaccaucaucaucgucaucaucgucauccuccuccuccucaucgccgucggccucuuccucuacugcaaggcccgcuccacccccgucacccucuccaaggaccagcucuccggcaucaacaacaucgccuucuccaacugaggacuagucccuguucccagagcccacuuuuuuuucuuuuuuugaaauaaaauagccugucuuucagaucuaaaaaaaaaaaaaaaaaaaaaaaaaaaaaaaaaaaaaaaaaaaaaaaaaaaaaaaaaaaaaaaaugcaucccccccccccccccccccccccccccccccaaaggcucuuuucagagccaccagaauu

SEQ ID NO: 14072 - RNA, 1906 nt, Artificial Sequence
  mRNA product Design d-1 comprising derived and/or modified sequence from HRSV(Memphis-37)__AIY60640.1__F_DSCav1_mut1 (opt3)
gggagacccgugacccggaaguuguacggcuacgcgacuuucccucccacaaacccucgcgcccuuccuuuccuacuugggcccggcagaaagcuuaccauggagcugcccauccucaagaccaacgccauuacaacuauacuugcugcagugacgcugugcuucgccagcucccagaauaucaccgaagaguuuuaccaaucuacauguucagcggucaguaaaggcuauuugggggcuuuaagaacuggaugguacaccagcguuauuacaaucgaacuguccaacauuaaggagaauaaaugcaacgguaccgacgccaaggugaaacuaaucaagcaggaacucgauaaguauaaaaaugcaguaacugagcugcagcuucugaugcagucuacuccugccgcuggcucggggucagcaauauguagcggaaucgccgugugcaaggucuugcaccucgagggcgaagugaacaaaauuaagaaugcucugcugaguaccaacaaagccguugugucccucucuaauggugucagcguguuaacguucaagguacuggaccuuaagaacuacaucgauaaacaauugcugccaauucuaaauaagcaguccuguucaaucccgaacauagagacuguuauugaauuucagcagaaaaauaacaggcuccuggagaucacccgggaguucagugugaaugcgggggucacaacucccgugagcaccuauaugcuuacaaacucugaacuguugucccucauuaacgacaugccuaucaccaaugaucaaaagaaacugaugucaaacaaugugcagaucguccgccagcagagcuacaguauuaugugcauaaucaaggaggaaguuuuagcauaugugguacaacugccacucuacggagugauugacacgcccuguuggaaacuucauacuucuccucugugcacaaccaacacuaaggagggcuccaauaucuguuugacacgaaccgaucguggcugguacugcgacaacgccgggagcgucucguuuuucccacaggcugaaacguguaaggugcagucuaauagaguguuuugcgauaccaugaacucccuaacacugcccucagagguuaaucucugcaacauagacauuuucaauccuaaauaugauuguaagaucaugacaaguaaaaccgacgucagcuccucugugaucacaagccugggagccauuguaucaugcuacgguaagacuaaauguaccgcaaguaacaagaauaggggcaucauuaagacauuuuccaacgggugcgauuauguuagcaauaaaggaguggacaccgucucugugggcaacacucuuuacugugucaacaagcaagagggucagucacuguaugugaaaggggaaccaauaaucaauuucuacgacccguugguuuuucccagugaugaguucgacgcuagcauuucccaggugaacgaaaagaucaaucagucucucgccuuuauccggaaaucggaugagcuguuacacaacguaaaugucggaaagagcacgacaaacauuaugauaaccacuaucauuaucgugauuaucguuauacugcuacuccugaucgcggugggccuuuucuuguauugcaaggcccgcuccaccccugucacacugucaaaagaccaacucaguggcauuaauaacaucgcauucucuaauugaggacuagucccuguucccagagcccacuuuuuuuucuuuuuuugaaauaaaauagccugucuuucagaucuaaaaaaaaaaaaaaaaaaaaaaaaaaaaaaaaaaaaaaaaaaaaaaaaaaaaaaaaaaaaaaaaugcaucccccccccccccccccccccccccccccccaaaggcucuuuucagagccaccagaauu

SEQ ID NO: 14073 - RNA, 1906 nt, Artificial Sequence
  mRNA product Design d-1 comprising derived and/or modified sequence from HRSV(Memphis-37)__AIY60640.1__F_DSCav1_mut1 (opt4)
gggagacccgugacccggaaguuguacggcuacgcgacuuucccucccacaaacccucgcgcccuuccuuuccuacuugggcccggcagaaagcuuaccauggagcugcccauccugaagaccaacgccaucaccaccauccuggccgccgugacccugugcuucgccagcagccagaacaucaccgaggaguucuaccagagcaccugcagcgccgugagcaagggcuaccugggcgcccugagaaccggcugguacaccagcgugaucaccaucgagcugagcaacaucaaggagaacaagugcaacggcaccgacgccaaggugaagcugaucaagcaggagcuggacaaguacaagaacgccgugaccgagcugcagcugcugaugcagagcacccccgccgccggcagcggcagcgccaucugcagcggcaucgccgugugcaaggugcugcaccuggagggcgaggugaacaagaucaagaacgcccugcugagcaccaacaaggccguggugagccugagcaacggcgugagcgugcugaccuucaaggugcuggaccugaagaacuacaucgacaagcagcugcugcccauccugaacaagcagagcugcagcauccccaacaucgagaccgugaucgaguuccagcagaagaacaacagacugcuggagaucaccagagaguucagcgugaacgccggcgugaccacccccgugagcaccuacaugcugaccaacagcgagcugcugagccugaucaacgacaugcccaucaccaacgaccagaagaagcugaugagcaacaacgugcagaucgugagacagcagagcuacagcaucaugugcaucaucaaggaggaggugcuggccuacguggugcagcugccccuguacggcgugaucgacacccccugcuggaagcugcacaccagcccccugugcaccaccaacaccaaggagggcagcaacaucugccugaccagaaccgacagaggcugguacugcgacaacgccggcagcgugagcuucuucccccaggccgagaccugcaaggugcagagcaacagaguguucugcgacaccaugaacagccugacccugcccagcgaggugaaccugugcaacaucgacaucuucaaccccaaguacgacugcaagaucaugaccagcaagaccgacgugagcagcagcgugaucaccagccugggcgccaucgugagcugcuacggcaagaccaagugcaccgccagcaacaagaacagaggcaucaucaagaccuucagcaacggcugcgacuacgugagcaacaagggcguggacaccgugagcgugggcaacacccuguacugcgugaacaagcaggagggccagagccuguacgugaagggcgagcccaucaucaacuucuacgacccccugguguuccccagcgacgaguucgacgccagcaucagccaggugaacgagaagaucaaccagagccuggccuucaucagaaagagcgacgagcugcugcacaacgugaacgugggcaagagcaccaccaacaucaugaucaccaccaucaucaucgugaucaucgugauccugcugcugcugaucgccgugggccuguuccuguacugcaaggccagaagcacccccgugacccugagcaaggaccagcugagcggcaucaacaacaucgccuucagcaacugaggacuagucccuguucccagagcccacuuuuuuuucuuuuuuugaaauaaaauagccugucuuucagaucuaaaaaaaaaaaaaaaaaaaaaaaaaaaaaaaaaaaaaaaaaaaaaaaaaaaaaaaaaaaaaaaaugcaucccccccccccccccccccccccccccccccaaaggcucuuuucagagccaccagaauu

SEQ ID NO: 14074 - RNA, 1906 nt, Artificial Sequence
  mRNA product Design d-1 comprising derived and/or modified sequence from HRSV(Memphis-37)__AIY60640.1__F_DSCav1_mut1 (opt5)
gggagacccgugacccggaaguuguacggcuacgcgacuuucccucccacaaacccucgcgcccuuccuuuccuacuugggcccggcagaaagcuuaccauggagcugcccauccucaagaccaacgccauuacaacgauccuggcugccgugacccuuugcuucgcgagcucccagaauauuacagaagaguuuuaccaaucuaccuguagcgcugucuccaaaggcuaucugggggcccucagaacaggaugguacaccucuguuaucacaauugaacugagcaacaucaaggagaauaaaugcaacggcaccgacgccaaggugaaacuuaucaagcaggaacuggauaaguauaaaaaugcugugacggagcuccagcugcugaugcaguccaccccugccgcugggucuggaagcgccauuuguuccggcaucgcggucugcaaggugcuccaccuggagggggaaguuaacaaaauuaagaaugcccuucugagcacaaacaaagcuguggucucucucuccaauggagugagcguucugaccuucaaggugcuugaccugaagaacuacaucgauaaacaacuccugccgauucugaauaagcagucuuguuccauccccaacauugagacagucaucgaauuucagcagaaaaauaaccggcuccuggagaucacccgcgaguucagcgugaaugccggcgugacgacaccugucucuaccuauaugcuuacaaacuccgaacugcucagccugauuaacgacaugcccaucaccaaugaucaaaagaaacuuauguccaacaauguucagauugugagacagcagucuuacagcaucaugugcauuaucaaggaggaagugcuggcuuaugucgugcaacucccucuguacggcguuaucgacacccccuguuggaaacugcauacauccccucucugcacgaccaacacaaaggaggggagcaauauuugucugacccggacagaucgcggaugguacugcgacaacgccggcucuguguccuuuuucccgcaggcggaaaccuguaagguccagagcaauagaguguuuugcgauacgaugaacucucuuacacugcccagcgagguuaaucucugcaacaucgacauuuucaauccuaaauaugauuguaagaucaugaccuccaaaaccgacgugucuagcuccgucauuacaagccugggggccaucgugucuugcuacggaaagaccaaauguacagcuuccaacaagaaucggggcaucauuaagacguuuagcaacgggugcgauuaugucucuaauaaaggaguggacaccguuuccgugggcaacacacuuuacugugucaacaagcaagagggccagagccuguaugugaaaggggaacccaucauuaauuucuacgacccucucguuuuucccuccgaugaguucgacgccucuaucagccaggugaacgaaaagauuaaucagucccuggcuuuuauccgcaaaucugaugagcugcuccacaacgucaaugugggaaagagcaccacaaacauuaugaucaccacgaucauuaucgugauuaucguuauucugcuucugcucaucgccgucggccuguuccuguauugcaaggccagauccaccccggugacacuuagcaaagaccaacucucugggaucaauaacauugcuuucuccaauugaggacuagucccuguucccagagcccacuuuuuuuucuuuuuuugaaauaaaauagccugucuuucagaucuaaaaaaaaaaaaaaaaaaaaaaaaaaaaaaaaaaaaaaaaaaaaaaaaaaaaaaaaaaaaaaaaugcaucccccccccccccccccccccccccccccccaaaggcucuuuucagagccaccagaauu

SEQ ID NO: 14075 - RNA, 1906 nt, Artificial Sequence
  mRNA product Design d-1 comprising derived and/or modified sequence from HRSV(Memphis-37)__AIY60640.1__F_DSCav1_mut1 (opt6)
gggagacccgugacccggaaguuguacggcuacgcgacuuucccucccacaaacccucgcgcccuuccuuuccuacuugggcccggcagaaagcuuaccauggaacuuccaauucuaaaaaccaaugcuauaacaacaauauuagcagcaguuacauuaugcuucgccucaucacaaaauaucacagaagaauuuuaccaauccacaugcucagcaguaucuaaaggguaccuaggagcccuacgaacaggaugguacacaucaguaauaacaauagaacucucaaacaucaaagaaaacaaaugcaauggaacagacgcuaaaguaaaauuaauaaaacaagaacuagacaaauacaaaaacgccgucaccgaacuucaguuacucaugcaaagcacaccugcagcaggaucagguucagcaauaugcucaggaauagcaguuugcaaaguauuacaccuagaaggugaagucaacaaaauaaaaaacgcacuucuaaguacuaacaaagcuguaguaucauuaucaaacggaguauccguacuaaccuuuaaaguccuagaccuaaaaaacuacauagacaaacaacuacucccaauacucaauaaacaauccugcucaauucccaacaucgaaacaguaauagaauuucaacaaaaaaacaaucgccuucuagaaauaacaagagaauuuucagucaacgccggaguaacaacaccaguaucaacauauaugcuaacaaacagugaacuauuauccuuaauaaacgacaugccaauaacaaaugaccaaaaaaaacuaauguccaauaauguccaaauaguaagacaacaaagcuauucaauuauguguauaauaaaagaagaaguauuagcauacguaguucaacuaccacuauauggcguuauagacacaccaugcuggaaauuacacacaagcccacuaugcacaacaaauacaaaagaaggauccaacauuugcuuaacuagaacugacagaggaugguacugcgacaacgcuggaucagucucuuucuucccacaagcagaaaccuguaaaguacaaucaaauagagucuucugcgacacaaugaacucacuaacucucccaucugaaguaaacuuaugcaacaucgauauauuuaacccaaaauacgauuguaaaauaaugacauccaaaacagacguuucaucaagcguaaucaccucccucggagcaaucguaagcugcuacgguaaaacaaaaugcacagcauccaacaaaaacagaggcaucauaaaaacauucucaaacggaugugacuauguaucaaacaaaggaguagacacaguuucaguaggcaauaccuuauacugugucaauaaacaagaaggacaaucacuauauguaaaaggagaaccuauaauaaacuucuacgacccccucgucuucccuagcgaugaauuugacgcaucaauaucgcaaguaaacgaaaaaauaaaccaaucauuagccuuuauaagaaaaucagacgaauuauuacacaacguaaacguggggaaaagcacaacuaacaucaugauaacaacuaucauaauuguaaucaucgucauccuauuacuccuaaucgcaguaggacuauuccuauacugcaaagcuagaucaacaccagucacccuaucgaaagaucaauugucaggaauaaacaauauagccuuuucaaauuaaggacuagucccuguucccagagcccacuuuuuuuucuuuuuuugaaauaaaauagccugucuuucagaucuaaaaaaaaaaaaaaaaaaaaaaaaaaaaaaaaaaaaaaaaaaaaaaaaaaaaaaaaaaaaaaaaugcaucccccccccccccccccccccccccccccccaaaggcucuuuucagagccaccagaauu

SEQ ID NO: 14076 - RNA, 1906 nt, Artificial Sequence
  mRNA product Design d-1 comprising derived and/or modified sequence from HRSV(Memphis-37)__AIY60640.1__F_DSCav1_mut1 (opt11)
gggagacccgugacccggaaguuguacggcuacgcgacuuucccucccacaaacccucgcgcccuuccuuuccuacuugggcccggcagaaagcuuaccauggaacuccccauccucaaaacgaacgccaucacaaccauccucgccgccgucacccucugcuucgcgucaucccaaaacauaacugaagaguucuaucaaucaaccugcuccgcagucucaaaaggcuaccucggcgcccuacggaccggcugguacacaagcgucaucacaauagaacuuuccaacaucaaagaaaacaaauguaacggcaccgacgcaaaagucaaacucauaaaacaagaacuagacaaauauaaaaacgccguaacugaacuacaacuccucaugcaaucaacuccugcagccgguagcggcuccgcaaucugcucaggcaucgcagucugcaaagucuuacaccuagaaggcgaagucaacaaaaucaagaacgcccuacuauccacaaacaaagcaguagucucucuauccaacggagucuccguccucacauucaaaguacucgaccuaaagaacuacaucgacaaacaacuacuaccaaucuuaaacaaacaauccugcucaaucccuaacauugaaaccgucauagaguuccaacagaaaaacaaccgccuccucgaaauaaccagagaguucucagucaacgccggcgucaccaccccggucucaaccuacaugcuaaccaacucugaacuucucagccuaaucaacgacaugcccauuaccaacgaccaaaagaaacucauguccaauaacguccaaaucguucgacaacaauccuacucaaucaugugcaucauaaaagaagaaguccuagcauacgucguccaacucccacuauacggcguaaucgacacccccugcuggaaacuccacaccuccccucucuguaccaccaacaccaaagaaggguccaacaucugccucacgcgcaccgaccgaggcugguauugcgacaaugcaggcucugucuccuucuucccccaagccgaaaccugcaaaguccaaucuaaccgcgucuucugcgacaccaugaacagucuuacccucccgucagaagucaaccucugcaacauagauaucuucaacccaaaauacgacugcaaaaucaugaccucaaaaaccgacguuuccucauccguuaucaccucccucggcgcaaucgucagcugcuacggcaagacaaagugcacggcuucaaacaaaaaccgcggaaucaucaagacauucagcaacggcugcgacuacguauccaacaaaggaguggacacagucuccguuggaaacacccucuacugcguaaacaaacaagaaggccaaucacucuacgucaaaggcgaacccaucaucaacuucuacgacccacucgucuuccccuccgacgaguucgacgccucaaucagccaagucaacgagaaaauuaaccagucacucgccuucauacgcaaauccgacgaacuucuacacaacguaaacgucggaaaaucaaccacaaacaucaugauuaccacaauuaucauagucaucauaguaauccuccugcuacucauagcagucggacucuuccuauacugcaaagcccgcuccaccccugucacccuauccaaagaccaacuuuccggcaucaacaacauagccuuuuccaacuaaggacuagucccuguucccagagcccacuuuuuuuucuuuuuuugaaauaaaauagccugucuuucagaucuaaaaaaaaaaaaaaaaaaaaaaaaaaaaaaaaaaaaaaaaaaaaaaaaaaaaaaaaaaaaaaaaugcaucccccccccccccccccccccccccccccccaaaggcucuuuucagagccaccagaauu

SEQ ID NO: 14077 - RNA, 1961 nt, Artificial Sequence
  mRNA product Design d-2 comprising derived and/or modified sequence from HRSV(Memphis-37)__AIY60640.1__F_DSCav1_mut1 (opt1)
gggagagcggcucggccauuuugucccagucaguccggaggcugcggcugcagaaguaccgccugcggaguaacugcaaagaagcuuaccauggagcugcccauccucaagaccaacgccaucaccacgauccuggccgcggugacccugugcuucgccagcucccagaacaucaccgaggaguucuaccagagcacgugcuccgccgucagcaagggcuaccucggcgcccugcgcaccgggugguacaccagcgugaucaccaucgagcuguccaacaucaaggagaacaagugcaacggcaccgacgccaaggugaagcucaucaagcaggagcuggacaaguacaagaacgcggucacggagcugcagcuccugaugcagagcaccccggccgccggcuccgggagcgcgaucugcuccggcaucgccgucugcaaggugcugcaccucgagggcgaggugaacaagaucaagaacgcccugcuguccaccaacaaggccgucgugagccucuccaacggggugagcguccugaccuucaaggugcuggaccucaagaacuacaucgacaagcagcugcugcccauccugaacaagcagagcugcuccauccccaacaucgagaccgucaucgaguuccagcagaagaacaaccgccuccuggagaucacgcgggaguucagcgugaacgcgggcgugaccacccccgucuccaccuacaugcugacgaacagcgagcuccugucccugaucaacgacaugccgaucaccaacgaccagaagaagcucaugagcaacaacgugcagaucgugcgccagcaguccuacagcaucaugugcaucaucaaggaggagguccuggccuacguggugcagcugccccucuacggggucaucgacacccccugcuggaagcugcacaccagcccccugugcacgaccaacaccaaggagggcuccaacaucugccucacccggacggaccgcgggugguacugcgacaacgccggcagcguguccuucuucccgcaggccgagaccugcaagguccagagcaaccggguguucugcgacaccaugaacucccugacccugcccagcgaggugaaccucugcaacaucgacaucuucaaccccaaguacgacugcaagaucaugacguccaagaccgacgucagcuccagcgugaucaccucccugggcgccaucgugagcugcuacgggaagaccaagugcacggcgagcaacaagaaccgcggcaucaucaagaccuucuccaacgggugcgacuacgucagcaacaagggcguggacaccguguccgucggcaacacccuguacugcgugaacaagcaggagggccagagccucuacgugaagggggagcccaucaucaacuucuacgacccgcuggucuuccccuccgacgaguucgacgccagcaucucccaggugaacgagaagaucaaccagagccuggccuucauccggaaguccgacgagcuccugcacaacgugaacgucggcaagagcaccacgaacaucaugaucaccaccaucaucaucgugaucaucgugauccugcugcuccugaucgccgucgggcuguuccucuacugcaaggcccgcuccacccccgugacgcugagcaaggaccagcuguccgggaucaacaacaucgcguucagcaacugaggacuaguaauaaggaaacuguaugaaugucugugggcaggaagugaagagauccuucuguaaagguuuuuggaauuaugucugcugaauaauaaacuuuuuugaaauaauaaaucugguagaaaaaugagaucuaaaaaaaaaaaaaaaaaaaaaaaaaaaaaaaaaaaaaaaaaaaaaaaaaaaaaaaaaaaaaaaaugcaucccccccccccccccccccccccccccccccaaaggcucuuuucagagccaccagaauu

SEQ ID NO: 14078 - RNA, 1961 nt, Artificial Sequence
  mRNA product Design d-2 comprising derived and/or modified sequence from HRSV(Memphis-37)__AIY60640.1__F_DSCav1_mut1 (opt1)
gggagagcggcucggccauuuugucccagucaguccggaggcugcggcugcagaaguaccgccugcggaguaacugcaaagaagcuuaccauggagcugcccauccucaagaccaacgccaucaccacgauccuggccgcggugacccugugcuucgccagcucccagaacaucaccgaggaguucuaccagagcacgugcuccgccgucagcaagggcuaccucggggcccugcgcaccggcugguacaccuccgugaucaccaucgagcugagcaacaucaaggagaacaagugcaacgggaccgacgccaaggugaagcucaucaagcaggagcuggacaaguacaagaacgcggucacggagcugcagcuccugaugcaguccaccccggccgccggcagcggguccgccaucugcagcggcaucgcggugugcaaggugcugcaccucgagggcgaggucaacaagaucaagaacgcccugcuguccaccaacaaggccguggugagccucuccaacggggucagcgugcugaccuucaaggugcuggaccucaagaacuacaucgacaagcagcugcugcccauccucaacaagcaguccugcagcauccccaacaucgagacggucaucgaguuccagcagaagaacaaccggcugcuggagaucacccgcgaguucuccgugaacgccggcgugaccacccccgucagcacguacaugcucaccaacuccgagcugcugagccucaucaacgacaugccgaucaccaacgaccagaagaagcugaugagcaacaacgugcagaucgugcggcagcaguccuacagcaucaugugcaucaucaaggaggagguccuggccuacguggugcagcucccccuguacggggucaucgacacccccugcuggaagcugcacacgagcccccucugcaccaccaacaccaaggagggcuccaacaucugccugacgcgcaccgaccgggggugguacugcgacaacgcgggcuccgugagcuucuucccgcaggccgagaccugcaaggugcaguccaaccgcgucuucugcgacaccaugaacagccugacgcuccccuccgaggugaaccugugcaacaucgacaucuucaaccccaaguacgacugcaagaucaugaccagcaagaccgacgucuccagcuccgugaucaccagccugggcgccaucguguccugcuacgggaagacgaagugcaccgccagcaacaagaaccggggcaucaucaagaccuucuccaacgggugcgacuacgucagcaacaagggcguggacaccguguccgucggcaacacgcucuacugcgugaacaagcaggaggggcagagccuguacgugaagggcgagcccaucaucaacuucuacgacccgcuggucuuccccagcgacgaguucgacgccuccaucagccaggugaacgagaagaucaaccagucccucgcguucauccgcaagagcgacgagcugcugcacaacgugaacgucgggaaguccaccaccaacaucaugaucaccaccaucaucaucgugaucaucgugauccuccugcugcucaucgccgucggccuguuccuguacugcaaggcccggagcacgcccgugacccuguccaaggaccagcucagcgggaucaacaacaucgccuucuccaacugaggacuaguaauaaggaaacuguaugaaugucugugggcaggaagugaagagauccuucuguaaagguuuuuggaauuaugucugcugaauaauaaacuuuuuugaaauaauaaaucugguagaaaaaugagaucuaaaaaaaaaaaaaaaaaaaaaaaaaaaaaaaaaaaaaaaaaaaaaaaaaaaaaaaaaaaaaaaaugcaucccccccccccccccccccccccccccccccaaaggcucuuuucagagccaccagaauu

SEQ ID NO: 14079 - RNA, 1961 nt, Artificial Sequence
  mRNA product Design d-2 comprising derived and/or modified sequence from HRSV(Memphis-37)__AIY60640.1__F_DSCav1_mut1 (opt2)
gggagagcggcucggccauuuugucccagucaguccggaggcugcggcugcagaaguaccgccugcggaguaacugcaaagaagcuuaccauggagcuccccauccucaagaccaacgccaucaccaccauccucgccgccgucacccucugcuucgccuccucccagaacaucaccgaggaguucuaccaguccaccugcuccgccgucuccaagggcuaccucggcgcccuccgcaccggcugguacaccuccgucaucaccaucgagcucuccaacaucaaggagaacaagugcaacggcaccgacgccaaggucaagcucaucaagcaggagcucgacaaguacaagaacgccgucaccgagcuccagcuccucaugcaguccacccccgccgccggcuccggcuccgccaucugcuccggcaucgccgucugcaagguccuccaccucgagggcgaggucaacaagaucaagaacgcccuccucuccaccaacaaggccgucgucucccucuccaacggcgucuccguccucaccuucaagguccucgaccucaagaacuacaucgacaagcagcuccuccccauccucaacaagcaguccugcuccauccccaacaucgagaccgucaucgaguuccagcagaagaacaaccgccuccucgagaucacccgcgaguucuccgucaacgccggcgucaccacccccgucuccaccuacaugcucaccaacuccgagcuccucucccucaucaacgacaugcccaucaccaacgaccagaagaagcucauguccaacaacguccagaucguccgccagcaguccuacuccaucaugugcaucaucaaggaggagguccucgccuacgucguccagcucccccucuacggcgucaucgacacccccugcuggaagcuccacaccuccccccucugcaccaccaacaccaaggagggcuccaacaucugccucacccgcaccgaccgcggcugguacugcgacaacgccggcuccgucuccuucuucccccaggccgagaccugcaagguccaguccaaccgcgucuucugcgacaccaugaacucccucacccuccccuccgaggucaaccucugcaacaucgacaucuucaaccccaaguacgacugcaagaucaugaccuccaagaccgacgucuccuccuccgucaucaccucccucggcgccaucgucuccugcuacggcaagaccaagugcaccgccuccaacaagaaccgcggcaucaucaagaccuucuccaacggcugcgacuacgucuccaacaagggcgucgacaccgucuccgucggcaacacccucuacugcgucaacaagcaggagggccagucccucuacgucaagggcgagcccaucaucaacuucuacgacccccucgucuuccccuccgacgaguucgacgccuccaucucccaggucaacgagaagaucaaccagucccucgccuucauccgcaaguccgacgagcuccuccacaacgucaacgucggcaaguccaccaccaacaucaugaucaccaccaucaucaucgucaucaucgucauccuccuccuccucaucgccgucggccucuuccucuacugcaaggcccgcuccacccccgucacccucuccaaggaccagcucuccggcaucaacaacaucgccuucuccaacugaggacuaguaauaaggaaacuguaugaaugucugugggcaggaagugaagagauccuucuguaaagguuuuuggaauuaugucugcugaauaauaaacuuuuuugaaauaauaaaucugguagaaaaaugagaucuaaaaaaaaaaaaaaaaaaaaaaaaaaaaaaaaaaaaaaaaaaaaaaaaaaaaaaaaaaaaaaaaugcaucccccccccccccccccccccccccccccccaaaggcucuuuucagagccaccagaauu

SEQ ID NO: 14080 - RNA, 1961 nt, Artificial Sequence
  mRNA product Design d-2 comprising derived and/or modified sequence from HRSV(Memphis-37)__AIY60640.1__F_DSCav1_mut1 (opt3)
gggagagcggcucggccauuuugucccagucaguccggaggcugcggcugcagaaguaccgccugcggaguaacugcaaagaagcuuaccauggagcugcccauccucaagaccaacgccauuacaacuauacuugcugcagugacgcugugcuucgccagcucccagaauaucaccgaagaguuuuaccaaucuacauguucagcggucaguaaaggcuauuugggggcuuuaagaacuggaugguacaccagcguuauuacaaucgaacuguccaacauuaaggagaauaaaugcaacgguaccgacgccaaggugaaacuaaucaagcaggaacucgauaaguauaaaaaugcaguaacugagcugcagcuucugaugcagucuacuccugccgcuggcucggggucagcaauauguagcggaaucgccgugugcaaggucuugcaccucgagggcgaagugaacaaaauuaagaaugcucugcugaguaccaacaaagccguugugucccucucuaauggugucagcguguuaacguucaagguacuggaccuuaagaacuacaucgauaaacaauugcugccaauucuaaauaagcaguccuguucaaucccgaacauagagacuguuauugaauuucagcagaaaaauaacaggcuccuggagaucacccgggaguucagugugaaugcgggggucacaacucccgugagcaccuauaugcuuacaaacucugaacuguugucccucauuaacgacaugccuaucaccaaugaucaaaagaaacugaugucaaacaaugugcagaucguccgccagcagagcuacaguauuaugugcauaaucaaggaggaaguuuuagcauaugugguacaacugccacucuacggagugauugacacgcccuguuggaaacuucauacuucuccucugugcacaaccaacacuaaggagggcuccaauaucuguuugacacgaaccgaucguggcugguacugcgacaacgccgggagcgucucguuuuucccacaggcugaaacguguaaggugcagucuaauagaguguuuugcgauaccaugaacucccuaacacugcccucagagguuaaucucugcaacauagacauuuucaauccuaaauaugauuguaagaucaugacaaguaaaaccgacgucagcuccucugugaucacaagccugggagccauuguaucaugcuacgguaagacuaaauguaccgcaaguaacaagaauaggggcaucauuaagacauuuuccaacgggugcgauuauguuagcaauaaaggaguggacaccgucucugugggcaacacucuuuacugugucaacaagcaagagggucagucacuguaugugaaaggggaaccaauaaucaauuucuacgacccguugguuuuucccagugaugaguucgacgcuagcauuucccaggugaacgaaaagaucaaucagucucucgccuuuauccggaaaucggaugagcuguuacacaacguaaaugucggaaagagcacgacaaacauuaugauaaccacuaucauuaucgugauuaucguuauacugcuacuccugaucgcggugggccuuuucuuguauugcaaggcccgcuccaccccugucacacugucaaaagaccaacucaguggcauuaauaacaucgcauucucuaauugaggacuaguaauaaggaaacuguaugaaugucugugggcaggaagugaagagauccuucuguaaagguuuuuggaauuaugucugcugaauaauaaacuuuuuugaaauaauaaaucugguagaaaaaugagaucuaaaaaaaaaaaaaaaaaaaaaaaaaaaaaaaaaaaaaaaaaaaaaaaaaaaaaaaaaaaaaaaaugcaucccccccccccccccccccccccccccccccaaaggcucuuuucagagccaccagaauu

SEQ ID NO: 14081 - RNA, 1961 nt, Artificial Sequence
  mRNA product Design d-2 comprising derived and/or modified sequence from HRSV(Memphis-37)__AIY60640.1__F_DSCav1_mut1 (opt4)
gggagagcggcucggccauuuugucccagucaguccggaggcugcggcugcagaaguaccgccugcggaguaacugcaaagaagcuuaccauggagcugcccauccugaagaccaacgccaucaccaccauccuggccgccgugacccugugcuucgccagcagccagaacaucaccgaggaguucuaccagagcaccugcagcgccgugagcaagggcuaccugggcgcccugagaaccggcugguacaccagcgugaucaccaucgagcugagcaacaucaaggagaacaagugcaacggcaccgacgccaaggugaagcugaucaagcaggagcuggacaaguacaagaacgccgugaccgagcugcagcugcugaugcagagcacccccgccgccggcagcggcagcgccaucugcagcggcaucgccgugugcaaggugcugcaccuggagggcgaggugaacaagaucaagaacgcccugcugagcaccaacaaggccguggugagccugagcaacggcgugagcgugcugaccuucaaggugcuggaccugaagaacuacaucgacaagcagcugcugcccauccugaacaagcagagcugcagcauccccaacaucgagaccgugaucgaguuccagcagaagaacaacagacugcuggagaucaccagagaguucagcgugaacgccggcgugaccacccccgugagcaccuacaugcugaccaacagcgagcugcugagccugaucaacgacaugcccaucaccaacgaccagaagaagcugaugagcaacaacgugcagaucgugagacagcagagcuacagcaucaugugcaucaucaaggaggaggugcuggccuacguggugcagcugccccuguacggcgugaucgacacccccugcuggaagcugcacaccagcccccugugcaccaccaacaccaaggagggcagcaacaucugccugaccagaaccgacagaggcugguacugcgacaacgccggcagcgugagcuucuucccccaggccgagaccugcaaggugcagagcaacagaguguucugcgacaccaugaacagccugacccugcccagcgaggugaaccugugcaacaucgacaucuucaaccccaaguacgacugcaagaucaugaccagcaagaccgacgugagcagcagcgugaucaccagccugggcgccaucgugagcugcuacggcaagaccaagugcaccgccagcaacaagaacagaggcaucaucaagaccuucagcaacggcugcgacuacgugagcaacaagggcguggacaccgugagcgugggcaacacccuguacugcgugaacaagcaggagggccagagccuguacgugaagggcgagcccaucaucaacuucuacgacccccugguguuccccagcgacgaguucgacgccagcaucagccaggugaacgagaagaucaaccagagccuggccuucaucagaaagagcgacgagcugcugcacaacgugaacgugggcaagagcaccaccaacaucaugaucaccaccaucaucaucgugaucaucgugauccugcugcugcugaucgccgugggccuguuccuguacugcaaggccagaagcacccccgugacccugagcaaggaccagcugagcggcaucaacaacaucgccuucagcaacugaggacuaguaauaaggaaacuguaugaaugucugugggcaggaagugaagagauccuucuguaaagguuuuuggaauuaugucugcugaauaauaaacuuuuuugaaauaauaaaucugguagaaaaaugagaucuaaaaaaaaaaaaaaaaaaaaaaaaaaaaaaaaaaaaaaaaaaaaaaaaaaaaaaaaaaaaaaaaugcaucccccccccccccccccccccccccccccccaaaggcucuuuucagagccaccagaauu

SEQ ID NO: 14082 - RNA, 1961 nt, Artificial Sequence
  mRNA product Design d-2 comprising derived and/or modified sequence from HRSV(Memphis-37)__AIY60640.1__F_DSCav1_mut1 (opt5)
gggagagcggcucggccauuuugucccagucaguccggaggcugcggcugcagaaguaccgccugcggaguaacugcaaagaagcuuaccauggagcugcccauccucaagaccaacgccauuacaacgauccuggcugccgugacccuuugcuucgcgagcucccagaauauuacagaagaguuuuaccaaucuaccuguagcgcugucuccaaaggcuaucugggggcccucagaacaggaugguacaccucuguuaucacaauugaacugagcaacaucaaggagaauaaaugcaacggcaccgacgccaaggugaaacuuaucaagcaggaacuggauaaguauaaaaaugcugugacggagcuccagcugcugaugcaguccaccccugccgcugggucuggaagcgccauuuguuccggcaucgcggucugcaaggugcuccaccuggagggggaaguuaacaaaauuaagaaugcccuucugagcacaaacaaagcuguggucucucucuccaauggagugagcguucugaccuucaaggugcuugaccugaagaacuacaucgauaaacaacuccugccgauucugaauaagcagucuuguuccauccccaacauugagacagucaucgaauuucagcagaaaaauaaccggcuccuggagaucacccgcgaguucagcgugaaugccggcgugacgacaccugucucuaccuauaugcuuacaaacuccgaacugcucagccugauuaacgacaugcccaucaccaaugaucaaaagaaacuuauguccaacaauguucagauugugagacagcagucuuacagcaucaugugcauuaucaaggaggaagugcuggcuuaugucgugcaacucccucuguacggcguuaucgacacccccuguuggaaacugcauacauccccucucugcacgaccaacacaaaggaggggagcaauauuugucugacccggacagaucgcggaugguacugcgacaacgccggcucuguguccuuuuucccgcaggcggaaaccuguaagguccagagcaauagaguguuuugcgauacgaugaacucucuuacacugcccagcgagguuaaucucugcaacaucgacauuuucaauccuaaauaugauuguaagaucaugaccuccaaaaccgacgugucuagcuccgucauuacaagccugggggccaucgugucuugcuacggaaagaccaaauguacagcuuccaacaagaaucggggcaucauuaagacguuuagcaacgggugcgauuaugucucuaauaaaggaguggacaccguuuccgugggcaacacacuuuacugugucaacaagcaagagggccagagccuguaugugaaaggggaacccaucauuaauuucuacgacccucucguuuuucccuccgaugaguucgacgccucuaucagccaggugaacgaaaagauuaaucagucccuggcuuuuauccgcaaaucugaugagcugcuccacaacgucaaugugggaaagagcaccacaaacauuaugaucaccacgaucauuaucgugauuaucguuauucugcuucugcucaucgccgucggccuguuccuguauugcaaggccagauccaccccggugacacuuagcaaagaccaacucucugggaucaauaacauugcuuucuccaauugaggacuaguaauaaggaaacuguaugaaugucugugggcaggaagugaagagauccuucuguaaagguuuuuggaauuaugucugcugaauaauaaacuuuuuugaaauaauaaaucugguagaaaaaugagaucuaaaaaaaaaaaaaaaaaaaaaaaaaaaaaaaaaaaaaaaaaaaaaaaaaaaaaaaaaaaaaaaaugcaucccccccccccccccccccccccccccccccaaaggcucuuuucagagccaccagaauu

SEQ ID NO: 14083 - RNA, 1961 nt, Artificial Sequence
  mRNA product Design d-2 comprising derived and/or modified sequence from HRSV(Memphis-37)__AIY60640.1__F_DSCav1_mut1 (opt6)
gggagagcggcucggccauuuugucccagucaguccggaggcugcggcugcagaaguaccgccugcggaguaacugcaaagaagcuuaccauggaacuuccaauucuaaaaaccaaugcuauaacaacaauauuagcagcaguuacauuaugcuucgccucaucacaaaauaucacagaagaauuuuaccaauccacaugcucagcaguaucuaaaggguaccuaggagcccuacgaacaggaugguacacaucaguaauaacaauagaacucucaaacaucaaagaaaacaaaugcaauggaacagacgcuaaaguaaaauuaauaaaacaagaacuagacaaauacaaaaacgccgucaccgaacuucaguuacucaugcaaagcacaccugcagcaggaucagguucagcaauaugcucaggaauagcaguuugcaaaguauuacaccuagaaggugaagucaacaaaauaaaaaacgcacuucuaaguacuaacaaagcuguaguaucauuaucaaacggaguauccguacuaaccuuuaaaguccuagaccuaaaaaacuacauagacaaacaacuacucccaauacucaauaaacaauccugcucaauucccaacaucgaaacaguaauagaauuucaacaaaaaaacaaucgccuucuagaaauaacaagagaauuuucagucaacgccggaguaacaacaccaguaucaacauauaugcuaacaaacagugaacuauuauccuuaauaaacgacaugccaauaacaaaugaccaaaaaaaacuaauguccaauaauguccaaauaguaagacaacaaagcuauucaauuauguguauaauaaaagaagaaguauuagcauacguaguucaacuaccacuauauggcguuauagacacaccaugcuggaaauuacacacaagcccacuaugcacaacaaauacaaaagaaggauccaacauuugcuuaacuagaacugacagaggaugguacugcgacaacgcuggaucagucucuuucuucccacaagcagaaaccuguaaaguacaaucaaauagagucuucugcgacacaaugaacucacuaacucucccaucugaaguaaacuuaugcaacaucgauauauuuaacccaaaauacgauuguaaaauaaugacauccaaaacagacguuucaucaagcguaaucaccucccucggagcaaucguaagcugcuacgguaaaacaaaaugcacagcauccaacaaaaacagaggcaucauaaaaacauucucaaacggaugugacuauguaucaaacaaaggaguagacacaguuucaguaggcaauaccuuauacugugucaauaaacaagaaggacaaucacuauauguaaaaggagaaccuauaauaaacuucuacgacccccucgucuucccuagcgaugaauuugacgcaucaauaucgcaaguaaacgaaaaaauaaaccaaucauuagccuuuauaagaaaaucagacgaauuauuacacaacguaaacguggggaaaagcacaacuaacaucaugauaacaacuaucauaauuguaaucaucgucauccuauuacuccuaaucgcaguaggacuauuccuauacugcaaagcuagaucaacaccagucacccuaucgaaagaucaauugucaggaauaaacaauauagccuuuucaaauuaaggacuaguaauaaggaaacuguaugaaugucugugggcaggaagugaagagauccuucuguaaagguuuuuggaauuaugucugcugaauaauaaacuuuuuugaaauaauaaaucugguagaaaaaugagaucuaaaaaaaaaaaaaaaaaaaaaaaaaaaaaaaaaaaaaaaaaaaaaaaaaaaaaaaaaaaaaaaaugcaucccccccccccccccccccccccccccccccaaaggcucuuuucagagccaccagaauu

SEQ ID NO: 14084 - RNA, 1961 nt, Artificial Sequence
  mRNA product Design d-2 comprising derived and/or modified sequence from HRSV(Memphis-37)__AIY60640.1__F_DSCav1_mut1 (opt11)
gggagagcggcucggccauuuugucccagucaguccggaggcugcggcugcagaaguaccgccugcggaguaacugcaaagaagcuuaccauggaacuccccauccucaaaacgaacgccaucacaaccauccucgccgccgucacccucugcuucgcgucaucccaaaacauaacugaagaguucuaucaaucaaccugcuccgcagucucaaaaggcuaccucggcgcccuacggaccggcugguacacaagcgucaucacaauagaacuuuccaacaucaaagaaaacaaauguaacggcaccgacgcaaaagucaaacucauaaaacaagaacuagacaaauauaaaaacgccguaacugaacuacaacuccucaugcaaucaacuccugcagccgguagcggcuccgcaaucugcucaggcaucgcagucugcaaagucuuacaccuagaaggcgaagucaacaaaaucaagaacgcccuacuauccacaaacaaagcaguagucucucuauccaacggagucuccguccucacauucaaaguacucgaccuaaagaacuacaucgacaaacaacuacuaccaaucuuaaacaaacaauccugcucaaucccuaacauugaaaccgucauagaguuccaacagaaaaacaaccgccuccucgaaauaaccagagaguucucagucaacgccggcgucaccaccccggucucaaccuacaugcuaaccaacucugaacuucucagccuaaucaacgacaugcccauuaccaacgaccaaaagaaacucauguccaauaacguccaaaucguucgacaacaauccuacucaaucaugugcaucauaaaagaagaaguccuagcauacgucguccaacucccacuauacggcguaaucgacacccccugcuggaaacuccacaccuccccucucuguaccaccaacaccaaagaaggguccaacaucugccucacgcgcaccgaccgaggcugguauugcgacaaugcaggcucugucuccuucuucccccaagccgaaaccugcaaaguccaaucuaaccgcgucuucugcgacaccaugaacagucuuacccucccgucagaagucaaccucugcaacauagauaucuucaacccaaaauacgacugcaaaaucaugaccucaaaaaccgacguuuccucauccguuaucaccucccucggcgcaaucgucagcugcuacggcaagacaaagugcacggcuucaaacaaaaaccgcggaaucaucaagacauucagcaacggcugcgacuacguauccaacaaaggaguggacacagucuccguuggaaacacccucuacugcguaaacaaacaagaaggccaaucacucuacgucaaaggcgaacccaucaucaacuucuacgacccacucgucuuccccuccgacgaguucgacgccucaaucagccaagucaacgagaaaauuaaccagucacucgccuucauacgcaaauccgacgaacuucuacacaacguaaacgucggaaaaucaaccacaaacaucaugauuaccacaauuaucauagucaucauaguaauccuccugcuacucauagcagucggacucuuccuauacugcaaagcccgcuccaccccugucacccuauccaaagaccaacuuuccggcaucaacaacauagccuuuuccaacuaaggacuaguaauaaggaaacuguaugaaugucugugggcaggaagugaagagauccuucuguaaagguuuuuggaauuaugucugcugaauaauaaacuuuuuugaaauaauaaaucugguagaaaaaugagaucuaaaaaaaaaaaaaaaaaaaaaaaaaaaaaaaaaaaaaaaaaaaaaaaaaaaaaaaaaaaaaaaaugcaucccccccccccccccccccccccccccccccaaaggcucuuuucagagccaccagaauu

SEQ ID NO: 14085 - RNA, 2277 nt, Artificial Sequence
  mRNA product Design d-3 comprising derived and/or modified sequence from HRSV(Memphis-37)__AIY60640.1__F_DSCav1_mut1 (opt1)
gggagagggcgcuuggcuugcaaggacccugagcugcggcauugaagcacacccaacccaacucgacugaagucagccucacugaaccggaucugagaaucuucucucucugggcuugccagggcucuccgaaccuagcuagcauccucuucaauuccaacuagaaagcuuaccauggagcugcccauccucaagaccaacgccaucaccacgauccuggccgcggugacccugugcuucgccagcucccagaacaucaccgaggaguucuaccagagcacgugcuccgccgucagcaagggcuaccucggcgcccugcgcaccgggugguacaccagcgugaucaccaucgagcuguccaacaucaaggagaacaagugcaacggcaccgacgccaaggugaagcucaucaagcaggagcuggacaaguacaagaacgcggucacggagcugcagcuccugaugcagagcaccccggccgccggcuccgggagcgcgaucugcuccggcaucgccgucugcaaggugcugcaccucgagggcgaggugaacaagaucaagaacgcccugcuguccaccaacaaggccgucgugagccucuccaacggggugagcguccugaccuucaaggugcuggaccucaagaacuacaucgacaagcagcugcugcccauccugaacaagcagagcugcuccauccccaacaucgagaccgucaucgaguuccagcagaagaacaaccgccuccuggagaucacgcgggaguucagcgugaacgcgggcgugaccacccccgucuccaccuacaugcugacgaacagcgagcuccugucccugaucaacgacaugccgaucaccaacgaccagaagaagcucaugagcaacaacgugcagaucgugcgccagcaguccuacagcaucaugugcaucaucaaggaggagguccuggccuacguggugcagcugccccucuacggggucaucgacacccccugcuggaagcugcacaccagcccccugugcacgaccaacaccaaggagggcuccaacaucugccucacccggacggaccgcgggugguacugcgacaacgccggcagcguguccuucuucccgcaggccgagaccugcaagguccagagcaaccggguguucugcgacaccaugaacucccugacccugcccagcgaggugaaccucugcaacaucgacaucuucaaccccaaguacgacugcaagaucaugacguccaagaccgacgucagcuccagcgugaucaccucccugggcgccaucgugagcugcuacgggaagaccaagugcacggcgagcaacaagaaccgcggcaucaucaagaccuucuccaacgggugcgacuacgucagcaacaagggcguggacaccguguccgucggcaacacccuguacugcgugaacaagcaggagggccagagccucuacgugaagggggagcccaucaucaacuucuacgacccgcuggucuuccccuccgacgaguucgacgccagcaucucccaggugaacgagaagaucaaccagagccuggccuucauccggaaguccgacgagcuccugcacaacgugaacgucggcaagagcaccacgaacaucaugaucaccaccaucaucaucgugaucaucgugauccugcugcuccugaucgccgucgggcuguuccucuacugcaaggcccgcuccacccccgugacgcugagcaaggaccagcuguccgggaucaacaacaucgcguucagcaacugaggacuagugaagggaacacccaaauuuaauucagccuuaagcacaauuaauuaagagugaaacguaauuguacaagcaguuggucacccaccauagggcaugaucaacaccgcaaccuuuccuuuuucccccagugauucugaaaaaccccucuucccuucagcuugcuuagauguuccaaauuuaguaagcuuaaggcggccuacagaagaaaaagaaaaaaaaggccacaaaaguucccucucacuuucaguaaauaaaauaaaagcagcaacagaaauaaagaaauaaaugaaauucaaaaugaaauaaauauuguguugugcagcauuaaaaaaucaauaaaaauuaaaaaugagcaagaucuaaaaaaaaaaaaaaaaaaaaaaaaaaaaaaaaaaaaaaaaaaaaaaaaaaaaaaaaaaaaaaaaugcaucccccccccccccccccccccccccccccccaaaggcucuuuucagagccaccagaauu
